United States Patent Application Publication US 2007/0192889 A1 - sequence listing, part 2

SEQ ID NO: 2803 - DNA, 3305 bp, Zea mays
  Clone ID: TF_ZmC720_1
gtgcagcaggaaacgcaaaccggccaccccgcccgcactcgccgccccatctcttccgctcccgtcctctccgatccatccacgacgcgggaaccagcctccgaacagcagcttcccgccgccggcccccaagcctctgcgggcgtggttgcgtctccgcggtggcgccaccggagcggctcttgcgtccgagaggcgccctcgtgcgcgcgattttggccagatccgaccagcaatatttgtcgattctgaacaagcaccgtttgatgggcccggcaaaaggttctcgaacaattaacaagaccacagtaaaaggatatgaagatcaacagcagcatgatgacccatctagttcaagcaaagctaaacagaaaaagaggaaaatttcagatttagatcccaaatggagcaaggatgaacttacacgcttttatgaagcctaccgtcaacatgggaaggattggaaaaagatcagcatagcgataggcggtaagtcgtcggacatggtgcggtctctttacagtgcacatcggactttcttatctcttccagaacatcaagctactgccatggggtttatcgcgctggtgactggtcatcacaatgcttcggagaaaaccacgagtcatagaggatatgatcacatagccagagcatctggaaaggcaaggaaacatggagaacaacagaaatcaattgatggacctgacctgcacaactgtcatgaaggggaaattactggattttcagcttccttcaaaaaacgatactatggcgaattggtcaggaacagccgaaatcatgctgttcagaggcgtactcctcttataccagttatagctcctgcagacaggagtaccattgatgagcccacaccaggaattgaaaacgtcatcaattttaattctaccaagagaaaatatgaagcggccaatcatggctgtgctgttgctccaacaaataagtactcttcggacagagtttctggattcgctgaaacatacaaggctgatcaaggccatagttacttggataccatggaaattggggacatagcgatgtgtcaacaacattttaagaaaacacgaattcagcaaactgtggaggaaagtcagactggtatagttgagcatgaaacaacgatggcatctaaagaagggaataagctagtctcttctgtaaacaacaatcagatacttatcgacagtatttctgaagatgatatgttggtcttggatgtattgaatagcctggtgaatgcaccctctaaaatgtcagaactagagattaatattccttcaggttcgcttggaaaaactgactctgtgttaagggaggaaggccaccctaccattgatctgtctaaacaagggaagccagttcgtaaatccagtgcttccaagactaggaagaaaaaacctaagaagatattaggtgcagaggtgcctgctgaagcacaaaaaaaatgtgacgataatttagtcctgccggaaacactgagggttggtatcactgatgattcttccttgtgtactgactctggaagagcgaggacaccggaagcatctgaagatatttctgctgaagtccccaatacacaaacagaagccaagcctgaatttataatgtctggaaggaccaggttgaaatctcagatgcattgcaaaacaaagcctatgtcgtgcaatgaaggttcagataattttcaggcaaagaagttgctgcactgtttgtcatctgaaccacttcgtagatggtgcacatatgagtggttctacagtgcagttgattatccatggttttcaaataatgagtttgtgcactacttagatcatgcaaaattgagtcatctttcaaggttgactagatcagaatggagcgcgattcgaagctcccttggtaaaccgcggcgattttcaaatcattttctggcagtggaaaaagaaaaacttgaggattatcgggagaaagttagaaaaatctacgctcaactcaatgatggttcacgggattctctacctgcagacctagctaggccattttcaattggtcagcaggttattgttcgtcatccaagttctagggaactttgtgatggcaaagtggtgatgatggggccggattgttacaaggtccattttgatgatcctgaccttggtgttgatactgtgaaggacactgattgtatgccagttaattggctgcataatcgtcctgacaacatgagaaggaactacctttcaaatgatgtgtacaacatactggagatggatcacattcctgaccttacaccaagtgagaacgggaatcatgctataaatggaactactgtattcgaggagctcaaaagtctgcgcttaacatcagatagacagcctaaggcagaatctattatacatagtgaacggccaccatataggagtacatctgatggccctacaagttctagtggtttctcttgcccagacaataatgctggtcacaacggtgaactagagtcatatgtagctgcattttttgaaaactcactatcacaagccaggcagatggttgacgattatatccaggcaaactctggtggtagtgatgatgaaaaggtatgcatgttaaatcaagtgacaggatgtctaggctcagattctcgtggcgtgcaacttccatctgacctgatatcaaactgcatcgcaacggttatttcaatcaagcgccttagcgactcgcgacatccatttggtaacgtagcaggcgtcttggagcatgctttatcaatgctgcgtccaagctgtccacagaacctcggagtttacacagaaataaagagagacctttgcaccatagcgaaccagatttttgcacttgtgccaacagcatcgggcaattgcagccctcctgtctcgcccatgtaactgggacctgccccggatagacccgttgccttcttgcaggccctgcagtagacacgctgcttcctctgctgtgagttcaaaacagaggttttgctgctgttgggagcttgatgttatgaagtccggttgaatggtagcatacggaggacgcaagtctgatgtgctgacttgagcttgtatatgcagcgtgcgatcattaattggctagcctccttgtaacctgtgtatatacctgaatgaataatttataggtccatatacagattcaggatagttaatatctgatatagtagtgaataaagatgtatttctgcagtcatgattctcgtcttatcgatatagtatggcaggaacgtttcttgataggaaatttacataataatattaggatagtgagct

SEQ ID NO: 2804 - DNA, 2063 bp, Zea mays
  Clone ID: TF_ZmC5585_1
cattgggtacctcgaggccggccggggcggccagcctaccactaccactctcgattaccagccctctcgccttctccgctcctccgtcgtcgccgaaccccatggccccaaaaccctaaactgagcccgccgctgcttctccagtccgcacgaagcgccccacaaaatgccgcggctgacgccggcgcacgccaccctcatcctggaccacgtcctgggcgatccctcgatccccaccgcagtcaccatcgcgttaatcgctgggatcccctctccctccgatccgaccccgcgcctccgccgcggggtccttctccgccgcctcgccaccgaccccgtatccgaatcctctctcgaaaccctccacctcctggcctcgctcccggcctgcgcctcccccatcgcagccgcccacatcgccgtcgcggcattcctcgcggcctccgcgcccgacttcgacgccgtcgccagggctctcttcgcgcgccccgacggccgcgcgcgccaagcggtccacggcggaagttcccccgcgctcgcatccgacgatgccatcgccacagtagaccagttcgaggctgccgtcgggatgtcctcctctcagaccatcctcagggtcctgtggggcaaccgggccgccgtggaggagcgggtccaggagctcctcgctgctgaatgggccgcgattggcccgtcgcggctcgaggcgttggctatgcggatcgtcggggatggggccgtcgagacatggggtgccgcagatgaggccatgcgtgccaatttgcgcatcttggctggggaagcaaaaacgcgcgagattctcgacaaacttgaaaaaactacctgcaacacaaatccaatttcaacaccagctgttgagaaggtgatggatgcgctcaaagcaagctgtgctgacctccacagcattgtggaggatccccttccagctgcaaaggcagttgcagatgagttattgactgcgaggatggaaaaattagttagcctgaatgcccaagaagtaggagggcagccaacaacttgtggcgttgcaggaccgagtattcataatgacaaagacaatggtccaggtataggcaaacctcacagccttatggagcggaacgcaacagcacgaacctctcagtgggaggagtcacttggtcttgatggttcggaaccaccctcaccaccgagaccacacttgcctagcccaaggagactaccaccttctcctttgtcaccgcctgggaacaaaaacaataatcggagaaaggcaaggaggtggagcttgttcgaagaagaaaccttaagaaagggtgttgaagagtatggtgttggcaattggagggatattctagataacaatgctgaggcttttaccggcaggacaccggtggacttgaaggacaagtggaggaacatgcttttccgttgatgtaacggggaaacatgtagctggacatgctttactagggtaaagtacctagcaattagcatgtagtcctcgtacatcacagcagactcttggtcaagcttttctggcagctgcagctacatgattttgtgtctcggtgtagtagcagccgcagcttttctggcagctgcagctacatgattgtctcggtgtagtagcagccgcagcccaaacggttggctttcctggcagctgcagctacagtattttgtgacggtatgcttaccgagtggctgattcgcgcactgacgtattatggactcgattttgtatttttattatgtacattgtcctgcatgcttgcattgtactttttttgggtggattttgcagcagcattgtgatcaagaaactagtgtgtagtgggccttttctgtatttttgttagatagtaaaatgagaaggaatttagaggtcgcattttatctcggctctatgaagcaaccatgggttgaaggtatcccaaacaaaccttatattttgactgcactccacccgagctaattacacggcatttagcttcttgtttatcatatatccaactacataatttcaatcctgtgaacccctttgatggcccccctgcgat

SEQ ID NO: 2805 - DNA, 606 bp, Zea mays
  Clone ID: TF_LIB4073-010-Q6-K1-H9
ccggtcgacccagcgttttgtgctaaaacttcagtccagctatctaacaagagtctacacataaaacatcagcactagttctgtttctgagaaagacaatccaaaccaaagatgtctgggtccaggaactcttcccgcaacgttaacattgattccaactggagcaaaaaggagaacaagctgttcgaggaggccctgggcggctatggtgagggcacacctgaccgctggcacaaggtggcccgtgccatgggtggcatcaagacagccgatgaagttcgccgccattatgagatccttaatgatgatgtcacgctcattgaatccggcggagttccattccccaattacaacacacagggagcttggaactaaggagtcaaggatgcatgtgaagaaccaccagacaggaactactgctacatgaactagatatcttaggtattgaaggaaatgtcctgatatgatgttgtattaagaagttattatgattgctcgggtaagaaataaaaggagctacagaatatagataagtgttttatgtgtaaataactataggttgtgagaaaatcatcagttatgctatagaaaccagggaaccctatc

SEQ ID NO: 2806 - DNA, 777 bp, Zea mays
  Clone ID: TF_ZmC2063_4
gtacacgggcggaagaggagggggggcttagaaccagagggcggctacctgtgaaggatacccgtgctgctggctgctgctgttcctcgagctagagccgtgtgtgggctgtgcagattgcagagcgcagcttccagtctcagcattgctttcaatggggaggcactcctgctgttacaagcagaagctgaggaaggggctctggtctcctgaggaagatgagaagctcatgaaccacataaccaagcacgggcatggctgctggagcactgtccccaagcttgcaggtacaaccatcaaaatcaaaatcaaatcctgcacgctttgctctaccttctcaattgtccatctccactgtttcctgctccttctccaaggtcacttctttctcccactcctctccctctcgtacctgctcaattgattacttaattaattaattaattaatggtggcagggcttcagaggtgtggcaagagctgcaggctgaggtggataaattacctgaggcctgaccttaaaagaggtgcattctctgaggaggaggaagacctcatcgtcgaacttcatgctgtactggggaacaggtaagaaagctaagcccaaaatcatcacaaacacacaattttgcacagaccgattgcttccaagcaagctttctttttaaccaggcctttttctttttttttcaacatccatggacaggtggtctcagattgcaacaaggttgcctgggagaactgacaacgagatcaagaatctctggaactcgagcat

SEQ ID NO: 2807 - DNA, 890 bp, Zea mays
  unsure (1)..(890): unsure at all n locations
  Clone ID: TF_ZmC141670_1
attgggacctcgaggcgcctcgaggccggccggggtccagggactcaataggccagtaggcgattacaagggtggaagaaacatctagccttaacattccaggctacagcctaacccctctaatggatagcagcagtggtagccaggacaagaaattcagagacaatgatcgccctgaagcaaaagaagctaatagcaccgcacagcatcttgttgacttcacggaagcagaggaagatcttgtttccagaatgcacaggcttgtggggaacaggtgggagattatagcaggaagaatcccaggaaggacagcagaagaggtagagatgttctggtccaaaaaataccaggaaagatgaaaccgaggccttagatttatatagatgatatatgcaagcatgtgctgataaataatgttaaactgggcctacgatgttaccggtttttcagcctgtgcacatcttgttatgacatgatgctaattttgcaaaagcacagtaagaaaatttacagaacgtcagaaaatatcaatcatgttttagaagatgtgtaacagtatagtatgccttaagaaaagatgaattttgcctcttgcaacttaacttgtgtaccggcagaaaacttcagtaacgcagcttctcatggaggatgtgagctgttaccagcgaactttaaaaaactccccagtgtgtatggaaaagaaagattcagcatcagaaacaaattcttaactagtcaactaccagcgaaagttgtccacaagtaatttgaggagcatggcgctcacaatggctagcgccctggacatccaggncattaacctatactggtcaggttcgttctttctgaggctttgaccacccggatcgtatatgacatgtgttttgcat

SEQ ID NO: 2808 - DNA, 611 bp, Zea mays
  Clone ID: TF_ZmC141670_2
cattgggtacctcgaggccggccggggtccagggactcaatagatcagtaggcgattacaagggtggaagaaacatctagccttaacgttccaggctactgcctaacccctctaatggatagcagcagtggtagccaggacaagaaattcagagacaatgatcgccctgaagcaaaagaagctaatagcaccgcacagcatcttgttgacttcacggaagcagaggaagatcttgtttccagaatgcacaggcttgtggggaacaggtgggagattatagcaggaagaatcccaggaaggacagcagaagaggtagagatgttctggtccaaaaaataccaggaaagatgaaaccgaggccttagatttatatagatgatatatgcaagcatgtgctgataaataatgttaaactgggcctacgatgttaccggtttttcagcctgtgcacatcttgttatgacatgatgctaattttgcaaaagcacagtaagaaaatttacagaacgtgagaaaatatcaatcatgttttagaagatgtgtaacagtatagtatgccttaagaaaagatgaattttgcctcttgcaaaaaaaaaaaaaaaaaagcggcc

SEQ ID NO: 2809 - DNA, 1220 bp, Zea mays
  unsure (1)..(1220): unsure at all n locations
  Clone ID: TF_ZmC141670_3
ccggccgggatcttgtccagggactcaatagatcagtaggcgattacaagggtggaagaaacatctagccttaacgttccaggctactgcctaacccctctaatggatagcagcagtggtagccaggacaagaaattcagagacaatgatcgccctgaagcaaaaggttcaccattttcttgctttgctttgttttgctttacctttgctcgctgcctcttctgaagtctgaacttgtagctttttagttagtaccattgtgttcaagataatagctcatatgactttgttatttcaagagatctcacaccaacatatattctaaacctccgtgctttattttctctccgtcccaaaaagaatacaattctagcacagtgttatgtcatagtatcgtaaatttgattaattatagataaaaaaagtaccaatatctatgataacaaataaatacgattagattattataagatgtgttttcataataaatttatttggagccataaatctaaatactattcactaaaaacgtgatcaaacatgaaccaatttaaccggcatgtaactcatagttgcattctttttgggacagagtgaatacatgaaaactaaaacagatggtaaacagtgaccatttaggatacactataactgacaaaaactgtggggacaaacaggacgccatgtgatttaccatctgaccagcctaatgaagtgcagaggatttagccccttcgaaatagggggaaattattcctaggaaaattgcaaattctcttggcgaacataggattggcaaaccataatatatttctatatggtttgttaatgtttttttttttcttactctcgtgatcaactatatcctttcacaattattgcagaagctaatagcaccgcacagcatcttgttgacttcacggaagcagaggaagatcttgtttccagaatgcacaggcttgtggggaacaggtgggagattatagcaggaagaatcccaggaaggacagcagaagaggtagagatgttctggtccaaaaaataccaggaaagatgaaaccgaggccttagatttatatagatgatatatgcaagcatgtgctgataaataatgttaaactgggcctacgatgttaccggtttttcnagcctgtgcacatcttgttatgacatgatgctaattttgcaaaagcacagtaagaaaatttacagaacgtcag

SEQ ID NO: 2810 - DNA, 129 bp, Zea mays
  Clone ID: TF_6165685
atcaactaccttcgggcggacgtcaagagggggaacatctccaaggaggaagaagacctcatcatcaggctccacaggctcctcggcaacagatggtccctgatcgccagccacctccccggccgaaca

SEQ ID NO: 2811 - DNA, 712 bp, Zea mays
  Clone ID: TF_LIB4835-010-R1-M1-G2
ggccgcgggttttttttttttttttttggaaaacatggcgacagacgtctgcccttatctaagtataaccaatattttctggacgtcctgagttacacatgttccagcgtgtagagaacattgtgatggataacgtggttacacctacttcaaataatatttactcatatataccacatcgtccagaagcgtacacgtatatctgcattacacggatcacaaaaaacccgagccttttccctgtagaaccttgccgtcctgcccagagaacttgactggggctgtgaagccacccccttgcgactgcagctcatgtagctccttcactcgcaacaaaatggatggtggtattggtatgatagaagggttagtcttccgtggacaggcaccatctttttgcgccggaagctgtgtctgggttgctctgatcagattacgccatttatccttgagatccactgaagtgcggtaggaatacgaggcgaaggacagttttctaatctcagaccacttgccagctccataccgagccacaccatccaccagcttcacgacctcactcaatgtccatgctcgatgatgcttccgcgttaaaccatgctttattttaggcttggaaacagcactgcagacctttgcttgtaggttccgaacccctttgctatcaactgcttctgcatgctcgttctcagaactaacctttagtggaacc

SEQ ID NO: 2812 - DNA, 1667 bp, Zea mays
  Clone ID: TF_ZmC152_4
ctccacgcgagcggacgacacgaagcggccatagccgcacgttgggatcccctccgctacgcctctcgatggtctccgccagcgcgccgccgccgcaggcccagtccgacgcggccgggtcgggggaggaagtgagcaagaaggtgcggaagccgtacacaatcaccaagtcccgggagagctggacggagcaggagcacgacaagttcctcgaggccctgcagctctttgatcgtgactggaagaagatagaggcttttgttggctccaagactgtcatccagattcatcttccatccataggaactctggcatgaacgtgcctgtttcttcatgggctcatagttccatcccacaagctgttgcttcatcaatggtgaaagatttaggtgctggaacaccaggttcaaacaatttttgctcaagtagtactgaaggccttccaagaacttggcaacctggtgaaacaaatgatccaataaatcaaattccgtcactccgccttatgccagattttgcgggagtgacagcttcttaggtagtgttttcgatccaagtacaagtggtcatctgcagaaacttaaggagatgaatccaattgacgttgagacggcactgttgttgatgaggaatctctccatcaatttaaccagtcctgattttgaagatcaacgcttctgatggacctgggctagggagctcaagaagttcagctctagcgacgagcgcgcctttcatgtaaggaagcgtgcacccttcctggcctttcctatccccaaaagctcggccatctaggctcgtgaaatgctgcttcagatcaaggctgtccttggaaatgggaagatgaaaggagaatctgggtaatgccggttgctccctttcccattctttgttgagttcagctttctgattggtttctggtggccctcttgatacggaacttgtgcgctccgtctgagaaagcatgtgtgcaaagtttcatttgaggagttgaggcgatcatggcgctgtaaaatgcggcttatcttcccccttcagggctggtttggtggaccaaccctcaaacatttgcaattcctatgtacgtctgtagtgcgtcaggtgttgttgcccacgtgtaaaaggaaaataaattcacaatgtaaaggagacttgtgcgttagcactaccatttgaatttatgaaatgtcaaagcagcctagcgagtttgtacttgccaaaaaaaaaaaaaaaaaaaaaaaaaaaaaaaaaaaaaaaaaaaaaaaaaaaaaaaaaaaaaaaaaaaaaaaaaaaaaaaaaaaaaaaaaaaaaaaaaaaaaaaaaaaaaaaaaaaaaaaaaaaaaaaaaaaaaaaaaaaaaaaaaaagggggggcttctttttaagggacccgggataaaacacccttgtggggggaaaaaacttttttttacggggcaaaattttttaatatgcggggtcggtaaaaacaaagggggcgaccgaaaaaaaaggcttgggaaaaaaaactaaatttcccaagtgggaaaaacccctttaaagaagtgggaagcattatggatgggggcattacgccctcctttaccgataaattcgccccctttatagcgaaaacaaaccccccttttagggccctataaatccgcatggggggggttttttcgcgaaa

SEQ ID NO: 2813 - DNA, 2543 bp, Zea mays
  unsure (1)..(2543): unsure at all n locations
  Clone ID: TF_ZmC21713_1
actacatctcgtcgtcgtcatccccgcccgtccctcgacacccagccgtacgatccgcatcccagatccatcccagccgcccgccggctctgccacccctccccggctggatcccctttcccttttcgaaaccacccttcctccgttcctcggctcctccttgcggtgagaaacacggtgtcgccctcgagcccgaccttttcctcccctcttctctagatcgcgacgaggcggactccccactcctgctgcccggagcgaagcggaccgcgtccccgccgcgtggcctgatcgatccctcagctctgccggtcgggccaatgctgcgtgcatcgagctgccgctgatcacgattatagggtttaatacttgtatattttgattgtcacaaatgttggatgaagtttgacttatctatggaaatggatgactcacatggcaccatggttaataaaagtgaagagaatgactttgaaaagaaaggcacttctgatcctgtggtttatcagctagttcgggttgaaggtgatggaacacttgttcctgctacagaggatgatgttttgcagtttgaacatttccttcacaacgagaaggttgatcttcctcctattgaagatgcagaccatgtggaagagtttttcaacaatgactgcatgttactgaagaagcctgacttggaagatggatcttccaaattggagactgtggaagcacacacacaaaaattgggtgccaacttagaggaaaacatattacagtcattggatgattcccttagtcctccctcagactttagaattcatagtcagcattcagataaattgcttacagaacaaggggcaaacgtcactcgacaggacaatgcttcaactgagactacaaaatcgacagtgttaaatgactcttgctgtgctgaaaaatataaggctgatgcctgctcaagatctgtatgcgacacatctacagatccatctgtttcgggagttaatagttccatgcctgatttttccatattaagaggagaagtctgtttggatgatcttactattagagaacttcaggaggcgtttagagccacgtttggccggcagactaatgtcaaagacaagatatggctcaaaagacggattacaatgggcttgactaattcctacgatgttccaagttcaagttgtgtactaaaagactacaaaattgaaggttaggatgccaaaaatgatatgtcagatctggatgaaagagctaagactgggcttagagctacttctgtggttatatatcaaggaaacgaaggggactctccatctagctcttactatcagagcgaggaccaggaagattcttccaagagggtgccgatccataatgatgaaccacaaggaaatctgctaggcgagcaatgcactgacaagcgaactagaaagccaacaaaaagatacatagaggagctatcagacattgagactcatgactcaactgtaaaaaattcttcaccagcaaaaaaggcctgcacatgatgaactgttaatgaaaccgcgagtagcacctttcaatgagactggttctctgggcacaatctatcctactagaaaggatacctttggaggatttagtgtacacgttccttacgtttcaaggatgagaagggggcgccctaggaaggacttcatttcatttgcggataagggaccctcggttgaacctaaagggattcagccatcagttgagatgatattagtgaaggatggtgacaagggaaaccacctgaggaaagtacctgaggttccactaaaggtaagttctgagaacgggcatgtagaagcagttgatagcaaaggggttcggaacctacaagcaaaggtctgcagtgctgtttccaagcctaaaataaagcatggtttaacgcggaagcatcatcgagcatggacattgagtgaggtcgtgaagctggtggatggtgtggctcggtatggagctggcaagtggtctgagattagaaaactgtccttcgcctcgtattcctaccgcacttcagtggatctcaaggataaatggcgtaatctgatcagagcaacccagacacagcttccggcgcaaaaagatggtgcctgtccacggaagactaacccttctatcataccaataccaccatccattttgttgcgagtgaaggagctacatgagctgcagtcgcaagggggtggcttcacagccccagtcaagttctctgggcaggacggcaaggttctacagggaaaaggctcgggtttttttgtgatccgtgtaatgcagatatacgtgtacgcttctggacgatgtggtatatatacgagtaaatattatttgaagtaggtgtaaccacgttatccatcacaatgttctctacacgctggaacatgtgtaactcaggacgtcccagaaaatattgttatacttagataagggcagacgtctgtcgccatgtattacaaacgtgtcaggcgtacacaatttaaaaggcaaatgcaaatctagacaaaaaaaaaaaagttagagtnnnc

SEQ ID NO: 2814 - DNA, 723 bp, Zea mays
  unsure (1)..(723): unsure at all n locations
  Clone ID: TF_ZmC881404_1
tgtggcggccgcttcgannggccggccgggtctgcgagaatgcaaaccacaaaacaaagtcaaaccagctgcaacgatcaagagcgaggcttccttgtccagctctccgctcagccgacacacacagattgacagatggcgtctatgtcgctgagctcgtcgagggcgcagtggacggcgaagcagaacaagctgttcgagcaggcgttggcggtgtacgacagggacacgccggaccgctggcacaacatcgcgcgcgccgtgggtggcaagtcggcggacgaggtcaggcgctactacgagctgctggtgaaggacttggagcacatcgaggccggcaaggtggccttccccgcgtacaggtgccccggcggctacgacgacgccgacagcgacaggctgaagcacctgacctgaagatctaggcggcaggcaagcatcatgagaaccactgaacaagtacgtcctacatacgtacacttcgcgccatgtgagtgtagcacgtgtggctacaaaagaagcaagccaagcgagtgggtcggacggattatctgttcaagcacgcatgtgaattagaattactactagcaatagctataggatgttgatcaatcgatctccgttccccccgtgttgcgatgtaaaatctcagcatctgtagcatatatattctgaggagtgaaataaaatacattcactagtttgtggacttttatttgtcct

SEQ ID NO: 2815 - DNA, 603 bp, Zea mays
  Clone ID: TF_LIB4742-061-R1-K1-D4
gggtccctcgaggccggccggatctatctgtttcccctttcttcttcttcctcctcttgattgataggtgcgccgaagcttgttttgttgggtggcctttgtctctgtcgtctcggcttgtctcgtcttcctcccgcccggccgccaccacctccaggctactagttatctattaagttcggccaaccaagcagctggatcaggtcggtcgacggcggggacagctcggagggaggaggcggccggagaccgaaggacgcctaccatcaactcagtcctggccgcgctgccgaaaaattaaaggaagaggacgaaggctgaccgatggacgatcgttatcctcatcatcagtcgtcgatggcgacaccggcagcagcaagcaagatgagcaagaagctgcagggcggtggtgagcgtagtagtggcagtagtagtaggggcagcggcaacagtgataagcagcagcagcagcaggtgccggcggcggcgatgaggaagggcccgtggacagaggaggaagacgctcagctggtctgaggcgcaccggcaagagctgccgcctccgctgggtcaactacctccacccggggctccggcgcggcc

SEQ ID NO: 2816 - DNA, 2498 bp, Zea mays
  Clone ID: TF_ZmC12732_1
aattcagttcgaggcgaggccctcctccatcccccctcctaggctcaccaagtcaccagtcactaccactccgccagccaggcgctccctccatttccgacgcggcgcgccgaggtctgcacggacgcgcctcggtcactccgtcttcccacctctccggtctccgctggtcgtggtctcgagttccctcgcttgcttacgggaggcaacgacacgaccccgattcgagtggcgaccgggggaaccgcgtcttcgttccgtcgggggccgcctccgggtactccattctccggccccgcgattcccttcctcgcctgctgctgaggatcaagtcctcttctagtaagacaccgcgggctccaggaggcgcggcccaggctgctgatcctcgcccctggaccggtagacactgtggtggtgactggtagtattagtgattttaaatggcttcagcaagaaaagtaagaaacgcgaataagcgttatgccaaaatcaatgaagactggcaggataaagatacaccaagtgtacctaaaagtaaagtgcgaaagaaaaagttatcggacatgcttgggtctcagtggagcaaagatgagctcgagcgcttctatggtgcctacagaaaatatggaaaagattggagaaaggttgctggcactatccgcgatagaacatctgatatggtgaaggctctttacaacatgaataaggcatatttatctcttccagagggaacagcaactgctgcggggttaatcgcaatgatgaccgatcactataatattctggatggaagtaacagtgatcgagaaagcagtgattcaccaaaagcttctaggaggctacagaagcgtggtcgtgcaaaacttcaatctgtgtctaagacatctgatacacattttactgatctgttgcaacctcagcctgcttcatcgagctatggatgcctttctttgtggaagaaaaaacgttctggagacctatttgtagggaaccggccacgtgctgttgggaaaaggactccaagagtacctgttgcaagcatgtaccatcgagatgacaggggtgcaccaaatagacaagctaaaccggatgctaatgatggtgatgatgaaggagctcatgtagctgcacttgctctggcggaggtacatcaaagaggaggctcacctcagatttcccatacacctcggagatctggtgatcatatgtttttgtctcctgctaaaagtagtggcagaaaaaacgctgattcagagatgggaagctcaaagctccatggatttcagttggatgctgattaccctgaaggtagcttgggaagtagggaagccgagactggtgattataccaaaggcacatcctatttgatagccaacaaaggatctccatctagcaagcctcagaagaaagtcaagaggcctcaaaagaggagaaaaaaagctgtacgcagaacggatgatcagtttgaggatgatagagaggcttgtagtggtactgaagaagggtgcagcatgaaaaaggcaaaagaggaaccagagctggagacattgggaaccaaaactgcatggccatctagcacatcaaataaaagaagtcgccaactcttttttgatgatgaaagtttggctcgtcctgcattacatactttagctgatctatctgtgaatatcctacaaccatcttctgttgttgaatctgaatcatcagcacagatcaaggatgaaaaaagggacaatgattctgatggaaagcctggtatacctgcagcagctgtatcggtgtatgagcagaaagataactccaaaagtacatcaaagaaactcaaaaggcagccagaaatggcaagcactgatatggttactaggaaaaaaggcaaacttgctaaagatactcatcctgatgggagcaccacttctgaagtaaaacagcaagcttgtacatgtggtgtgaaaacagaaaaaaagaagaaatcttccatgggaaagattttaaaagatgaaaagaaaatgccaaaagatgttgagaagactgaggtttctcctgaagaagagaagacatcttctaacaaaaccatggatatcgcagagacaactacacaagttgcaacaactctgcatgctgacttgatggcaaagggtaaaagccgtcgtaaactaggcattcaaaaatcactaactcaagaatgtaaacctgccgagggtgctggcgattctggaagtgataaattgtcttactcactaagtaatattattgatctcaaggacaaactctctcattgcttatcatcacgtttgctccgtagatggtgcatgtttgagtggttctatagtgcaattgattacccgtggtttgcaaagagtgaatttgttgagtatttgaaccatgtcaagctaggtcatgttccaagactgactcatgtcgagtggggtgtcatacgaagttctcttggaaagccccgtcgattgtcgaagcagtttttgcacgaggagagagag

SEQ ID NO: 2817 - DNA, 129 bp, Zea mays
  Clone ID: TF_6165699
ctcaactacctgcggccgaacatcaagcacggcggctacaccgacgaggaggaccggatcatttggtcgctctacagctccatcggcagcaggtggtcgatcatcgcgtccaagctccccggccggacc

SEQ ID NO: 2818 - DNA, 1038 bp, Zea mays
  Clone ID: TF_ZmC11324_3
ccggccgggctccttcccttcgcgcctaggggcggaaggccgccgtgcccgttcttcccagctgcagcaaccggccagtgcgcgcggttgcgttgcatttgcatctccaagcacctctcaggaaggacggacaacgagatcaagaactactggaacacgcgcttcaagcgccggcagcgcgcgggcctgccgccctacccgccggacgtcgagcggcagatcaagctgctgcgcgcgcagaacgtcaacccgttcgcagacgcagacgccgacgccgctcctctacgacgtcggaaacccgttcgcgttgctctccagcataccgtcactgtcgcagacggcctcgcactcgcactcgccactgatcaaccagaactacccgcttctgaaccagatgcaggtgttccaccacctcggcggcagtcagcagccgtcgttccccacgcgtccaggacggcagcgcggcggctttcggcgacatcgtctcctctcgcctgccgccactgccaaccgccagaacgcaggcggagctacattcgaaccaattcgacacctccagcagcggcgggctgctggatcagtcgatgctgatcggcgacgaacacctgctgcggcccaacccgagtatggtcaaggtctcctccatgcccgcgctctcctaccgtgagccggatgggtccaggatgctgccagcccatggcgccgggagcgacggcgacgtctcctcgctggggcactgccctccgggacaggacctccaccgtggacgaacacgaacgtgcgtacacgcggcacaaacacgatgatcatcgtctcaccatgtggttgcatgcatcgggaaaccaatgcgttttcagcggccgtgaagccggcgaagaggaggacggcgagcgaggtggggttctccgacatgttcgccgtcgcaccgccgggggattggttcggcggcgggtcgacggcgccatcgccggggccgtcatcggccgtcaccgacgaagagtttaacctggagatgcagcagttcatgtcaatgctacc

SEQ ID NO: 2819 - DNA, 1797 bp, Zea mays
  Clone ID: TF_ZmC9414_16
cctaaaaactaccccctgttatgcagagctagaccaactcatattcacgctcgcatccgtgtttaacataaactagtaccaatcaaaaacatccccaagatcatcatcaccaccatcatttccaagatcacgctcttcttccacattatccatctgttcgccatgctcttcttccacatcagccgcccatctgtacgtcatgctcttcgttcaaccaatttgaactattttcctcctcgtttaaatcatccagtacattctcatttccagggcctctttcacttgatgcaccatcttgtttttgtgtacttttaatatctggcagcacaacatcttcaatgttgagctgcttaattacctcctgagcgatgaactatagcatcatggactagcaatggattttttctctcctcagatttaaatttctgccgcacctgatggcgagtcttatcagggaataattgttgtatcattgcaaaatcgctaccaaattgtcgaagaccctcataaaacaagtcggtatctgattttgaccattttcctcgggctggtttgttcatgtagccatgtaggaatggtagttcaattttgttgcattttgtacatgctcctctgttatatcgttgtcaaagaacctagcttcctcatctctgtagcccaaatcatccatatcatctagttgaaagtttcttgtattagaggatggcccggatggaatcccttttggctgaaatcatcaagaaaatcattagaattagccaaaaaagcaaatataacaacaaaatgttggattgtgacaaaacctaaccctaaccagggttggagttgtattgatagattagagtacttgggcctggcccattacaaagggatagtctaacacccccgcagtcacaactctgtcctgtacagatgttgagactgaatcgaaattctaaaaatacactcgtcggtagcccctttgtgaagatgtcggcgaactggagcatggtggggacgctgagaacccgaacgtcaccggcagcgacacgctcgcggacgaagtgcaggtcgttctccacgtgcttcgtgcgctgatgctgcacgggattggtggagagatagaccgcgctgacgttgtcgtagtaaacgagggtggcgcgctgaaggggactgttgagctcatggaggagctggcgtagccaggaggcctctgccacgccgttggccacggcacggtactcggcctcagcgctggagcaggagacgacgggctgtcgcttggcagcccaagaaacaaggttggcgcccaggaacacggcgtagccggaggtggatcggcgcgtatcgggacagccagcccagtcagcgtcggtgtataccacgagctccaacatcggggatggtcggagtaggagaccgtggtcgagggagccgcggaggtagcgcagtatccgcttgagagcggtaaagtggggctcccgcagagtgtgcatatgcaggcacacctgctggacgacgtaggcgatgtctggcctgaagaaggtgaggtactggagggcgccggtcaggctgcggtaggatgtcgcgtcggcgaccggaggcccgtcgtcctcagagagcttagcctgagtgtcgacaggcgtggagcagggcttgcagtcagacatgtcagcccgctccaggatgtcgatggcgtactggcgctggtggaggaagagaccctgagggcggcgctcagcggtgatgccgaggaagtggtgaaggagccctaggtccttcatcgcgaactcccgctgaagggcgacgatcgtgcgc

SEQ ID NO: 2820 - DNA, 3903 bp, Zea mays
  Clone ID: TF_ZmC27529_1
gaaattgaaacagctccagttcataatgcaaaaacagttccttcagaagctggtgctatatctcctgtagtcgctgagggtaaggcctgtgcagctgctgatcttagctcattgaaagcttctgaagaagctgggtctcaaaatgatattgacaatggcaggctggaaacttcttcacgccaagctaatgctgattccatgaaattagaaattagtgatgacctaccagtgaagaaatggacataccatgatcataagtctgatttgctcagttctgtcacatctgcaaatagtgctatagccaaagaaattaatgaagtgctatttaaatcattgcctgctgatacacctcgccttgatttgtttgcatcaagtcatcttctgagccaaaggaagagtgatttgattgtcaaagaaaggcttggagtatgtaaaaccaggctgaggttgaaagagcagatgcttacaatgaagttcaaggcatattgtcacttgtggaaagacgtccaactattttctgcaaataaacagcgttcaaagtctaataagcgcactgatcagagcaaccgaacatcacaaattggatctcagaggcaacgctcctctaaccgctcgcgattaaccatgcctgctggtaatttaagtacattctcaactccagaaatgtcagatgttgcaatgaggttgttttcagagttcaaaattaagcggtgcagaaattacttgaaaatgcctgcactgattattgatgagaaagagaaggaatggttgaagcttatgaacaagaatggtctagttgaggatcctgttttagttgaggaggatcggatgatgataaatccgtatactaaggaagagaggacacgtagtaggacgggaagggcttttgaggcctagctctcgccctacaagctccgatggtgttcagaaacaaaagcggcctggtgatgtcaagttgtttggacagattctcagccatcagtcaaccctgcagagttctggcttgtcttgctttggtaacaagagcaagcctccctcaccattggacgacacttctgacataaatggaatcctgagtcaaatgctcgttcgcgtgatatgcttggggtagcatcagtaatagcagcccatggccttgaatatgcaaaacaagtggagaaaatttctgcgaaatccctcatccggactgcatatgggcccagtgtgacttccgtggctaataaatcttctgataaggagtgcattgaccatgtgcctttgcacgagagagaatctgtagcagctgatgtactagcaggcatatgtggcactctctctcctgatggaatgggctcatgcattactagttctgctgatcctggacagaagattagcatgaaaagagtggagcatgtcttgtcccaagaaaatgacaaaaccgttgaggaggaagacacactctctgatcaagagtgtgaagttgacccagttgattggaatgacgacgagaagtcaattttcattgaggctatgaataactacggaaaggattttgctcggatctcgtcatgtgtgaagagcaagtcatatgaacaatgcaaagtgttctttagtaaggctcggaaatcactcggtttggatttgatccatcaaggggcagccgatgttagtatgccagctagtgataccaatggagggaagagcgatactgatgaggcctgcgctgtggaaatggattcagctatctgtagcacacagtcatgttcaaagattgcgatggatgtttgtcctactgaaggagccattggagggcctaactctgttataatctctaagcaggcagaagcatatatatcaaatgggtgcaatgctgatgttaaaattgaggaagatgagaaggtagctgataaaaattgcagcattgttgatgataagaggtccagtgatgctactcacgaagctggtcctattgacatcaattgcccaggaagcacagataagctgcaaggaactgatgatgtcgttgacctagtaaacatgcatagtaatagtggcatcagctcttcagctaagcatgcagtggccattcactcggaaatgagatccactttacattctgtagaggtccttcaaacagacaaaggtgaaggtactggtactgatttgtcctgggtggaagaatgttcacaccatgctctggataacacaccaatgaaaaatggaaattctggtgccccggctttcttggcttcagatagtggtatcaaggacaatgttcgcatctcaaacataactgctgcttccaccgttagtcctgcattcacttcaagttatcagcattctgtacctggagatatgcccctgccaaaaccaaagccacttgttaccccgcttaccccaaaggatttaatgcctgtgcagttcagttcagtgcttcctgaccccactgcaattcgtttcgagggcatagcctcaataactacgcccaacttcgaggacactggcaacagagtcagtggtgctctaggggctaaagagatgagcaagtacccagcttttagagacccatctggtaatcagcaaagcaccttgttttgtaatattgatggttatatgaatcatcgtctgacaactgaattaccatttttttctgaaagaactgcgagtggcactgtgaatacttcacaggcggatcggttgacccaaacaaaattgcagaatggcaggtccagcagcttgtgccttcaaaacaattccgatggcattcaatggcccagagaccacgaaggaggactggaaggctctttgaggccttgctctcgcaatacaagctccgagggtgatgagcaacaaaagcggcctggtgatgtcaagttgtttggacagattctcagccatcagtcaaccctgcagagttctggcttgtcttgcaatggtaacaagagcaagcctccctcaccaaagatcgacacatctgtgagatccatgaacaatccaatggaccgtgtggtttgttcttccaggcctggcaccactccacatctgggtctggaggaaagattggcaaggtgctatggtcatctggatggtagcacggcacagcccgagccactgctcgtgatggcaaagcgccagcggtccttggccggcgtacagttttactcggctaagaacggcacgcttggtgtgttaccagattaccaacaaccttcgacgcagccacagcaatcagatcccaagcgtgtggaaaggttgtctgatccgcagaagaggaacgtgctggaactcatctcgggtttccagcagcccggcagagtcgcccgtttcgggggtgctggcatcctcgtaagcggcaacgtctcggaccctgtggctgctgctctcaaggctcagtatggtcccggttctaagattatgggcagcgacgtggatccttggacggacataggaagcaggtagcgccgtagcagctctactgcttctgttgctccttgtaccatatatttagttttggtgtaacttgaatgaaatcatcagaatatgagatgtggggggtggggagtgaatggctttcctgcccatactatctgtaggcttttggccagtagcagtcgggtttcgctgtttactggcattaacatttttactctttcttctgcagctccatacccttttggtatagcttgacatgccagcagtggcacagtgccgtaggttccctagaggtgaactagatgtttgtcagcatggtttgattttgccagcctatgcagaaaacctcacttggtctttgtaatgtggtaatgccatgtatcagtatcctagtctgatggagttttggttgagacagttctcattaaaggttctgtctagcttctggaacatcattgacattataatacgtggattaaggcattggccggc

SEQ ID NO: 2821 - DNA, 830 bp, Zea mays
  Clone ID: TF_ZmC42_15
ggccgcttttttttttttttttttgtgcagagtggtattggatttctactactggagccgtgaccggaggccgtctatcagtgaacagataaacagagaaagcggccatggttgagagttgagaggccacgaaccccaccaagattccacaaaactcaatcaccagaataaactccagccacttcggcatgcgccgggaatttgattcttctgcctaaaatagtcacgctaccttccacctccccctactactctccctcgtcttcttcgctaccaagatgatggcggaggcgtggacgccggtgctgttgccggcgacggcgccctgcttctggcagcaggacacgcactcggttttgtggcggagaggagacgcgtggacggtggaggagaacaagctgttcgagaaggcgctggcgcagatcgaccggaacgcgccggacaggtgggagaaggtggcggcggtgctgccctggaagacggtcgacgacgtgaggagccagtaccacgccctcgagaaggacgtgggcgtcatcgaggccggcgggctcgtgccgttcccgcgctacagcggctcggtcccgccgccgtccgggttcgccctcgaggactggggcggtggcgaccgcgggttcaggcgcgcgcgcggctcggaggagatgcaggagcggaagaagggtgtcccctggacggaggaggagcacaagtaagtaggcaacagtcccaccagcaccccgtcgccgccgtgctgggacgacgacggggtcgggtaggggtcgatggatgggtcgggtccgctcgccttttcccgatctgcaccaagcgacccg

SEQ ID NO: 2822 - DNA, 2080 bp, Zea mays
  Clone ID: TF_ZmC10388_1
ggtacctcgaggccggccgggccggaggctttcttctcttggcgcgcctctcctccgtcgcggtagggcagagccaaaccctaaccctagcttcccccattgcgccttcctcgtgaggccgtatacatggacgcgaaggacatactagggcttccgaagacccccttctcgtcctcccaggagaagaaatcgcggccgcccaaggagccgcagcgcaagcctgatggcgtctcgcgcgaggtctatgccctcaccggaggggtgggaatgcccccgctcatgccgaccattgaggcatcgcacctgaagaggcggcctgctgcggagaaagagaaggtagcatggcagtggttacctttcacgtcatccgcacgaactgataaccttcaactctatcactgggttagagttgttaatggtattcagccaactggggattatcagtttgcaaaatataacaagagggcggatgttcttaaatatacggatgaagagtatgagaagtatttagttgaccctgtaggcttggagcaaggaagaaacagatcaactatttgaattatgtgaacgatttgaccttcgcttcatagtaatagcagataggtttccaactgctcgcagtgtggaagatctgaaaagtcgttactattctgcttctcgggctcttctaattcatagagctaggtcattcgaagatgtttctgggaatccccttgtgaaggatgcctatgatgctgctcatgagactgagaggaagcgtgcattatcagcacttctctcccaaacaaagcagcaagaacgaaaggacgccgagactttagcagaagcaaaacgtatcatggaatctcgtgctgctagcaaaaatgttgatgtagctgtaatgcctccgaactctgataatgctatggtacctgttgatggtgtatctccttcaagcagtactcatccatctttagcacatccaaatacatcagctaacatcttgatacctaattcactacgaacgcttcgagtgtatttgagaacccatgcgcttgaccaaatggtccaagcagtaggtgcttcagctggccttagagttatcaaaagggttgatcagacactacaagagctagcggtgaatttgaagcctaaggtcccaacgaaagcagtttgcatagagcatattgaactgcggaatgagctactcacattgcttaacctacaaaagcagctgcaaaataaagaggctgaagtttcagctaaccgggaaagttccttcacagaggcaccaagcacacctaagcgttctaatagggacattgatcggcccttcatccctgatacaagtgggtttacaggtgaaagagcaggcaaacgggatcacaagcggaagtccactggaagatttatagatgcgcctccatcaccaccccagtcgaagcggcctagaaaattgaagggatctgactgatagtgctgttcaaatgtcaggatgaaaactctagtcaaacaaccaagcacttgcagtcttacagtagagatgaactagtagaacctaataggtcagcaacggcatcaatggaaatccgttgggctggccagtcatgcaggaaccgactttcgctgcttgccctgacttcgggccatatgctgggtggaccggttttggatttataatgtatctatctattattgtcatgtaatgttacacagataactgagaggtcgaaatcgtcacttttcagcagatttctgaattctgagtatgggagaccggtaagcccgacaattccgtttttgctcctgtccaaccagcacggtcaatcggttcacccaatagacgttcaacaaacaggctttgagagcacgctagtgcctgtttgttcaccatgccttcccggaagctcatctgacagctcctttactttgtttgggtactctattatttatcttaatctatatatattgaggtggattggggtgtaaatttgttaacttacacctcaatacatgggtattgggatgaatactagagtatccaaacaaagccagggtttgtttagtttgattggattggagtggatattgaagattataa

SEQ ID NO: 2823 - DNA, 790 bp, Zea mays
  Clone ID: TF_ZmC602324_1
ggaccctcgaggctgccggacggggggatccagaaaagcccgggtccactgctcctctcgtactcaacaaccctcacaccccccatggatcccatgttcagtagcgagtggagtgtctccgagatcaagatggcaaaatcactcatcgctagccgcaacaccagcagcaacttagctagcgacgacgacgcaagcaacaagaagcacagcgacatcgtggacgagctccaagcaaggttcccatggaagggcaagcacgaggtaattggcttgtatgttgacctcacgatggagatgataaatacaccgcctgaggtgggagatgacggacttgtgttggacgacgacaattttgggatgccagtggaggaacaaccacagatgaaatacactgggaggttttggaccagggaggagcacaggaatttcctccgtggcctgaacatgtatggtcgtggtaactggatgtacatctctagggacttcgtccccactaagacgccaatgcagatctatagccatgcacagaagttcttccgtaggtaggagcgcacctgcagctggaagcaacgccatgatatcaaatgatattggcctctatgatatgctgagccctagacaaataacggctcttagtttatctcaagatattgtccattatactataaagatatccttcctcggcagtggacggacatcaataacatgtactagttgttatttgtcgtttagtttatcctaagatgcatagggacatatatcccattgaaggacatatatatatagttgc

SEQ ID NO: 2824 - DNA, 514 bp, Zea mays
  Clone ID: TF_LIB5025-072-A1-XP1-D8
gccggccgttccgagaatcttcttccgtttccgtctcccctcttctttgttacaataaacaaccaatcgaagccccaggcaacatcgaccgactagagtagatagagctcagtggcggccgccaagaaacacctgcgccctaaggcgagcagcggcaggcataggatgggcaggtccccgtgctgcgagaaggcgcacacgaacaagggcgcgtggaccaaggaagaggaccagcgcctgatcgcctacatcaaggcgcacggcgaggggtgctggcgctcgctgcccaaggcctgtagctgcaagtccccctcgccggcggcggcggggttccggtttctccggccgctcgaggagggccagtacatataaggcaggcgtcgtcgatcacagtaggccggcagaagcaaacctgtaaaaacaaccacagaacagagtttctaatggagatgatgactgatgtggatggatgatgagagattgagaacaaaaaaaaaaaaaaaaaaggccccta

SEQ ID NO: 2825 - DNA, 1062 bp, Zea mays
  Clone ID: TF_ZmC87815_2
agctaaaaacgacttcagtccagccatccaacaagaagatcagtctacacataaaaccagagatgtctgggtccaggagctcttcgtctcacaacgttaccattgattccgagtggagcaaaaaggagaacaagctgttcgaggaggccctagcctgctacggcgcgggcacacccgaccgctggcacaaggtggcccgtgccatgggtggcatcaagacagccgacgaggttcgccgccatcacgagatccttaatgaggatgtcacgctcatcgaatccggcagagttccattccccaactacaacacgcagggagcttggaactaaggagtgaaggatgatgtgaagaaccaccagacaggaactactgctacgcatgaaatagatatcttagccattgaagtaaatgtgctgatatattgtgttaagaagtttatgattgctcaggtaataaataagaggaggcaacgttaacactgattgcaattatagcaaaaaggagaacaagctgttcgaggaggccctagcccgctatcgcgagggcacacctgaccgctggctcaaggtgtcccgtgccatgggtggcatcaagacagctgatgaagtccgccgtcattatgagacccttaatgaggatgtcacactcattgtatctggcggaattccattccccaactacaacacacagggagcttggaactgaggagtgaaggatgtgaagaaccaccatacatgaactagatatcttagctattgaaggaaatgtgctgatatgttattgtattaagaagtttatgattgcttgagtaagaaataaaagaagctagagaatatacataattgtgttatgtgtaaatagctatagactgagcaaatcatcagttatgctatagaaaccagggaaccctctgtctgcccatagctaatgtgtgctgtgcaattatggtcccctatgaatgaatgcttgtacagtaaagagtgatgtaaaactcttgtactagtttgctgattaaaaagttgtgcttggtgaaaaaaaaaaaaaaaaaaaaaaaaaaaaaaa

SEQ ID NO: 2826 - DNA, 2051 bp, Zea mays
  Clone ID: TF_ZmC9414_14
ggaccaaaatttacaacttaatccaatagtaatttatttttcttctatttagcgcttgttcgtttttctctcaatccatgtggattggatgggtttaagttaaaatccttcatatttttttccaatctcatctaatccacatgaacaggaataaccgaacaagcccttatatggaccacgaggtggtggatgttagaggctataagggttcatttggtgacaagggatcactgagggattggaggctctcaatctcctccaatcccttcatgatacctagtcaccaaatcagccctaaaagagattctttgtatcccggatgcaaagaatttttttttcctaaaaactaccccctgtcatgcagagctagaccaactcagatattcacgctcgcatccatgtttaacataaactagtaccaatcaaaaacatccccaagatcatcatcaccaccatcatttccaagatcacgctcttcttccacatcatccatctgttcgccatgctcttcttccacatcagccatctgtacgtcatgctcttcgttcaaccaatttgaactattttcctcctcgtttaaatcatccagtacattctcatttccagggcctctttcacttgatgcaccatcttgtttttgtgtacttttaatatctggcagcacaacatcttcaatgttgagctgcttaattacctttttgaaatacaaattatctcctgagcgatgaactatagcatcatggactagcaatggattttttctctcctcagatttaaatttctgccgcacctgatggcgagtcttatcagggaataattgttgtatcattgcaaaatcgataccaaattgtcgaagaccctcataaaacaagtcggtatctgattttgaccattttccccgggctggtttgttcatgtaggaatggtagttcaattttgttgcattttgtacatgctcctctgttatatcgttgtcaaagaacctagcttcctcatctctgtagcccaaatcatccatatcatctagttgaaagtttcttgtattagaggatggcccggatggaatcccttttggatcaacacgctctctagcttcttgtaacaacctgagatgtgatgcacaaagcttcatgggttttatctgctcacgaggtgtttccagtaaagccttaacctcttttggtatcctctgacgtattctgtgggttagcttcttctcaggcttctctgtcgattcatccttcaaggtccgtttgcggccccgtgaagacaccttgcttttatttttttgagctttctgctgctgtgactcttctacaccaccccttgactttttcctagccttatgcttattaccagtagtgtaatgatcaccagtatcgttatcttcttcagctaatgaaggttcgacacagtcttcaccaaaataatcatcaacagtgtgattaggtgtcccaactttttgcacctttttcctgcaacgtcgtttcatagatgatgctctttctccaacatccgattttggttgctgttgaacagcatgatctagtggctcccgctcatggtcctgctcatttgaatattggtccttggtaatagaatgcttttcagcgatatgacgagatgagttacttaaattttcatcagtcaatttgtcactacaggaatcgccgatgttacccatctcagaattggtatctatagggctagctatcccagaaacatccgatagagcaaaagatacagattttgattttcccttttctcttcctgggacttcgccaaacattgattgagtaccatcaataggaggattaattggttcattgtgattgtctaaatcaacatcagcatgcacagcctgtggtgaccaagccactggaccagtgatggtttcttgatctttaggttctttgtacatgtcattgttgctgtcacaaactccaactattggagcaacagcaacaacattaattttaatcgcagcaacctgggatgaagccttcccgagatttggttgcaaatcagaacgaaacttagctattgtttcc

SEQ ID NO: 2827 - DNA, 712 bp, Zea mays
  unsure (1)..(712): unsure at all n locations
  Clone ID: TF_ZmC2209_2
tcgcccacgcgtgccgccacggtccggaaaccataagagcttctgaagagcgaaatacttcagtctagacactagatacagtaagccttagcgcaccaacagaggatacttcaaatatgtctgcctcgcggagctcctctcccaactccatgtcacagtggagccagaaagagaacaagatgtttgaagaggcactcgcctactatggcgagggcacacccaaccggtgggacaaggtgtccagcgccatgggaggcatcaagtctgccgaggaggtgcgctgccactatgaaaatcttgattacgacgtcaagatgattgagtcaggcaatgtgccgtaccccaagtacaagacacagggattctggacccgaggttaaaaaaatgttggaggctcaaagaggcagaaaacaaagctctacggatccaagaaggaaccaaaggaaatccagctctggttggagaataaaatgatgaaccagtgtgtatatgtcaatatgtgtatagtatagtttatgatcaagtttatgtctgtctacctgtggttgtaggatcctagtgtacataagattgataaccacatgtattcattgtccccttgaactaaagttatggagggtgtaaagtctaaaagtcatgtatttatgcaaactaaaaaaacaatgcctcgtagcattcgttgcctcaaaaaaaaaaanaaaaaaagccccta

SEQ ID NO: 2828 - DNA, 1384 bp, Zea mays
  Clone ID: TF_ZmC2209_3
taagagcttctgaagagcgaaatacttcagtctagacactagatacagtaagccttagcgcaccaacagaggatacttcaaatatgtctgcctcgcggagctcctctcccaactccatgtcacagtggagccagaaagagaacaagatgtttgaagaggcactcgcctactatggcgagggcacacccaaccggtgggacaaggtgtccagcgccatgggaggcatcaagtctgccgaggaggtgcgctgccactatgaaaatcttgattacgacgtcaagatgattgagtcaggcaatgtgccgtaccccaagtacaagacacagggattctggacccgaggtaaagtccatggcacttcgaaagcaaactggaaacatataacataagggctttttttctgtactgataagcttttggttaactatatggatgtttgttggtgatagtcgtaagaagcaggcctcgggctaagagtaattcagtcaccatatcatattttttttatgaataggtcaacatgcatcgctatgccatcgatggctcaagaattcagacgctcgagcgtctgagtgttttatgttctttagctgttccattccatacatgggtgaccacatcaacattgtataggccaaattgcagacatccttgcctttggatctaattactcggtgtttgtccactaatgcccactaatagtctgggatccaaagtactatgacaaatatctcctacctccaatagaaaagtttggatcttgcactctaatccctcatgcatccagcttgcacccgacatgcagttctcatattactctaggagtcacaacttatgccaaaagggcatctccatggcctttttagcgtgtgactaggcaagctttgggtagttctttgttgtcctttcttttgttttttttttcaagtgggtgatttctggtagggaggtctttactaaaaagctatagtagcagcttcaaccgaaatcagtacaagcacatatcacatagtacaaattagaataaatgtttacaattcagagaagcttacggtgtgcatattgacttttgctttcaggttaaaaaaatgttggagggaggcagaaaacaaagctctacggatccaagaaggaaccaaaggaaatccagctctggttggagaataaaatgatgaaccagtgtgtatatgtcaatatgtgtatagtatagtttatgatcaagtttatgtccgtctacctgtggttgtaggatcctagtgtacataagattgataaccacatgtattcattgtccccttgaactaaagttatggagggtgtaaagtctaaaagtcatgtatttatgcaaactaaaaaaacaatgcctcgtagcattcgttgcctc

SEQ ID NO: 2829 - DNA, 493 bp, Zea mays
  Clone ID: TF_LIB3245-012-P2-N1-A9
tagaatagctatcacgcctcatgcacgcgtacgtaagctcggaattcggctcgagcactacgcggccatcgccgtacgttgagatggcctccagtcctcctctctatggtgtccgccagcgcgccagcggcgtcgccgtatgaccagtccagacgcggccgaatcgtaggaggaagccaacacgaaggtgctgaagccgtacaccatcaccaagtggcgggagagctagacggagcacgagctcaacaagttgctctaggccctgcagctatttgaccgtgactggcataagattgaggctccagttgggtgcaagaccgtcatccagattaggagtcacgcacaaaaatactttttgaaggttcagaaaaatagaaccagtgaacatgtgccaccttcacgaccaaaggcaacagctgcccatacatatcctcagaaagctcacaagactgaaccacactatagtctcaagacagagagatcttccatacat

SEQ ID NO: 2830 - DNA, 2297 bp, Zea mays
  unsure (1)..(2297): unsure at all n locations
  Clone ID: TF_ZmC395_1
attgggaccctcgaggccggccggaccctcctggcctcctgtcctgccctgcctttccccccgcatgctctcgctcgctctctcgttctcgtggttctcccgagtcccgtgccgctcgagtgcgccgtctgcgtctctagtggcgacgactgggcgaccgccgccgccgccctacgcaaggtgcccagctctccattttcggtcccttcgccggacacgagcacccgccaggataatatgttgtccacgcatgaggcaaatgctgatcagtttgatcttctttcttatggtaatctaaggggactagaggctagtagaagttctgaggaatctaattttggaaatgacttaaaggatggttcttcagtttcttctgagaacttcggctcctcttgtctgcctggcgagagctatcaatctgccacagtagatcatgaaaaacgacctctttctgatgtcaagacatgccaaattgcttgcaaacgtccaaagcaaacagatcactgtacctggttatattcctttgaggaacaccctttgaccagtgaagtgggaatatcttctccagctttatatgatggattggttgagatcaaacaaccaaatgacattcctgcaattaatggtgccacaacctgcagtggtagttcagtgatcccttgccgtaatcatgatcaatcaattttagtggaaaacttagacatacctgattgggcgacttccttccctggttattttgaagactgtgggccagttgttacatatagccatgttgatgacattggttcgcctagaaagggtgtgccaattggacctgagcaccaggctgacattccagaatggaggcccctaaactctatgattgtacctggtgcttcagagttttgtgctaatctggattgtagttctgcttccacttcagagtctgttcccagaggtgatgactatgtaagtgacaagtggatcaggtactgtgttgttccggtgacatgctgctcatctcctgttgactgggctggagacagcaaaatagattgcaactgcagtgacgagggttctatgaggtgttccagacagcatattattgaagcaagggataaccttaaaatgatcttgggacaggacaggtttcgtgagttaggtctttgtgaaatgggagaggatgttgctctgagatggactgatgaggaggagaagctattccaaagagttgttttcttaaatcctgtctccttgggcaagaacttttgggaccaccttccggatgcatttcctaataaaactagccaggagcttgttagctactattttaacgttttcatgctcaggaaaagggctcagcagaacaggtctgacgtgttggctgtggacagtgatgatgatgaactgcatggtgaacctctagctgagcgggtggaaggggatcctgcagttgagtcctctacacatgaacattctgtcagcaattctctgcccatggatgatgaccataaagagtttgaaggagcacagtttgatggatctttgtgtgagaagtcagtatacaatgcagtcgagtgcagacatctaccaaatcagatgcctgcagattcaaatacggtgaacactgcactagatgtttgtgaccaagataatggagctcagtgttcagagtttcacatgtcactgccgagcgatacttcaaacagtcttggggatcaaagtgcatctgtataggagatgttgtgtggacaaggctctttggccgtcgagatgtccaaccaagaccatgaacaacaatgaaatggataacacattcagtttggatctgacatctacttcagatgggtgctgttttgccatggcttggagttgtaaattcagcttcatctggagttgatagttcatgaagttgtacattcttcaactactatgtacttttcgcggcattttgttagcacacttggaactcaactgagcttccacggggttttgctgcccccaccccctaccccccatccccattcgagaaatcaaccttgttgtatgtaccatctgttgtattttcatcgctgtatgtccattcgagaaactgaacatgtagattgtaagagttgccactgtctggattacccgcggtggttttcgtttgcagaccgagtgctttcggaatcgattcatgcaaataatgtgctaccgacagactcccagttgaatccatttgaatgtgatacgtttgtcanaaaaaaaaaaaaaaggggcggcccgcccttttttttttttttttttttttttttttttttttttttttaaagaag

SEQ ID NO: 2831 - DNA, 878 bp, Zea mays
  Clone ID: TF_ZmC344_7
ggccgcttttttttttttttttttcgtgaaaacgatcggcaaatatattgggtatcgctgtttttctaaaactgttttcaaaaaaggaagcgccaatatctagatgatctttaattagtttgaacatgcacatacaatttcgcatgctcgatctattgattctctcattattactcgggcatgtactccccatgtcttggcgactagacgattagtcatgttattaatttcatacttactattctttcctatatgcatgttctcctgcagatggtcgaagattgctgccaagctaccgggcaggactgacaacgagatcaagaaccgctggaacacgcacattaagaagaagctgatcaagatgggcatcgatccagtcacgcacgaacccctcgaccggaagacaaccagcagcggcccggctacaacctctcagtcaaccaagtctgacgaggcgaccaaggagcagagcccgcagaacgacgacgccgtgataagggacgtgccggccgatggttgcagcccgacggaatcgagcacgaacaccgtgagcaccggcggaagcagcagcagtggtggcggcggccatgaccaagacccgctggtgaagtggcttttggaagaggagcctgccaccggcgacgaggcgtggctgaacttcactggcagtgtcgacgtggacgagttcagcagcattgccgccggtccggagttgttgccgtgggatggcgcgaccgactggctgctcgactaccaagattttggattgggggactcgagcttggtcgatggctacatggtcaacaacaacagctcaaacggagcaaagttctagctagccagccgaagatgtcatctcatctgcttgtgtgctttcg

SEQ ID NO: 2832 - DNA, 1414 bp, Zea mays
  Clone ID: TF_ZmC42_33
aagcccggcccaatcgccggctgacactcacaagaacctgcctccctcggtctggatcgctatctcttttctagcggctccagagggagggaaagctagcgcacagccgagagaagaaagcagagagggagggagaacaaagagagagagaaaaaaaaaaaaccagagaggttgagcaagaaccgaggcggatccgccttttgtccctcctgcccgagggctagcctgccgccgcccccgcgagagatcgagaggaggcgctgttcagttcaggggggtgagaagccgtgggggaagagatgatgcgggagacgtacatggacgtgctgccgccggtggaccacatagccgcctcacggagcggcggctggttcccgggcgcggcgcgtctctggacggcggcggagaacaagcagttcgagcgggcgctggccgggctcgacctctgccgcccggactgggagaaggtggcgcgggccatcccgggccggacggtgcgcgaggtcgtcagccacttcaagagcctccaggtcgacgtccagcagatcgagagcggcctggtgcccatgccggtctacggcgccggggccggggccggctcgttcaccctgcagtgggacggctgctacggccccgcggactcgaggcacaacggctaccgcttcggaagcggaggctgcgggaggcggcaccacggccgcaccccggagcaggaccggaagaagggcgtgccgtggacggaggaggagcacaggtcctatatcctatatgtggtgatgatgcgagagctccaccaaacgcctgtgtgagattggcgatgtgagtcagagttccactacctcctcggcgtctctctgcatcagctttcgcagctccctttttggccctgctgcttcccttgctcggaaaggcgtctgcggatccttgtgcgagcaccaaagggcgcttctctgtaggctgtagccaggccaagccccaaaaaaaaaatgcagccatcttcttctcttctgtgggtggttgctcgtgctttttctggctcctcgctctgcaagttgcagcgaaatgcagaacacgaggcacccactgatgatgatggagatggagggcactgttccagagaaggaagcttctggtgcgggggtgtgtgtgtgtgtgtgtctatctactgctgagcttgccgtcagtgctgctgcagcaagatctgatgaaaagcctggaattcttcaggctagttgccattgccagtcccagtcccagtcccagtcaccttctcatctctgatgtctttcagtccacatgattcagttcagttcagtgaacaaccgccgagacgatgttttcatcatcattattgtcgtttcgtcgccggaatagaagtaacttctgttctaaaaaataatttccttactttaaa

SEQ ID NO: 2833 - DNA, 1163 bp, Zea mays
  Clone ID: TF_ZmC29713_8
tgggtacctcgaggccggccgggttcaaggcctaaaggccgagcagccccagccggctgcggtgaagctacggcacctcggtgccttcagctgccttacgggagtaaggcagaggctggcgcataggcggtggttgagagcagcagcgacggcgttcttcgtacgccgatttctacggctcgatcttccgctcttctcgctaatctatttgcctccttcgtttctcggctccttaaaggatgggcagtcaacccctgagcgacaggctgcaaaacaccgtgatacaacagcgcaccggtcttgatgggaaatggtgttcaggcagcagttcgaggtactggacaggtctacctgaagttatggcgttggttggcgtcctgtccatttcgctttgctgcctcgccatcaccgccggccggtggtccctgatcgccagccacctccccggccgaacagacaacgagatcaagaactactggaactcgcacctcagccggcagatccacacgtaccgccggaaatacaccgccgggcctgacgacaccgccatcgccatcgacatgagcaagctgcagagcgccgacaggcggcgcggcggcaggaccccgggccggccgccgaaggctagcgccagcaggaccaagcaggcggacgccgatcagcccggcggcgaggcgaaaggcccggccgcggcggcgtcgagcccgcggcacagcgacgtggtgaacccgggcccgaaccagcccaacagcagcagcggcagcacgggcacggccgaggaggaggggcccagcagcgaggacgcgagcgggccgtgggtgctggagccgatagagctcggggacctagtctggggggaggccgacagcgagatggacgccctgatgcctatcgggcccggcggccacgactcggctgccctcgaagggcttggcgcggtcggctgcgaggcccaggtggacgacctgttcgacatggactgggatggcttcgcggcccatctgtggggcgggccggagcaggacgagcacagcgcgcagctgcggcaggccgccgagccgctggaagttgctgctgctgctgctgctgcgacggcggcccgcaccccggacgatcgcgagctggaggcgttcgagacttggctcctgtccgactcgttctga

SEQ ID NO: 2834 - DNA, 129 bp, Zea mays
  Clone ID: TF_6165769
accaactacctccgcccgggcatccggcgcggcaacttcacgccgcgcgaggagcgcgtcatcgtccacctccactccctgctgggcaaccggtgggcggccatcgcgtcgcatctcccgcagcgcacc

SEQ ID NO: 2835 - DNA, 709 bp, Zea mays
  Clone ID: TF_LIB4742-048-R1-K1-D6
ttgggtccctcgaggccggccgggatcgatctatcccactcaactcttctaactgcatgagtaatctgtttcacgtacgcaaacattctgcttatgttagtggatggaatgaaacgcacacaggtggtcgctgatcgccgcccagctgccggggcggacggacaacgagatcaagaactactggaacacgcacatcaagcgcaagctcatcgcccggggcatcgacccacggacgcaccagccggcgagtgccgccgcagttgcccccgccgccgccgccgccgccgccgcgcaaagcagctttcgccaccatggcgacgacgaggcggtggcgcggcgcagctgctcgcgagacagcggctgcatcgcggcgcacagcagcgacgacgacgacagcacgtccgggtccctgccacaccaacatgctgtcggcggcatcgacctcaacctctcgctaagcccaccgacgagccaaccgtcatcgccggccgccgccaagggagttgtagctagcggatatggccaagggagtgagagctagctgtacctcctctgcactgccacgatgatggttgtcaattgttgttagctcctcctcctcgtcttatgttcttccatgcaggccggaagatcctaaagagaacgtgtgcgtgcgtgtgagaattaaactcgtgtctgttgttagaaaaaaaaaaaaaaaaaagcggcc

SEQ ID NO: 2836 - DNA, 908 bp, Zea mays
  Clone ID: TF_ZmC14429_2
tgggtaccctcggggtcggccgggaatccggaggatctggtaagcaactaagcaagtgtactgaggacggaggcatcgatccagcgttccagctagcacgcacgcagccagcacccagcacccagcagtagaatctatatatcgtacgcaagtagtggatcgaggcatctatctgcagtccctttcttcttcttcctcttgattgataggtgcgccgaagcttgttttgttgggtggcctttgtctctgtcgtctcgtctcgtctcgtcttccgcccggccgccaccacctgcaggctatactagctagctattaagtccggccaaccaagcagctcgatcaggtcggtcgacggcggggacagttcggagggaggaggcggccggagaccgaaggacgcctaccatcaactcgcggtcctggccgcgctgccgaaaaattaaaggaagaggacgaaggctgaccgatggacgatcgttatcctcatcatcagtcgtcgatggcgacaccggcagcagcgagcaagatgagcaagaagctgcagggcggtggtgagcgtagtagtggcagtagtagtaggggcagcggcaacagtgataagcagcagcagcagcagtgccggcggcggcgatgaggaagggcccgtggacagaggaggaagacgctcagctggtatggttcgtccgcttgtttggtgaacgccggtggggatttcttagcaaaggtctcaggtttgcgcggtggcgggtgcatccgatccccaagcatgcatgcatgcatgcatatgtagatgcatgcgtgcgtggggatggattgatgtaagaatgggctatggcgatgggtgttgattaacatttcttttctctctctctcttggcgtgccctgcttcttctctgtgcatgcgcat

SEQ ID NO: 2837 - DNA, 129 bp, Zea mays
  Clone ID: TF_6165743
accaactacctccgcccgggcatccgccgcggcggcttctccgaccaggaggacaggctcatcgtccacctccaggcgctcctcggcaaccgctgggccgccatcgcctcctacctccccgaccgcacc

SEQ ID NO: 2838 - DNA, 687 bp, Zea mays
  Clone ID: TF_LIB5117-013-A1-PF1-C4
ggataaactccggccactttttgtagccgcccggaatttgatactcccccggtcctcccctatataggcatgcctccttccacctctccccttcgccactttcctgccttcctccattgctcgccgcccttaagccagctcaggtagcaactagagccgacatgatggcggaggcgtgggtggacgtgctgccgccgccggcgccctacttcgccgggcagccgtgctgggccgtacagcaagagcgtcgtggaggcggcgcctggacactggaggagaacaaggtgttcgaggaggcgctcgcggcgatcgacctggacgcgccggaccggtgggagatggtcgcgctgatgctgcccaggaagacggtcgccgacgtggtgaaccactaccgggccctcgagaacgacgtcgggttcatcgaggccgggctggtcccgtttcctcactacgacagctcgtccccttcgtccgggttcactctggactggggacggcggcgccgccggcgccggcgggttcaggcgcggctactgcctcaagcgcgggcgcgccgaccaggagcggaagaagggcgtcccgtggacggaggaggagcaccggctgttcttgaaggggctgaagaagtacgggataggcgactggaggaacatctcgcggaactacttgacgagccgcacgccgacg

SEQ ID NO: 2839 - DNA, 509 bp, Zea mays
  Clone ID: TF_LIB3732-036-Q1-K6-G4
ccggctgcggaggtgctgcgggggtggggggggaggtaaaaaaaaagccccttcacgcccggagaggaccccgctatcctggcccctcacgccctgctgggcaaccggtgggccgggctctcgcgccttttgccggagcgctcctacaactccgctaagaaccactttatctgggggggggggctgaatctcgccaccgactcggcgacctccatcggcgagggagtgctgaccatccgtgcaagcgctcaacccctggcccggggagcccatcagcgtctgaccgaaacgacctcagccactgctgcagcaccattcacgtgttccttcccgtgccgcgcgccctaggcttcaacgccatcatcgccgaaaacgttcgccctcttttctcgacagcaatcctagacgatgacccgctcaccatcctctccctctcgctgccggagctggaccattcgccttctggcttccaccactacagcgcccggagccactttcaggagctctcc

SEQ ID NO: 2840 - DNA, 676 bp, Zea mays
  Clone ID: TF_ZmC344_3
gctggcggtcgctgcccaagcggcgggcctgctgcggtgcggcaagagctgccggctgcggtggatcaactacctccggcccgacctgaagcgcggcaacttcaccgccgacgaggacgacctcatcgtcaagctgcacagcctcctcgggaacaagtacgtgcgcgacgcctccgccgctgctctgctccgtaccgtagtgcactgcacgcggacatgcctgcctctagaagtctagaggctggttggttgcctgccttgccttcgtcggcctcgacgccacccaaccaaaccaagctgaacgaacgtccggtccgattgcctctgccctctgcaggtggtcgctcatcgccgcgcggctcccggggcggacggacaacgagatcaagaactactggaacacgcacgtccggcggaagctgctgggcaggggcatcgaccccgtcacgcaccgccccatcgccgccgacgccgtgaccgtgaccaccgtctcgttccagcccagccccagcgccgccgccgcagcagcagcagaagccgaggcgacggccgccaaggcgcccagatgccccgacctcaacctcgacctctgcatcagcccgccgtgccagagcggggaggaggaggaggtggacctcaagccctccgccgccgtcgtcaagcgggaggttctgct

SEQ ID NO: 2841 - DNA, 667 bp, Zea mays
  unsure (1)..(667): unsure at all n locations
  Clone ID: TF_LIB3592-067-Q6-K6-D3
ggnacggntcatgataaatccgtggactcaanaacgaaaggnaaatttttatggagatgcttgctaaatttggcaaggatttctccaaaatttccagtttcatcacacataaaactactgcagactgtgtggagttctactacaagcatcataaatcagacagcttccgagaagtgaagaaactgttggaccttcatcaacagctgcctgccagcaattaccttggagcgaaatcaggacagaaatggaatcctgagtcaaatgctgcttctcttgatatgcttggggtagcatcagctgaagcagcccatgaccttgaatatgcaaacaaagtggagaaaatttctgtgaaatccctcatccggactgcatatgggtccaatgtttcatttgtgaccaaaaaatcttctgataaggagtgcattgacaatgtgcctttgcatgagagagaatctgtagcagctgatgtactagcaggcatatgcggcactccttctcctgatggaatgggctcatgcattactagttctgctgatcctggcctgaagatcagcatgaaaagagtggagcatgtcttatcccaagaaaatgacaaaaatgttaatgaggaagaatctctctctgatcaagagtgtgaatntgatccagttgattggaatgatgatga

SEQ ID NO: 2842 - DNA, 129 bp, Zea mays
  Clone ID: TF_6165689
accaactacctgcgcccggacatcaagcgcgggcacttcacccccgaggagcacaactctatcctccagctccacgccatcatcggcaacaggtggtccacgatcgcggcacagctgccgggccggacg

SEQ ID NO: 2843 - DNA, 792 bp, Zea mays
  unsure (1)..(792): unsure at all n locations
  Clone ID: TF_LIB4758-049-R2-K1-E6
cccgctcctgcgctacgctggagaggagtcgtccgccgcgacgcccgagggctccggatccgccgcctccgcgcccaaggacgctggaggaggaggaggaggaggcggtgggcaccgacgcgaagaacggaagagcggcgtcggcgttgacgtggggaagagtagctctaaggctgagcaggagcggcggaagggcatcccgtggacggaagaggaacacaggttcctagcagatctccacgtgttctcgccttcaaaagcttacacctttttggtgggtgcaggttgttcttgctgggtctggacaagttcggcaagggcgactggcggagcatctcgcgcaacttcgtcatctcacggacgccgacgcaggtggcgagccacgcgcagaaatacttcatccgtctcaactccatgaaccgggaccggcgccgctccagcatccacgacatcaccagcgtgagcgcgggcgaagtcgccgcggccggcgcacccatcacgggcggcccaaccacggcgggagcgatgccgatgggtcccgcgggcatgaagcaccaccaccaccacccggctccgccgatgggcatgtacgggcacgcgcccatgggccacccggtctcggggcacatggtggcgccggcggnccgtcgcacgcccgttatgttcccgncgggtcatcactcgccctatgtcatgccagtgggatacccggcgccgnccgggcagatgcacccatgatcatttacccggcatttgcacatctgcagagctgcatttcggtgcttggtcttt

SEQ ID NO: 2844 - DNA, 817 bp, Zea mays
  Clone ID: TF_ZmC42_27
atcacctgagtagatttgcaacttgcagttaatcaactatcaacaattattgcatttaatccggggggaattttcgattttctttatcgagtagagatctgactctctcttaaacagacatttactgaagaagatcgtcatgtttctgttcttccaggttgttcctcctaggcctgaagaaatacggcaagggggactggaggaacatatcgcgcaacttcgtccagaccagaacgcctactcaggtggccagccacgcgcagaagtacttcatcaggctcaactccggcggcaaggacaagaggaggtccagcatccacgacatcaccacggtcaacctgacggacgaccagccgccctcgccgtcccagtcctccctgatcaccagccagtcgaacgcaccagctccagctccaggtccggctccggccgcagggatatgccaggtcccattggcggccgacgccaagcgacacggtgccagaactctgcccttcagctcaccgaacaggacctctgcggcgccggcctacaggatggagtttcatgaccaacagggcctgcagtgtggccctctgcatgatcagttgctcgccagccagagcgttctgttctaggcgcggtggcagcccaccctgcggcatggatcgaccaggtcaggtgcctagtgtataatacttgtggtatcgctgtagcttcagcgcctgtattgaagggattagccttttgggagcataacagaaaggaggtcttcatttcatggtggtccataatttgttggagaatgtaacaaaaggaacgccgagaattcgatgcc

SEQ ID NO: 2845 - DNA, 691 bp, Zea mays
  unsure (1)..(691): unsure at all n locations
  Clone ID: TF_LIB4978-036-R1-K1-C1
gtccctgtggcaattaatcccctcgccttcttaaccgccagtcctccgccacctctccacccaacaacaaaacaagcctaatgggtaatggcttcctcagttcctctccatctcacgccactgcgctgccctagaaccttcgccgccgcccctctttaggattaccgtgtccccgatcgccccctggcacgcccgccccgatcgccccctggcacgcccgcccggatcctgcaccggaattccgtgtggaattccggacccgatcgaaatcgaaccgcctccctgcgtgctcccctgatcaagaaattctcacgccgcgcgaacgcacgcctgaggcggttggatcctctggtggggttccttggtctcgatttngctgtgtgtggatgggggcgccgaagcagcgctggacgccggaggaagaggccgctctcaaggccggcgtcgccaagcacgggcccggcaagtggcgcaccatcctccgagactcggacttcagcgcgctcctgcgcctccgctccaatgttgacctcaaggtgacgctcggatcgccagggagggtgggcgggtgggtttttggcgatcagctgaggggagtatggaggaagtctccagtctttttagtgggttagactgaatgaaagaaaatcgcggttttgcacggtccgtacagcctgacgtgttcttattt

SEQ ID NO: 2846 - DNA, 457 bp, Zea mays
  Clone ID: TF_ZmC42_28
ggatccgactctctaggacagtcatgtactactagcttgttgcacatatgatggccagcaaagcaagaactgatcaaaagttagtagcactgaacaagatcacgttttttttgtggttgatgttcttggggccaggctgttcctcttaggcctgaagaaatacggcaagggggactggaggaacatatcgcgcaactacgtccagacgcggacgcccacgcaggtggccagccacgcgcagaagtacttcatcaggctcaactccggcggcaaggacaagaggaggtccagcatccacgacatcaccacggtgaacctgacggacgacgagcgggcgccctcgccgtcgcggtcctctctgatcaccaccaccaccagccagccaaacgcgccggctccggccgcagtggtgataggcggccccttctcgtcgtcgtcggcggcggcggccgaggcc

SEQ ID NO: 2847 - DNA, 1175 bp, Zea mays
  Clone ID: TF_ZmC11324_2
actcctataggggattgggaccctcgaggccggccagggagctggcggacggaacgacgacgatggcgaggagcggcggcgggatggaaggcaacaagtgggcgcgcatctccaagcacctctcaggaaggacggacaacgagatcaagaactactggaacacgcgcttcaagcgccggcagcgcgcgggcctgccgccctacccgccggacgtcgagcggcagatcaagctgctgcgcgcgcagaacgtcaacccgttcgcagacgcagacgccgacgccgcccacgccaacgccagcgccggccttccggcgccgccgctcctctacgacgtcggaaacccgttcgcgttgctctccagcataccgtcactgtcgcagacggcctcgcactcgcactcgccactgatcaaccagaactacccgcttctgaaccagatgcaggtgttccaccacctcggcggcagtcagcagccgtcgttccaccaggacggcagcgcggcggctttcggtgacatcgtctcctctcgcctgccgccactgccaaccgccagaacgcaggcggagctacattcgaaccaattcgacacctccatcagcggcgggctggtggatcagtcgatgctgatcggcgacgaacacctgctgcggcctaacccgagtatggtcaaggtctcctccatgcccgcgctctcctaccgtgagccggatgggtccaggatgctgccagcccatggcgccgggagcgacggcgacgtctcctcgctggggcaatgccctccgggacaggacctccaccgtggtgcgacatgggacttcaccttcgcggccgtgaagccggcgaagaggaggacggcgagcgaggtggggttctccgacatgttcgccgtcgcaccgccgggggattggttcggcggcgggtcgacggcgccatcgccggggccgtcatcggccgtcaccgacgaagagtttaacctggagatgcagcagttcatgtcaatgctaccactgtctgacgagcacggctggaacgcataatgcggccgggtaaaatggaaatcgaaaactgtgtagagcgtgtgtctccttgcttctgcgacgagaatggtgtgcgcattgtttttgtaatgtgcccactcttggatctttatctgttctagacgtcgattgagtttc

SEQ ID NO: 2848 - DNA, 1084 bp, Zea mays
  Clone ID: TF_ZmC5904_1
gccgagtgaactggacaagataccgagtagaatagaatagcgaagaagaaggatagcttgttggattgagttttgaacatcatttttctatttttactgatgcttatcaatttagttaatctcttggagttgctcttataaatgcgcggcgatcaacccatgaagcaaacctcgcatgcatggtggcgttcacgtggttgttggcgcggccatgatgctcttgctggacgaggagctggtcagcctcagtgccctcatggtgctcgctagcacccaagcctagctccagtggctccacgagccggtgccccttgtgctcccgccgttcttgtcgttgggtgccgagagccagtaggatgacgaaggcggggccgcagtgcctaggcagccaccgaagaactcgacgcacttgacgcggtggtgctggtcctgttcgtgttcctcgccgacgccctggtagcctagcgcgtccgcggccttgggcttggccgcttgggggcttgcagtgagactgtgggagtcgacgcggtggagcgtgcagccgccaaagccgatggagaggcgctccaggccaggaagtctcccgagaagctgtggctgtcgcagccgactgagcgcgacctcgccaccttccgtccgaacgacggcgatgacaacgagccctcggcccctcgctgcggcgggagggtgtgcgagaacagaaatacgtgagcgcccgcatgaaagaagggagatggcgaggcggacgagctagccaaagatgccgagtgaactggacagataccgagtagaatagaatagcgaagaagaaggatagcttgttggattgagttttgaacattatttttctatttttactgatgctcatcaatttagctaatttcttggagttgctcgattgtccattctctgaatgccaagtttccttttttttcccaggtggtccctgatcgccggtcatttgcctggccgaactgacaacgagatcaagaaccactggaactcgcacctgcgcaggcgcgggcgggcgggcgactcccgcgacgacggcgtcgtcgtcaacatcgacctcgtcaagctgccc

SEQ ID NO: 2849 - DNA, 1748 bp, Zea mays
  Clone ID: TF_ZmC9939_1
tgcttggggtgcaggtaccggactgccagtgtcggaccgacgcatgcgtccaggcgtccgcgaactcgcttctgagagtttccagatgatgatgagtacgacttggagcaagctgaatctcgtgaacataagagatggatggagaggcagaatgcaaagctacaagagaaggccaaaaaggtggaatatgcgcgagtgcgcacacttgtagacaatgcttataagaaagacccaaggatccagaggaggaaagaggaggagaaagctgagaaacagagaagaagggaggcgaagtatttggcaaagaaattacaagaagaggaagcagcaaaagctgttgaagaggaaaggataaggaaagaagaagagtctaagaaagctgcagaagctgctctacatcagaagaagctaaaggagaaagagaagaagctgctccgcaaagagaaaactcggttgcgcactcttgcagcacctgtcattgcagatagccactttggtctgtcagaggcaaatgttgaatcggcatgtgcttcacttgatatggaacagctgaagaagctctgtgatggaatggatggtaaggatgcagctggaaaggccaggttgctgagcaatgtacttcgcaatgaaagttcctcaaaggaagcaaagaaaattgaagggaatggtgtggagccttctgccccaaaatccaactctacaggaggtagagcgacagaaggcagtaacagcatattgaacagctatgagaaaaaagagagaccatggggaaaggaagagattgagatgcttaggaaagcaattcaaaagtatcctaagggaacatcgaggagatgggaggttgtttctgaatttattgggactagcagatcggttgaggaaattctcaaggccaccaagactgttcttctgcagaagccagactcatcgaaagctttcgactctttccttgagaagcggaaaccgacacaatcaattgcttcgcctctttcgacccgagatgaaattagttcaactgagggagctgggactgcatcgtcaaaggctgcagcacaatctgcgaatagccagacagccaatgagaaagctgctgctgatcctgtcacggatggaggaccatccgtgtcagatccagatgcctggacagatgcgcaggtcctggctctagtccaagctttgaaggcttttcccaaggatgcaagccaaagatgggagcgtgtggctgctgctgttccatgtaaaaccgtagtccagtgcaagaaaaaaagtagcggcaatgagagagaatttccggagcaagaaaagtggggagtaggctgaggcattgcctcactggaagtatattttgcaagaaagagtctggacggcaatatttatagaatggattcagcatcttagctagagaggtattgcttggcgaacctttcatctcatgccaccagtggtgaggataattttgttatggagctgtgacagctcatttattgtggctggccaccagggttgttttactttgagcagccgtagcaggatgccatcgaagctcatctattgttgatgggctgatggttggcaattttgccgcagtggttcgtgtgggattttgtttctgcaggctcctggggttgtatatgcgctgctgtaagccaatgaatgaattgtgagctattccaacattcttagagtcaattcatctcaggtttgatcaaatttatataataaaacactaatatttatgataaaaaata

SEQ ID NO: 2850 - DNA, 492 bp, Zea mays
  Clone ID: TF_jC-zmXLIB3527P015Be03d1
gggggcggcagcggcagcggcagcggagaggagcgccgccgcggggtgccgtggaccgaggacgagcacaggctgtttctggaggggcttgagaagtacgggcgcggcgactggcggaacatctcgcgctggtcggtgaagacgcggacgcccacgcaggtggccagccacgcgcagaagtacttcatccgccaggccagcgccgccagccgcggcgacaccaagcgcaagagcatccacgacatcaccaccccgtgatggctcctgctcgtggaggacaaagctagcaccgagagatccagacctggctactgctgctacctgcattttatctttacctttgcgagacgggaacaaaaaaaaacaaacagccgtccctgtggttgtagaaatgtaggcaaagctaagttagcctggctggaatctggggtccggtataactgtattaagcggcactacaatgactatcgaataaataagttttgcaagttt

SEQ ID NO: 2851 - DNA, 1797 bp, Zea mays
  Clone ID: TF_ZmC1981_1
cattgggtacctcgaggccggctgggatcgagtccaggccagcgaccgcgtttccgccttctcctccccttccacctccgatggccacaacggcgacaacgatggcgccggtgacggcgccggtggccacagccaacctcgaacctacaccaacacctctgcatccacgtcctgccgcgccacctcatctccgggcgctttccaccttggcccccgtcaagtcagaggctcctcccaccccctcgtcttctaccgccatcaccgccgcagccggagcggaggatccatcctacatcatcaccgtccctagttattcagcgtggttctcgttcgactccatccacgacacggagcgccgcctcctgccggagttcttcgtgggggaggccgccgcggcgtcagggtgccggggcccgcacgcgtacaagtactaccgcgactccttgatacggaggttccgggcgcggccgggtcgacggctcacgctcacggaggctcggaggggccttgttggcgacgtcggctcagtccgccgcgtcttcgatttccttgaggaatgggggcttatcaactacggtgctttgccatcggggtcaaagcaagctaaagagaagagggaagaggctgcacaacagtcctcgttgccttctggggcaattgcacccaggaagctctgtaccggttgccgcaccgtgtgtgggcttgcttactacgcctgcgacaaggcagatataagtctttgtgctagatgctatgtaaataataactaccggccgggcctgtctcctgctaacttcaagagagttgaaattactgaagatgcaaaaccagattggacagacaaagaaactcttcacttgcttgaggctgtcttgcattatggggaagactggaaaaaggtgtctgaacatgttagtagtcggtcagaaaaagattgtattgcaagatttataaggctaccttttggagaacagttcatgggacacaaggaggatagaatgaggtttgagaatactgatgacaatactgatgagcctggagcaaatgtctcaaaacgactacgtctcactccactagcagatgcaagcaatccgattatggctcaggttgcatttttatcagccattgtgggttccgatgttgcctcagctgcagcgcaagcagctatttctgcccaatcccgtgttgaccttaatgacggcgagattgaaacttcaataaatagcatcaagcaagaagaatcatctcacacaaatgggctctcagccaacgtgttactgaaagaggcagctgctaatgcacgggcacaactcgagaaggaaaggaacagcatagagcaatctttatcaaacatagtagacgtccagatgaaggaaatccaagataaaatatgccggtttgagcagaaggagatgctgatggagaaagagcggcagcagctccattttctaagggatctacttttcacagaccaattggcagtcatgcagcatcaacaaaggagtccagctgtagccacagagtgcaagggtgatgagaagccaaagcccgtggctagcatgagttgatacgagtagatcctcagcgtagcatggtttcacttcagatgtagcattggagctgcgttcatccgcatctgccgttgctgttaaatttgatggtgtttattggatggtgtttctgtccctttcccttcttgcaccacagatgcctggagtgcaagggaagttacgactaccgattaccacaaaaaaaaaaaaaaaaaaggcccctagggcctatctttgctggtggcgc

SEQ ID NO: 2852 - DNA, 1361 bp, Zea mays
  Clone ID: TF_ZmC5277_1
taaataagaattgctgacctcgaggccggccggggcgacacctcccaataaaaacgttcctccccgtcccactcgccggagcctggccgacgggatgcctcgagattcgcgcccagccgggatgcgcctcttcggcgtcaccatcgcgccggcgccggaggcggatccaccggtacgggatccgagccccaacccgcccgtggcggccagggaggacgtgatgcgtaagtgcaagagcatgggcaacctcgccgcccttggcgctgtcgtggacggtggaggaggtggtgcggacggcggaggcgccggcgacggctacctctccgatggcgggctgatgcagtcgtccgggaagcggcggagggcgcaggagaggaagaaagctgttccttggactgaagaagagcataggacatttcttgctggtcttgaaaagctagggaagggagactggaggggcatagcaaaaaattttgttaccaccagaacaccaactcaagttgcaagtcatgctcagaaatattttcttaggcaaactaatccaaacaagaagaagcgcagatctagtctttttgacatgatgccaagagagctgtcaccagcaccaaattgccccatattaccaccatcgatggcaaaagtacacgatgtggtagctatgacgaaacaacttcagaatagcaacttggaaggaacctcctcttcaaatgcagcatctcaagttggaagagatctccccccagttccatcttttaaggcaacaaatatggatccaagtttcagcaaatttagccacatggagcgcgtctggagaactccctacccattcggaccagttcccagagcccctgaagggacgccttcaccaacggctgctgctgctgctgctgctgctgcggctgccaatgcagctgttccggtctctcaagctaacctgacgactgcctgtactagtaacacattcttgagccagccaaagccaagtgatactccgtcactgcctccgaagggaggtcctccatcagaggaggacggtttggaactgactgttgccccaccctcccaacagaacatgacgaacatgtcttcccagaatgcggtaggcgtgatccaagtcatctaagctaatatattttattttattttatttctctctctctctctctttctctctagaagttactgtggctgttgacagttattgaccgaataaatattaacattgtattagcaatactacatgaataagaagagcatgaggtataagcccatcatttgccagtaaaaaaaaaaaaaaaaaaaaaaaaaaaaaaaaaaaaaaaaaaaaaaaaaaaaaaaaaagagggggggcgccgtgtacc

SEQ ID NO: 2853 - DNA, 585 bp, Zea mays
  unsure (1)..(585): unsure at all n locations
  Clone ID: TF_LIB3900-001-Q1-N6-F1
aattaagctatcgatgatcgatctcgtcttgatgtgctatccatgcttgaattagggttgaagaggaccggcaagagctgccggctcaggtggctcaactacctgaagcccgacatcaagcgcggcaacctgacgcctgaggagcagctgctcatcctcgagctccactccaagtgggggaacaggtggtcgaggatagcgcagcacctgccggggcgcaccgacaacgagatcaagaactactggcggacgcgcgtgcagaagcaggcgcggcagctgcgggtggacgccaacagcgccgtcttccgcgacgccgtccgctgctactggatgccgcgcctgctggagaagatggccgcgcaccaccacggcgacggcgagctgccgccgccactgcacccctcgcacaacatcgccggcacggcctcctcgcgctcgccgccggcccacggnagccagcaggaggacccgagtagtagcgcgccggcggccagcggccactacctgcagcaggtcgacccgagcccgagcacgtcgacgacgtccgggtcgacgacctcggccgcgctcccgccggtgccctgc

SEQ ID NO: 2854 - DNA, 399 bp, Zea mays
  unsure (1)..(399): unsure at all n locations
  Clone ID: TF_ZmC40061_1
ggtgatagtaaatgatcaatggggagacagccggctgtgacaaggagggggtgaagcgagggccatggacagcggagaggacaagaagctcattagcttcatcctgacacatggccggtgctgctggcgggcagtgcctaaactcgcagggctgcttcgttgcggcaagagctgccgtctgcggtggactaactatcttcgccctgacctcaagcgtggcctcctcagcactgccgaggagcagcttgtcattgacctccatgccaagctcggaaatagatggtcccagattgctgccaagttgcctgngagaacagacaacgagatcaagaaccactggaacacgcacatcaagaagaagcttgtcaagatgggtgtcgacccggccacacacgagcc

SEQ ID NO: 2855 - DNA, 858 bp, Zea mays
  Clone ID: TF_ZmC2941_8
gtacctcgaggccggccgggaaccaaactcctggtcttctcttctccactacccacccgcccgcccccgccttcttctccaccactgccccgccgctaaccaaccactcgtgcgccacaagtctcccgtcgtggaatagggcaaaggccaggcatctcgcttctgtcctctgtcgaggggatcggacccgatcggagaaagaatgggctcggaggcggactgcgacaggatcaggggcccgtggagccccgaggaggacgacgcgctgcggcggctcgtggagcggcacggtgcgcgcaactggacggcgatcgggcgcgagatcccggggcggtcggggaagtcgtgccggctgcggtggtgcaaccagctgtcgccgcaggtggagcgccgccccttcacgcccgaggaggacgccgcgatcctggccgcgcacgcccggctgggcaaccggtgggccgccatcgcgcgccttctcccggggcgcaccgacaacgccgttaagaaccacgacagcgcccggagccacttccaggagctctccccctcgtcgtccccgtcgccgcagtctactccacccgccttccctccgcaggcggctccgtctcagtcgtcgtacgcgttcagcggcgagctggttgccgcgatgcaggagatgatccgcgccgaggtgcgcaagtacatgtccggcgcggggctccgcgccggatgcgggcccggggccgtgggcgaggtgtgcatgccgcagctggtggagggtgtgatgcgcgccgccgcggagcgcgtcggcgtcgtcacacggccgtagaaacccggaaacggaccaaatcagatctgatcaatgcgaagcattgtgtt

SEQ ID NO: 2856 - DNA, 523 bp, Zea mays
  Clone ID: TF_ZmC8104_2
cctggccgggagtcgcccgccctctagccttcgtgccgtctgcccgcccgccgtctagtcctctcttcgttctcttcctctcgcgctagcagagcggaggaggaggagaccaaccgggttggtggacgtgggcgggaggtgtgtgcgtgtgtcgtccatggggcggacgccgtgctgcgacagggcggccgtgaagcggggcccgtggtcgccggaggaggacgaggcgctgcgcagctacgtccagcgccacggcagcggcggcaactggatcaccatgcccaagaaagcggggctcaagaggtgcggcaagagctgcaggctgcgctggctcaactacctccgcccggacatccgccacggcggcttcaccgccgaggaggacgccgtcatcatgtccctctacgcccagctcgggagcaaatggtcgctgatagcctcgcagatggaggggaggacggacaacgacgtgaagaaccactggaacaccaagctcaagaagcgcctcctggccgcagcggcc

SEQ ID NO: 2857 - DNA, 723 bp, Zea mays
  Clone ID: TF_ZmC3484_3
gcaccggttagtgacacgcgcgcataccgacggacttggtagctgctcaccagctatccagatcattggctcattgctgcttccattccattccccccctcggcatcggccgcgcccgcccgtgtcgggcggaggcggacgcgcgcgggaatgggacgccacgcggcctccggcggcggcgtgcagcagaagctgcgcaagggcctctggtcgcccgaggaagacgagaagctctacaaccacatcattcgctacggggtcgggtgctggagctccgtgcccaagctcgcagggctgcagagatgcggcaagagctgccggcttcggtggatcaactacctacgccccgacctgaagcggggcagcttctcgcagcaggaggaggacgcgatcgtcggcctccaccagatcctggggaacaggtggtcgcagatcgcgtcgcacttgccgggccggacggacaacgagatcaagaacttctggaacagctgcctcaagaagaagctgcgtcagcgcggcatcgacaccagcacccacaagcccgcggtctccgccagcgtgccggcatcggagcagccggtgtcgcaggaccgcaagccgttggccgcagccgccgctgatggcggctccgacatgaagcaccagcaggtgttcgacccgttcccgctgaccgacagcttcggcggcggcttcggcgccgcactgtacggccacacgggcggc

SEQ ID NO: 2858 - DNA, 813 bp, Zea mays
  Clone ID: TF_ZmC864203_1
atcttctcgaccctaccaccgctctgctttcagccagatcgatcgccacatgcacattccctagcggcactagctatatctctgcagctagctagctatctagctgggtaataactaacgtgtacgtcgtacccagctataggacggcaatgaggaaaccggagtgcccagcggcgaacagcagcaatgcgggggcggcggccgcgaagctgcggaaggggctgtggtcgccggaggaggacgagaggctggtggcgtacatgctgcggagtggacagggttcttggagcgatgtggcccggaacgccgggttgcagcggtgcggcaagagctgccgcctccggtggatcaactacctccggccggacctcaagcgcggcgccttctcgccgcaggaggaggagctcatcgtcagcctccacgccatcctgggaaacaggtggtctcagatcgctgcccggttgccggggcgcaccgacaacgagatcaagaacttctggaactccaccatcaagaagcggctcaagaacagctcggcagcttcgtcaccagcagctacggactgcgcgtcgccggagcctaataacaaggtcgccgccgccggtagctgcccggatctttccgtcctagatcatcaggacggtggccaccaccacgcaatgacgacgacgactgcaggtttgtggatggtggactcatcctcctcttgtacctcgtcgacctcgccaatgcatcagtttcagaggccgacgacgacgatggcagcggccgtggccagcgggagctatggaggtctcgtccccttcctgacca

SEQ ID NO: 2859 - DNA, 1831 bp, Zea mays
  Clone ID: TF_ZmC8091_1
tatactcgaggccggccggggtctgcaaccttcactcccgactccacctctctccgatcgtctcatcttcttccttctcttccaccacatccttggcatctcatccggatcgaccagtacacgccccagtagtactaaagaaccagtttctgagtaaaacatggcggcgtcgccttccccgtccggcagcggcggcggcaaggccggcgtggaccggatcaagggcccctggagccccgaggaggacgaggccctgcagcgcctcgtgcgccgccacggcgcgcgcaactggtccctcatcagccgctccgtcccgggccggtccggcaagtcgtgccgcctccggtggtgcaaccagctgtcgccgcgggtggagcaccgccccttcacgcccgacgaggacgacgccatcctccgcgcgcacgccaggttcggcaacaagtgggccaccatcgcgcgcctcctctccggacgcacggacaacgccatcaagaaccactggaactccacgctcaagcgcgagcgcgagcgcgagcgcgagtactacgccgatgcgcgccccggccccggcgaccagcgctcgctcaagcgcaccagcagcgacgggccccccggaagcccgtccgggtccgacctcagcgactccagccaccagagccttcccaccgtgatgccgtcagccgcttctaccgccgtcacctcccagcagcagctacaacacgtgtactaccgccccgtgccgcgcgcgggcggcgtggtcctgctcccggtggcgccgccttctccgcaggctcctccagcaacctccttgtcgttgtccctctccctgccagggctggaccagcagcccgaaccatccccgccgccgccgccaacacctcaagcacaagcaagctcgccgttgagcgcggagttcctgttgatgatgcaggagatgatccggatcgaggtccggaattacatgtccgggtcgggcttcgacgcacgcgccgtgatgggcatggccgagatcgactagtttcagcggcaggggtcccaagacaacgaatcgccgatcgatcccagattcctttgttaatcagcagagcagaggccttcgttccatgctgctgctgtgctgcctgctggtggtactcagtataaccagtagagtttagagtacagtaccagagagacggacggacggacggcgagacctccgatatcgtcatgctgttcttgtacaggagacagcaaaaaagggatcgagaagatggatcagggagaagagagaggactcactcgtgtttcttggctcgtgcagatttgccttttggtttcgagtgcaaaattggaccactaagataaaaaggggtctcttcgattggcgggctcaaaaatttggtcgttcttagattattaggctagatgttgggattttatttcctaggtagtaagttttaaaaatatggattaaattttagtttagtgtgtcctaacacccactgaccaccgtgcacacacagaaccgtacggacaacactagaatggtctgcctgggagctgaggagctctttttttttgtagttgtggaccactgctgagctacttctagatggtatggtatggtatggatggatggaaggaaaggacgaagagaaaatatatggccatgatggctggcagacagggtagctagccggccgttggcagaagccgcggcagagttgagtgagtgacagctaactggctgcttgtcccagccgtcgatgacgatgaagtgtggtgtttttctttatgattcagcaaaaaaaaaaaaaaaaaaaaactcgagggagggccgcgtgtaccc

SEQ ID NO: 2860 - DNA, 808 bp, Zea mays
  unsure (1)..(808): unsure at all n locations
  Clone ID: TF_ZmC659_2
attactccgcggcatcacgcaggcaggcaggcaggctagccgtgctccctcccgtctcttctctcctctcccccaaagaggtcaaagacacagggagaggactcctccgcatctgcatccgtcctcctccgcgcgcacgaattcgagagggagaggagcggtaatggggagggctccgtgctgcgagaagatgggcctcaagaggggcccctggacgccggaggaggacaagatcctggtcgcccacatccacagccacggccacggcaactggcgcgcgctgcccaagcaagccggcctgctgcggtgcggcaagagctgccggctccggtggatcaactacctgcggccggacatcaagcgcggcaacttcaccgacgaggaggagcagtcaatcatccagctgcaccagctgctcggcaacagatggtccgcgattgccgcccggctgccggggaggacggacaacgagatcaagaacgtgtggcacacccacctcaagaagcggctcgacctcagcgcgcaggagcagcacgaggaggccaagaagcgcaagaagccggcagcggcggcgcggaagcgcgacggcaaggtcaagatgaggaagctcgacgcgctgaccgccaaggcggcgcccgtgctgtcctcgcccgagcgctccgtctcgtccacggtcaccgagtcgacgtccacggnnctccggcggcggcggagcagcacggcaactcgggcagctccgcgtccgcctccgcgtccgtcaaggaggagtgcttcacctcgtccaaggagtcggaggagtccagatcga

SEQ ID NO: 2861 - DNA, 1322 bp, Zea mays
  unsure (1)..(1322): unsure at all n locations
  Clone ID: TF_ZmC42_26
gggtccctcgggccggccgggtccatatccatccgtcccaacccatagagagccagtaaacaccgcgcacgcaaacgcaacagcgagatcgtgtcgagcagccggggcgacttgcgaggcatggacttccaccacggctgccacagcagcagcatccacgcggcggcgccgccgccggcgcggccgtggagcaaggaggagaacaagatgttcgagagcgcgctggtgatgtggcccgagcatacgcccgagcgctgggcgctcgtcgcggcgcagctccacgggcgcacgccgcgggaggcctgggagcactacgaggcgctcgtcgccgacatcgcacttatcgagcgcggcggggtcgacgtgcccgcctgctggaacgacgacaaccaagtccgcggcggctgcggcagcgagggtggcactggcaacagccgccgcgccggcgctgaccgggcgcaccgcgagggccggcgccccgggaaaccctggagcgaggaagagcacaggctcttccttcaagggctggagaagtacgggcgcggggactggcgtaacatctcgcgcttcacggtgcggacgcgcacgccggcgcaggtggccagccacgcgcagaagtacttcaaccggcagctcaaccccgccagccggaactccaagcggaagagcatccacgacatcaccaccccttgaccctggccgccgacggcgacgcgcgctccctgcttccaacaaatcgcgacagccactcatcctcatctcgagatcagaatagaagaaacaagtaggcattactcgtagtccatgacaatagctaaatccttaggtcgcatgggtcgttccaaacaaaagctagcacatggtttaggcttactcgtagtcattaaaatagaattaggagtccaaacatctaatggagtctgacgtggcaccgtcgcgtcgagtttaggcgaatgcagaatgggatgagtttctcgctcgagaaacaccggtttcctgcctttaaattttcttgttcccgctactgacccggaaaccaaaaacggttccgttttcagtgttatttaggtttagaatttaataatacaagagtcaaacgaaaaacggttcggttttcagtgttatttaggtttagaatttaaaaatacaagagtcaaactttggtcacaaaacggcatccgaaaaatgcagaaccaaattgtaatcctatcaatgcccgagtcactgttctagtattgtattggtttacaatggtgttttattttaaaaaaaaaacccccccccggccgtntagaggaccaagctaacgacgcgtgcaacga

SEQ ID NO: 2862 - DNA, 519 bp, Zea mays
  Clone ID: TF_ZmC14064_1
cggacgcgtggggtgccagaaaacacacggccgccaccccgcgccaccacccagttcgatcccattccaagcgcgcgcagcagcagcgccagcatgggtcgggcgccgtgctgcgacaagacgagtgtgaagcgggggccgtggtcgcccgaggaggacgaggtgctgcggagctacgtccagaaccacggcacgggcggcaactggatcgcgctcccgcacaaagcagggctcaaccggtgcggcaagagctgccggctgcggtggctcaactacctgcgccccgacatcaagcacggcggctacacggagcaggaggaccgggtcatctgctccctctacagctccatcgggagcaggtggtccatcatcgcgtccaagctgccggggcggacggacaacgacgtcaagaactactggaacaccaagctcaagaagaaggcgatcgccatgcagcagcagcagcaagagtactaccaccaccagcagcagcagcacagctcaggaggccgcggccgc

SEQ ID NO: 2863 - DNA, 891 bp, Zea mays
  Clone ID: TF_ZmC3484_1
ctcagcgagctctcccgtacgtgcgcagttctcggcacgctaccccttatatacccccccggccgctctcgctctagatgcacaggcagtgacacgcgcgcataccgacggactaggtagctgctcatcagctatccagatcgttgctccttccttccctcgccatcggccgcgcccgtgtcgggcggcgggaatgggacgccacgcggcctccggcggcggcgtgcagcagaagctgcgcaagggcctctggtcgcccgaggaagacgagaagctctacaaccacatcatccactacggcgtcgggtgctggagctccgtgcccaagctctcagggctgcagaggtgcggcaagagctgccgccttcggtggatcaactacctgcgccccgacctgaagcggggcagcttctcgcagcaggaggaggacgccatcgtcggcctccatgagatcctgggcaacagatggtcgcagatcgcgtcgcacttgccgggccgaacggacaacgagatcaagaacttctggaacagctgcctcaagaagaagctgcgccagcgcggcatcgaccccagcacccacaagcccatctccgccgacgcggcggcattggagcagccggcgtcgcgagaccgcaagccgtcgttggccacagccgccgctggtggcggcctcgacgtgaagcagcagcagcagcagcagcaggtgttcgacccgttcccgctgaccgacagcttcggcggcggcttcgacgacgcggccggcgccgcattgtacggccacatgggcggcggcggcggcaagcagcaggacgcggccgccaccgcggtggacgtgttggaacgtgtcggagaacctgggctacggcgagagctccagcacagcagcacact

SEQ ID NO: 2864 - DNA, 1637 bp, Zea mays
  Clone ID: TF_ZmC2013_1
gtggtggcccgcgagcctcatctcactcttcttcctctgccttcctggcctgccttctcttctcccgccttctcctcctcccagcacagcagcagctgtgaccacatcaccacacacacacacatatatacttggtcatcatccagcttccagcagccagctgcccgccgatcaacgtgtaggcggttcaaagggaaatctgctgatggacatggcgcacgagagatcagacgccagcagcgaggaggaggtgatggccggcgagctgcggcgcgggccttggacggtggaggaggacctccagctggtcaactacgtcgacgcgcacggcgagggccgctggaactcgctcgcccgatcagcaggtctgaagcgcactggcaagagctgccgcctccggtggctgaactacctccggcccgacctccggcgcggcaacatcacgccgcaggagcagctgctgatcctggagctgcactcgcgctggggcaaccgctggtccaagatcgcgcagcacctccccgggcgcaccgacaacgagatcaagaactactggcgcacgcgcgtgcagaagcacgccaagcagctcaagtgcgacgtcaacagccagcagttcaaggacgtgatgcgctacctctggatgccccgcctcgtcgagcgcatccagaacgccgcagccatggcggggactccgcagcagcacaaggccggcgccgcggacacgccgctctcgtcgccgtcgtcgtggcagcccggcggtggcggcggcctctacgcgtcgccggacctccccacggacgcgtgctggcctcccgcagactgctactactacccagccgccgctgaccatcagctactgaacaaccccgccgccgccgccgtcgtgccggacctgtcgagcaccacggccgggtcggcctccccgtcctcggattccggcgcggggacagcacaaccctggcccgcgccgatgggtggcgcagagtggttgaccaccgccgcctgcgacgcctccagcgccgccgccgccgtcctcctgggcgggcagcagcaacaatcgtgcctggtcggggagacgtcgtgggcgtcatccgagctccccgagctgggcgtcgcggacttcgagatcggcagcttcgacgtggagagcatctggagcatggacgacagcctgtggttcacgcaggcgcagggcgtgtgaatccaagccaccaacacacgcggcgcgcgggcacggaaatcgatccacgttacggcgtcaaataccggtggtggatcggacaccccgcacgtcggggacgcctagcgaaggtgccgagagagctagctgagacacgggttagaagaaggagagagattatttggaggaaccgaagacgacgcgggacggctactctttgctcggttcaagatgcttgctgttcttgcctccaggacttttcttccgctccagttctactccgtttcctagtcttgattccctagcggcttgtgtagggtatatacgccaagaaaattccagaaaaaagggggaaaacgtagctgttgtagtagtacatatatactagtagcgtcaagtgtttgtacgtagctgttgagtaattaagcgcaatacatatgaacaagtgaagttactg

SEQ ID NO: 2865 - DNA, 1214 bp, Zea mays
  Clone ID: TF_ZmC2013_2
acctcatctcactcttcttcctcttccttcctggcctgccttctcttctcccgccttctcctcctcccagcacagcagcagctgtgaccacatcaccacacacacacacatatatacttggtcatcatccagcttccagcagccagctgcccgccgatcaacgtgtaggcggttcaaagggaaatctgctgatggacatggcgcacgagagatcagacgccagcagcgaggaggaggtgatggccggcgagctgcggcgcgggccttggacggtggaggaggacctccagctggtcaactacgtcgacgcgcacggcgagggccgctggaactcgctcgcccgatcagcaggtctgaagcgcactggcaagagctgccgcctccggtggctgaactacctccgtcccgacctccggcgcggcaacatcacgccgcaggagcagctgctgatcctggagctgcactcgcgctggggcaaccgctggtccaagatcgcgcagcacctccccgggcgcaccgacaacgagatcaagaactactggcgcacgcgcgtgcagaagcacgccaagcagctcaaatgcgacgtcaacagccagcagttcaaggacgtgatgcgctacctctggatgccccgcctcgtcgagcgcatccaggccgccgcagccaacaataacgccagcggcgccggggttccgccagctggcgccgccgcggacgacacgccgctctcgtcgtcgtggcagcacggcggcggcgccgacgacgacggcggcctctacgcgtcgccggagctgcccacggacgcctgctggcctcccgcagactgctactactacccagccgccgctgaccaccagctactgaacaaccccgccgccgccgccgtcttcccggacctgtcaagcaccacggccgggtcgtcctctccgtcctcggattccggcgcggggacagcacagccctggcccgcgccgctgggtggaggcgcagagtggttgaccaccggcgcctgctgcgacgcctccagcgccgccgccgccgccgtcgtcctgggcgggcagcagcaacaatcgtgcttggtcggggagacgtcgtgggcgtcatccgagctccccgagctgggcgtcgcggacttcgagatcggcagcttcgacgtggagagcatctggagcatggacgacagcctgtggttcacgcaggcgcagggcgtgtga

SEQ ID NO: 2866 - DNA, 1838 bp, Zea mays
  Clone ID: TF_ZmC3584_1
aattcggccggaccaccttggacccctgtcctcaacctcaagccgccacgcaccaccaacacacgcgcgctggcttcttcaacctcggttgctcgctcgcaacaagacacggatcgtcagagcaagagctctggtgacctgacgattctgctcttgttctcgtacggcgccggtgcctagcgtctgtagcctttttgtgtgtgtgttttttcgcccatatctctccccaccaccaccaccaacctagctcagccgcagttcacccgcgtcaccgcacgagtacacgagcaatccgcaagcgataacctgcaagctgaggggccagctgttttgctcacggagaaagaggttctagctagtcgttcatcaacacggacacaccatggtgaggccgccgtgctgcgacaaggagggcgtcaagaaggggccgtggacgccggaggaggacctcgtcctcgtctcctacatccaggaccacggccccggcaactggcgcgccgtccccaccagaaccgggctgatgcggtgcagcaagagctgccggcttcggtggaccaactacctccggccgggcatcaggcgcggcaacttcacggagcaggaggagaagctcatcgtccacctccaggccctcctcggcaacaggtgggcggccatcgcgtcgtacctgccggagcggacggacaatgacgtcaagaactactggaacacgcacctcaagcgcaagctgcaggccggcggcggcgacggcgacggcgacggggcggccaagccgccggcgcacaggccgccgtcgtccaactccaagggccagtgggagaggaggctgcagacggacatcaacctggcgcgccgcgcgctccgcgaggcgctcaccccgctcggcgacctcaagccgcagccgcagccgcagcgcgccggcgctggcgtgggcacgggcggcggtgacagcccggcgccttcgagctcgtcgtcgcagtcctccccggcgccagcggccttcgccgccgccgccgcggggccgtacgttctcaccgcggagaacatctcgcggatgctggacgggtgggctggccggaaggtccgcggcggcgggaccccgggcacccccggcggtgccgagagcgcgtccacgggatcctcggacgcgtcggaggtgtcgtacggtggcgccgccgtcgcatcggccgcgccggcgcccgcttgtggtgggccggtcttcgaatacgaggcgaagccgggcgtgccgacgtcccatcagcagatgccgctgtcggcgatcgagtcgtggctgttcgacgacgacagccacttgcaccatgctgtccagagcgccagcttgctcgatgccgcccccatggattaccccttctagctctagtgtgtccaatcgatcaagctcaagctaatcccttcaagcgaggagtgtgattacagcgctgtctcctaaagaaaactacacagatcctgcagtacgacgtcggtggctgattaatcgatcggctaggtagctgattcagatcggtcgcttgatcaggttgtttacgtgggatctgcgtagttttcatttagattccaaagaacataagtagaaccacacttatgatataaccacaactatgacgacgacggagtatgttcttgggcctttttttttactgttttctagccttttctcccaagtaaagcttgggggtacgtagtagatccgcttgtgcaagttgcatgttgtgtggaaaaataattgactccagtaatcctatgtcacatacatgtcataaattgtatcgctatctctaacatagcagatattttaagttcccatgcatgtctctcaa

SEQ ID NO: 2867 - DNA, 720 bp, Zea mays
  Clone ID: TF_LIB4767-042-R1-K1-D8
ggccggccgggacacacatccacagtagcgtcacacagaacccttagctcgatagagatagagagataaatatgtcggagcatcggagcaccatcaccactaccactccggttcccccgaagcatccatctcgaaacataagttcatgatcttctggcgagtcaacaataactactgcatgatcggccattaaaggagcttcgtgccaccacagaacgagctcaacgaccataaccacaaatgatatacattcctgagatctgtaaagctctgcgaatatgaagatcccatagcgtctgcattgctcgtgaaatggggcacggattctctgctgctacaagctaaatctgacaaaggcactctggtaagccgacgactatgagaaagtcatgaaacaaataaccaaggatgtgcatggatgctgaagatctattcccggactctctgtgcttcaaagatgcgcaaaaaaacccgactctgatgcgaatacattatctgagaccagaactccagagaggggcattctcccaagaccaagaagacttcatcattgagctgcacgctgtccttggaaacaggtgatcttgaattgcagctcagatgccaaggaggactgacaatgagatcaagaatctatggaactcgccgcatcaataaaaagctcaggcagaaaggcattgatctccacaccccacaagcccttactgaacgtgatcccaa

SEQ ID NO: 2868 - DNA, 548 bp, Zea mays
  Clone ID: TF_LIB3608-060-Q6-N6-G11
aactggggacggggtgagcggcgggcaggcggtggttgatgcgatccggcccgagacagaggaaacgccggccccggagctgccgctggtagacgagatgttcgaggccgtccgatcccgtggcgccggcgtccatgtggtccctacctttgctggcagattttgacctctgttgtgattgctataatgaagggaaatttgatccaggcatggccaaaaccgatttcatcctcatggattctgcaggagtttcaggtgctagtggtactagttggacagatgaggaaacattacttctattagaaggtttggaaatttttggtggaaaatgggctgagattgctgaacatgttgctactaagacaaaagcacaatgcatgttgcactttcttcaaatgcaaattgaagaccgcttccatgatggcaaagatattaatcaaaacatcccagtaaagacagagcaagccacaactgagaaagccattgctgaaacatctgagaaaatggaagttgaagataaagtggaaggaagaggtactgtggatgaa

SEQ ID NO: 2869 - DNA, 1871 bp, Zea mays
  Clone ID: TF_ZmC27878_1
gcagcccatccatatggccgggaagcatctaaaaacccaactccagccctcgacgagcacccgagagacacgagagtgaaggaaagaggaaaaagaagaagactacagccaaaaccctatctcactccggcgcgccaccggccgatggtttcgatgaacaccacgccgaatccgcttgactccgccgccggcagcgccgccgtcgccggcggaagcgtggacgagggaggaggaggaggcggcaggaagaagcggatgcgcggggcggtagcggcggcgatggtgccgccgccgatggcggtcccgctgccggccgcggcgcccgcggcgggggaggaggttcggaaggtcaggaagccgtacaccatcaccaaatcccgggagagctggacggagccggagcacgataagttcctcgaggccctgcagctttttgatcgtgattggaagaagattgaagcatatgtcggctcgaagactgttatacagataaggagccatgcacagaagtacttcttgaaggttcagaagaatggcacaggcgagcatctgcccccacccaggccaaaacggaaggcagctcatccatatccccagaaatcatctaaaaatgtttctcaaactattttattacaagaacaacctactcagcgggagcaaggttctgtcatgcctatggatactgctactgtgagaaacacaaatgcgaatgtggcggtgccttcctgggacaatactcttgctcaacctttcagcgctggtcatgttcaaggtgcagctgcaacaaataactgttcaagtagcatggagagtccatctggtacttggccaacttctgaagcagtcgagcaagaaaatatggttccaccactccgtgccatgccagattttgcccaagtatacaacttcctgggaagcatatttgatccggatacaagtgggcatttgcagaggttaaaagcgatggatccagttgatattgaaacggcactactacttatgaggaatctttccatgaaccttaggagtcccgactttgagcaacatcggaggttgctatcatcatatagctatggtggcgcggaccatgtcaaatctgaagccatggaaaatcttggatctcctcagagtggccatcttccatccctggtaacaagcgaatgagagcacacttccaatttgcggtcggagctttggttgtttacacgggacattcctgtgcgctcccagcaatggagttgtggagacggctggtctgtttatgaatgctagagacgtatcgtggcagtaacatctgtatagcttccaataaatggtctgaccctaggcaagttttgctttttcgcgtacgtgtagatagccagttttgtgtgctcatgcaattttttcctgggtggggcctagatcgtatgtttttttatatacacactattggacgcgtgatgtaaatatgtgcaatctttgtaatgcttgaggtactataattatataatggatatgttatgatcgtgcatattgtgtgtgtgtgtgtgtgtgcatttcacaagcttcttgccttcctttatttgttatgtcccatttcaaagcttttacgatttctgcgcataactattgtttctgttttctagcttctgctgctatcttggctagtcttggctcttattaagagggtgtttgatttctatggactaaattttagtctacctattttattctattttagtccctaaatttacaaatatggaaactaaaatagagttttagttttcatatttagcaatttatgtactaaaatggaataaaatagagggattaaaaattagtccctataaaccaaacaccctctaaatatagctggggcatgcacttgg

SEQ ID NO: 2870 - DNA, 1105 bp, Zea mays
  Clone ID: TF_ZmC9324_3
ccacgcgtccgagtaccactgcaactcctgttcagttgattgctcacggaagcgctaccattgtcgaacccaggcagattttgacctctgttgtgtttgctataatgaagggaagttcgatccaggcatggccaaaactgatttcatcctcatggattctgcagaagtttcaggtgctagtggtactagttggactgatgaagagacattacttcttttagaaggtttggaaatttttggtggaaaatgggctgagattgctgaacatgttgctactaagacaaaagcacaatgcatgttgcactttcttcaaatgcaaatcgaagaccgcttccatgatggtgacgatattaatcaaaacatcccagtaagtacagagcaagccacaactgagaaagccattgttgaaacacctgagaaaatggaagttggagataaagtggaaggaagagataatgcggatgagaaggcctcggagaaaacagagggaagctgtgaagaaacaaaaactgaagatgcaaatgttgtaaataaagatactcagaaatcaggtggcaaagattcaggtgcatctccaagcactgaagaggcaaagcaatcttctgatgatcaacctatagtaaaggaaaattctgtagatgtagatacttctggtgaaaaactatcaaatgttgctattgatatcctaaaatgtgcatttgaggctgctggtcacagcccagaatatgaaggttcatttgcggatgcaggaaatccagttatggcactagcagcgtatttagctggtcttgtggaagatgataacaccaccacttcattccgtagttcactaaaatctgtatctgatgtgtctcctgcactccaattatcaagtaggcactgttttattcttgaggatccgccagatgaactcaaagacatttgtgctagtgtaaggtaagcaatgcttgcacctattttgcattgaaatgctcacaagtttttctgacgatataaatgaaatgtgctcttggcagtaagaaaatagagaatggtgatcaaaaacagatgaggatatgattcaaaattcaattgataccgagaaaaaagagatcaatgagaaaga

SEQ ID NO: 2871 - DNA, 1245 bp, Zea mays
  unsure (1)..(1245): unsure at all n locations
  Clone ID: TF_ZmC1193_7
ccgggtcgaccccgctttcgcggncgcgtgggtcgccgtgctgcgagaaggcgcacaccaacaagggcgcgtggaccaaggaggaggacgagcgcctggtcgcgcacatcagggcgcacggcgaggggtgctggcgctcgctgcccaaggccgccggcctcctgcgctgcggcaagagctgccgcctccgctggatcaactacctccgccccgacctcaagcgcggcaacttcacggaggaggaggacgagctcatcgtcaagctgcacagcgtcctcggcaacaagtagggccgccgcgcgcctctccctctccctcctacccctcgtcattcgtttcgtttcctaaactggccgggtacgttacgtgcaggtggtccctgatcgccggaaggctgcccggcaggacggacaacgagatcaagaactactggaacacgcacatccggaggaagctgctgagcagggggatcgacccggtgacgcaccgcccggtcacggagcaccacgcgtccaacatcaccatatcgttcgagacggaggtggccgccgctgcccgtgatgataagaagggcgccgtcttccggctggaggaggaggaggagcgcaacaaggcgacgatggtcgtcggccgcgaccggcagagccagagccagagccacagccaccccgccggcgagtggggccaggggaagaggccgctcaagtgccccgacctcaacctggacctctgcatcagcccgccgtgccaggaggaggaggagatggaggaggctgcgatgagagtgagaccggcggtgaagcgggaggccgggctctgcttcggctgcagcctggggctccccaggaccgcggactgcaagtgcagcagcagcagcttcctcgggctcaggaccgccatgctcgacttcagaagcctcgagatgaaatgagcgcgcttctaccctctctgtgtagcttctcccccccgtcgtcctcgtttttgttttgccacacctcacatggatgatgaattgatgatacgtggttggttagttttttcgtaggtgaaaaatacgcgatggtgagcgagtgaaagagagattttgtgccctgggtcctcctccctgctctctcttgctgctccattttgcctccctctgtcctctctctctctctctctctctctctctctctctctctctctgtatctctgtaattaccatcgccaaatgatcatgggggcaatatcatgctaggtctctgg

SEQ ID NO: 2872 - DNA, 807 bp, Zea mays
  unsure (1)..(807): unsure at all n locations
  Clone ID: TF_ZmC16180_2
cattgggaccctcgaggccggccggggctggcttctgacctctctctacatccttttgtttgttgccctcctccccatatcatcctcccttgttcgtcatcgtctctccctcagctccctccagccgccaattaatcgatcacctagccggccggttgctggttctcttcttcgcatgctgccgataattaatttattccacgctcgattgcagtggctttagttaatagttatagggagcttcaagatagcaaactagaaacggcgcaggattattggaaggaatagagcttcaattcagatagcagcaggctgctgttgattcggcgatcggtcgatcgaggatgtgcacgaggggccactggaggccgtcggaggacgagaagctgaaagagctcgtcgcgctgtacgggccgcacaactggaacgccatcgccgagaagcttcaagggagatcagggaaaagctgcaggctgcggtggttcaaccagctggacccgaggatcaaccggagccccttctcggaggaggaggaggagctgctcctcgcctcccaccgcgtccacggcaaccgctgggccgtcatcgccaggcttttcccggggcgcaccgacaacgccgtcaagaaccactggcatgtgatcatggcgcggcggtgcagggagcggatgcggctgtcgaacaggcgtgccggcggcgctgctgctgctggtgcctgnngccgtcgtcgtcgccaccggtgctgctgccgaagatggcagtaaccctaggagcgncaataaagagccgaggcctgacgcgagcggc

SEQ ID NO: 2873 - DNA, 857 bp, Zea mays
  Clone ID: TF_ZmC39745_1
ttgggaccctcgaggccggccgggagggagaagagaagggagggcgaggccactggctgtgtaggcagcagccagccacacagacacagcttcgttcccatctcttctcgttcttcatcacctacttgcctactatatctactagccacgctagctagactagccttagacgtagctagctcactagctgcttgctaggtgtgtaccgatcgtccgaggtaggagacacagcacgcagcaggggtatggggaggccaccgtgctgcgacaacggcgtcggcgtcaagaaagggccttggacgccggaggaggacatcgtcctcgtctcctacatccagcagcacggccccgggaactggcggtccgtgccagagaacacagggttgatgaggtgcagcaagagctgcaggctgcggtggaccaactacctgaggcctgggatcaagcgtggaaacttcactcctcatgaggaagggatcatcatccacctccaggcgttgcttggcaacaagtgggcagccatagcctcctacctccctcaaaggaccgacaacgacatcaagaactactggaacacacacctcaagaagaaggtgaagaggctgcaacagccggcagccgactccttccagacaactgcctccaatgcagtcacctgcagcccaaactactacagccccagcagcagtcaccacagcctccaaggaatgcagccgatgagcagctacccccacaccacctgcagcggcggagccccaagcaacaatgaggcgacgactggatactactaccggcgtcgtctcccactctccccagcatggatgagggcatcaccagcagcagcgacagctaactgc

SEQ ID NO: 2874 - DNA, 963 bp, Zea mays
  Clone ID: TF_ZmC7195_1
tgttggggtagctagctagagagagcagcaggccagcacagcagcatggggaggtcgccgtgctgcgagaaggcgcacacgaacaagggcgcctggaccaaggaggaggaccagcggctcgtcgcctacatcaaggcccacggcgaaggctgctggaggtcgctccccaaggccgcgggcctgctgcgctgcggcaagagctgccgcctccggtggatcaactacctgcgccccgacctcaagcgcggcaacttcacccaggaggaggacgacgtcatcatcaagctccaccaggtcctcggaaacaagtggtcgctgatcgccgcccagctgccggggcggacggacaacgagatcaagaactactggaacacgcacatcaagcgcaagctcatcgcccggggcatcgacccacggacgcaccagccggcgagtgccgccgcagttgcccccgccgccgccgccgccgccgccgcgcaaagcagctttcgccaccatggcgacgacgaggcggtggcgcggcgcagctgctcgcgagacagcggctgcatcgcggcgcacagcagcgacgacgacgacagcacgtccgggtccctgccacaccaacatgctgtcggcggcatcgacctcaacctctcgctaagcccaccgacgagccaaccgtcatcgccggccgccgccaagggagttgtagctagcggatatggccaagggagtgagagctagctgtacctcctctgcactgccacgatgatggttgtcaattgttgttagctcctcctcctcgtcttatgttcttccatgcaggccggaagatcctaaagagaacgtgtgcgtgcgtgtgagaattaaactcgtgtctgttgttcacaaaaaaaaaaaaaaaaaagggctgatcgggcgctctaagatttggccatgccccatgcatgaggaaccctgcaggggccctcctactttttg

SEQ ID NO: 2875 - DNA, 846 bp, Zea mays
  unsure (1)..(846): unsure at all n locations
  Clone ID: TF_LIB4746-133-Q1-K1-A11
gggtacctcgaggccggccggaaggtcgtcgagctctcatctctacgccggaggtgctccacagagcagggctcgaagaggtgcgtcaagagctgcaggctgaggtacaccaactatcgcgcgctgatctgggcgacgaactgcgtgcgcgtttgcaggggctccctgatcgccaagcagctgccgcggcggacgggcaacgacgtgaggaaccgttggaacacgaaactgatagcaagcagctgcggcagcgcgggatcgaccccaccgcccccatcgccggcctcatgcacatcttcgtcggcgccctctccttacggtgacgacggcacgggaacgacgacggcacgggagagatcatcgacgccaccctggactgcgacaagaagacacgggtggaccagctcatcgcctagctgctggccgacccggcctactacgctggctcctcctccgagatgggctggatcatgggcttgatgaatgctgattaattagcggttatacaatggatccatgaggctaaagcaaactgactgaaatagtcactttagaggctaaagtttcaaacataaagaactaaaagggactaaaatgttttagctcctttagcttgtaaggacgagttaaactcgactaaaacagctggtcccacacccacacatgcaacttgcgcttgctgctgcacccgcgctaactgccttttccacaaatcaatgcctggtccccacactagcatttatgatttaatgactgctttagtcacttgttccaaacacgagtaactaaattttagtcagtcacttttaggactggacaaaaaactcgtangctcgtactcgctcg

SEQ ID NO: 2876 - DNA, 1225 bp, Zea mays
  unsure (1)..(1225): unsure at all n locations
  Clone ID: TF_ZmC1193_6
acccactgcgccccggcctgctgcccggctcccatatgtatgccctccgttgcacttgcactgcaccccctgtctgtccccacccttctgccctggcttatctctttccgcttccccctgttataatagcaaccaaaccaaaccaaaccagagctcaggaggagcttncacgcaaactcaggggaggcgcgcgcaagcaagcacacgagggagaaccgggcaggcagccagccatggggaggtcgccgtgctgcgagaaggcgcacacgaacaagggcgcctggaccaaggaggaggaccagcgcctgatcgcctacatcagggcgcacggagaggggagctggcgctcgctgcccaaggccgccccacgcgtccgaggccgccggcctcctccgctgcggcaagagctgccggcttcgctggatgaactacctccgcccggacctcaagcgcggcaacttcacggacgacgacgacgaggtcatcatcaagctccacgccctgctcggcaacaagtaagcactcagtctcagttcgccgcccgcccgccggtaccattatttccctcctcctcgactcaatcattttcccatcgtcggccggcccgtcgcgcgcaggtggtcgctcatcgcggggcagctgccggggcgcacggacaacgagatcaagaactactggaacacgcacatcaagcgcaagctgctgacccgcggcatcgacccgcagacgcaccgcccgctgagcgccgccgccgccctcaccgccggcttcccgtcgcccgcgcgcccgcccaccgtgctgttcgcgcgcccggcgccgtcggaggacggcggccacagcagcggcggcgggagcgcggacgcgccgcggtgccccgacctcaacctggacctgtccgtgggcccgccgtgctcgccgcccaagacgccggcggccaccgcgtcgacgcccacgtcgcagcagcagcagcggacgacgaccatctgcctgtgctaccacctcggcgtccgcagcggggaggcctgtagctgcaagtccccctcgccagcggcggcggggttccggtttctccggccgctcgaggagggccagtacatataaggcaggcgtcgtcgatcacagtaggccggcagaagcaaacccccccgccgcaaaacctgtaaaaacaaccacagaacagagtttctaatggagatgatgactgatgtggatggtcnccggccgg

SEQ ID NO: 2877 - DNA, 1762 bp, Zea mays
  Clone ID: TF_ZmC42_43
cggacgcgtgggctcccggccccccgctgcataaatacctcctctcgcggcccattcccacctccccctcctcgccgctccgggctgaccaagggctcgccgcctcccgtgtcctccgactccgacagggaaaggcgaaaccttgggtcggctcgctagtggagtgcagggtacgttgatgacggagctgtggatggaggtgctgccgccgccctacttcgcggggcaggcggcgggcgggtggttcctgccggaccggcgggccgggcccggggcgtggacgctggaggagaacaagatgttcgagcgcgcgctggcgagggtcgactgggacgcgccggaccggtgggagcgggtggccgcgatgctgcccgggaggacggcgtccgacgtcgcggcccactacgacgacctggagtgcgatgtcggctgcatcgaggcgggcttcgtgcccttcccctgctacggtagcggcggcggcggcggcgcgtcgcaatccgccgggttcacgttcgactgggacgccggcgggctgggctttaagcgctcctgctacgtggtcggcggcggcaagcgcgagcgcgggccggaccaggagcgcaagaagggcgtcccctggacggaggaagagcacaagcagttcttgatgggcctgaagaagtacgggcgaggggactggaggaacatctcgcgcaacttcgtgacgagccggacgccgacgcaggtggccagccacgcgcagaagtacttcatccgcctcaactccggcggcaaggacaagcgccggtccagcatccacgacatcaccaccgtcaatctccccgacgacgacgcgggcggtaccgcctctgcctctccgccctccgtgctcacctccgcctccgcgccctcgtccaccggcggcggcggccctgtcgtctccgagcagttcggcgtgctcgtcgacagcaagcccccggcgccgcaccaccacttcgtgccgcacccttacggcaacgtgaagctcgagcccgtcagttcccaccacggcgggttcctggacgactctgtcctgatgcagatgcactgcgggcagctgcagcctctcggatgactggttgtttgtgcagcaacaatggtagaaagagggaaatgcctctcgtctctttggccagttacgaggggtggagggtaccataccgctctgttgcgttgcgcgtgtctgttgttggatttcaatcaggcaaataacaattgggtacagcacacattcttgtcaagggtggatggctcatacaaacagctccgaggcccgagctcagcgcagctcgcagccgagcgctagcgttctgctgcagctgaagccactgaactgagctccctcccgtgtgttccagagacgggaggaagagggtgaaaaagaaaagaaacacacacacacacacacacacaaaaagtagaagatatggacaatgggatctctgcatttcggctatgcatgtgtatacataagcccacgcccgctgtgaaataatttcctactgtgatttgtttcccgtgttatgggaaccacactgctagatgttgtgattgattacgctagctagccctttctttgtagtaatgaggtattggtcggttaacgtcatgtatttcgacagcgagtagcatcagcagcatgctgtctggtgtcttgtaatggttttttatctttataagctggggatgtatcagcctctgattgacccgccctttttttaattaagtattgatcatgatggtg

SEQ ID NO: 2878 - DNA, 1164 bp, Zea mays
  Clone ID: TF_ZmC3584_2
gtggacgccggaggaggacctcgtcctcgtctcctacatccaggaccacggccccggcaactggcgcgccgtccccaccagaaccgggctgatgcggtgcagcaagagctgccggcttcggtggaccaactacctccggccgggcatcaggcgcggcaacttcacggagcaggaggagaagctcatcgtccacctccaggccctcctcggcaacaggtgggcggccatcgcgtcgtacctgccggagcggacggacaatgacgtcaagaactactggaacacgcacctcaagcgcaagctgcaggccggcggcggcgacggcgacggcgacggggcggccaagccgccggcgcacaggccgccgccgtccaactccaaggggcagtgggagaggaggctgcagacggacatcaacctggcgcgccgcgcgctccgcgaggcgctcaccccgctcggcgacctcaagccgcagccgcagccgcagcgcgacggcgctggcgtgggcatcgtcggcggtgacagcccggcggcctcgagcttgtcgtcgcagtgctccccgccgccagcgcctgccgccttggggacgtacgttctcaccgcggacaacgtctcccggatgctggacggatgggccggcttgaacgggaagcgccgcggcggggctccgggcacgcccggcggcgccgagaccgcgtccaccgggtcctcctcggaggtgtcgtacggcggtggcaccgccgtcgtcgcgccggccgctggtggcccggtgttcgagtacgagacgaagccgccggccgcgccgttccagctgatgatgccgctgtctgcgatcgagtcgtggctgttcgacgacgacacccacttccaccgtcctgtccagagcgccagcttgctggacgccgcccccatggattattacctgttgtagctagcgtgtccagcagctgatccagaccaagctaatccgttcaagcaaggaagtcggtggctgattagtcggctagctagctacctgtttctaaagttgttagttttcattatatttagccttttcttttctaggtgggtaaaagttgagtgcgtacttccccttgtgcaagctgcatgttgcatgggaaaataacatatatagctcttgcttgagacccaaaaaaaaattaccac

SEQ ID NO: 2879 - DNA, 1089 bp, Zea mays
  Clone ID: TF_ZM4497.C3.o9.fg
atggggagggcgccgtgctgcgagaaggtggggctcaagcgagggaggtggacggcggaggaggaccagttacttgccaactacattgcggagcacggcgaggggtcctggaggtcgctgcccaagaatgcaggcctgctccggtgcggcaagagctgccggctccgttggatcaactaccttcgggcggacgtcaagagggggaacatctccaaggaggaagaagacatcatcatcaagctccacgccaccctcgggaacaggcaggctaagaaacacgatagataccacgcattcggttctcattacgaagctgcagctgcccaaccagcagcgatgatcacgtggtccctgatcgccagccacctccccggccgaacagacaacgagattaagaactactggaactcgcacctcagccggcagatccacacgtaccgccggaaatacaccgccgggccggacgacaccgccatcgccatcgacatgagcaagctgcagagcgccgacaggcggcgcggcggcaggaccccgggccggccgccgaagactagcgccagcaggaccaagcattcagacgccgatcagcccggcggcgaggcgaaaggcgcggcggcgtcgagcccgcggcacagcgacgcggtgaacccgggcccgaaccagcccaacagcagcagcggcagcacgggcacggccgaggaggaagggcccagcagcgaggacgcgagcgggccgtgggtgctggagccgatagagctcggggacctctggggggaggccgacagcgagatggacgccctgatgcctattgggcccggcggccacgactcggctgccctccaagggcttggcgcggtcggcggcgaggcccaggtggacgacctgttcgacatggactgggatggcttcgcggcccatctgtggggcgggccggagcaggacgaccacagcgcgcagctgcggcaggccgccgagccgatggaagcggctgctgttgccgctgccgctgccgctgcgacggcggcctgcaccccggacgatcgcgagctggaggcgttcgagacttggctcctgtccgactcgttctga

SEQ ID NO: 2880 - DNA, 1008 bp, Zea mays
  Clone ID: TF_ZmC17859_2
cccacgcgtccgtgttgctgcagcagggatggaggaagggcccctggacggcgctggaggacaggctgctcaccgagtacgtgcagcagcacggcgagggctgctggaactccgtcgccaagctcacagggctgcggcggagcgggaagagctgccggctgcggtgggtgaactacctccggccggacctcaagcggggcaagatcacccccgacgaggagaccgtcatcctccacctgcacgccatgctcggcaacaggtggtcggcgatcgcgcggtgcctgccggggaggacggacaacgagatcaagaactactggcggacgcacttcaagaaggtccggccgtcgcggcgcgcccgggcgcagctgctgcaccagtaccagctgcagcagcaggagcagcgccgccagtacctgcagctcctgcagccgcagcagctgcagcagcagcagctgggggtggtgaaacaacagcagctggagcagcagagcccgccggagcctcatcaccaggccatgatggacagcctgcaaagcacggcggcgtgctactgcagcccggtgccggaggaatgctgcccgctcccggccgacgacgacgcggtgctgtgggatagcctgtggaggctggtggacggggatggatgcggcgacggcgacggcgatggctccagcggaggcgactactagccggctagcacgtacgtgtgcgtgtgtatgccaggctgccagccagccagtgtaaagaaataaagcggaagaggaggttctcttcaggtttcagctgctgcaagccaaggatcctgctagtggtagtagagacatgctaattttcctacgagaatagacgatcatgcttcatgcttttttcccctttatccatgaaccatgagcaagtgacattgtgtatcgaagggccctctgtttatgttattatggcctgattacaaggttggaataccttcatgttccttttggtttcaagaatcaagatcatgttttagcc

SEQ ID NO: 2881 - DNA, 1328 bp, Zea mays
  Clone ID: TF_ZmC1302_1
gccggccgggttcgggaagggacaggaagctccaagggccaagggaggctgcaggcaggttgtctccctccttcccacctgcaccacccctacccctgccccccatctcatccatcaatgggaaggtcaccttgctgcgatgagaatggtctcaagaagggcccctggacccctgaagaagaccagaagctcatggagtacatccagaagaacggccatgggagctggagggcgctgcctaggcttgccgggctcaacaggtgtggcaagagctgcaggctgagatggaccaactacttgaggccagacatcaagagagggaagttcacccaggaggaagaacagaccatcctccagcttcactccgtccttggcaacaaatggtcagctatcgcaaagcacctccctgggcggactgataacgagatcaagaatttctggaacacgcacctgaagaagaagctgatccagatgggcttcgacccgatgacgcaccggccgagaaccgacttctttgctgctctgcctcaactcattgctcttgcgaacctccgccagcttgtggagcagcggccgtgggatgaccacgctgctaggatacaggttgaggcggtccaggctgcgaagctccagtgcctccagaacctgctccagtctgcagcatccatcaccaccactcccagctccagcagcatgaacaccatccccagtgaccttggcctcctgagtcctccacagatgtcttccttgtctacgttgccttctccaagtttcctggagagtatcagtggccaagacatggtagctggtcaactgtctgacatccagatccctagctctttctttgaacagcccaccagcaacgaggccaaccagcagtcagacttcactccaaagagtagcgtcgagggggagaatggaacccctaaaacgcttctgtcagaaaattcccttccgccgctggccgacttccccatttccaacctgggtgatgcttgcggtgcctcaagctgtgacggtagcagcattcagttcccaagttggcccgagttgtttgatgaacagttcatgtgcgagtttgtatgaattctggcctggagtgagtgtgtttgtgttactctatagtttgtttttttttcagttatagttttcttcccttcttacatctgttttttgtgccatattctggtgtgggtctcagttcagaggtgtagtttccgcatgctgttttttttcctttttgagtgaaaatgtgtgctcctatgcatacactatataccaaacacttgtaaatatacgacactataaattttgaaggtttggatccc

SEQ ID NO: 2882 - DNA, 2525 bp, Zea mays
  Clone ID: TF_ZmC984_1
cattgggacctcgagccggccgggaaaaaaatctctcaaccatcctgctcctgctcccttcccatccggtctccctttcttttcgcggcctcgcctcgcctcgcctcgccggcggcctggtggtcgcggtctcgctccagcaccgataaagcccacctcgagttcttagtccaagtgtctgctctgctccaccccccggcttcagccgcagcttgtggtggaatcggagcttcttatccgagagcagacatggagcagagtagtgatgggttgccaatcagccagcggagggctaacagttcaacaaaacactcaagcaagtcagatgaggttgctgaagacatgttgcagagtaatataccacatgaaactgtgagactgtgccaaggtgtggaatcagaagagatagagggacctcctcacaagaaaattgtccagaacttcacggagagcagtagttccaaaaataaaaaacacagatggtcatcagaggaagatgaggcactaaagcaaatggtaaaaaaatatgggacgaaaaactggcgaactattgcatgtgctatacctggccgaaatgccaactcatgcctttcaagatggaagtaccttctagacccagcaataaacaaagagccttggtcgcaacaggaggaactaagattgatccgtgcgcagcaagtttatggaaacaaatggtgtaaaatggtcaaacatttcccagggaggacaaatgatgcactcaaagaacattggagaagtcctatgaaaagaaaactggattcatatttggcctcaggattgctcgaacatgttccagacctgcaagatgatgtatcatttccacagacacagaacaatcaatcagatattccaaaggactgcaaagctgcatctgatagaaatagattttcatcacgtttatcaacagaccccaaacttaaacaagagctcacagaactggatgaaaatggtaatacatcagcaagaaaaagctctgacttattctatgctaaagcacctgatacccattcagccaaaatctcagaaatgagaatggccaaatcacagcagtgtgcaggaacaagaaagaagctggcttttctgtcaactccagtggagctcaagagtgttgtaccgcatgaaaccaccaaacattgccaagatatggaaccagaaaagacagagggcccactgtgcaagagaaattcccactgcatcaaggatggaagtagtttgaaaattcccgaaagtaccaaaggcaaatggttagcagaggaagatgaaattctcattaaaatggttaccaaacatgggaaaaactggcaaactgtagcatttgctatacctggccgagaagcaaaacaatgccaaatcagatggacacgcagtcttgacccagcaataaagaaacaggattggtcagaacaggaggatctaaaattgattcgagctcatcaaatatatggaagtcagtggcttaaaatggtcaaacatttccctgggaggacaaatcatgcactcaaagaacactggagaaatcgtatcaaaggaaaactgaatttttatttagcctcaggattgctagaacaagttccggacctggaagaaggtggtatatcagttccagagagcagtcagtcagaaattccgaaggacagtcagggttcagctgacaggagtggaccgccaccagttttacgagcacagcccaaatctaaaccggaactcccagaaaacgctggtacatcaggagaaggaacttctgattccattcgtcttaaagggcccaacgcccatccaaccgaagtttctgaaaaggtattggctaaatcaaagcagcgtgccagagccagaaggagattggattttctgtcaaccccagtggagctcaaattgtgcactgctgcggcaagttgtcaaaggcctccccagaaaatggatcaaccgggtccagtggccgagaacatctctccgtcagatgcatgtcaagacatttcacagaatgttccaccagagcgtgcggatgccatcacaccgctggctgctagtaaccaccattcaccagcgacaccagttgatccattctctctcgaaatgcatgaggcgaacgcatcagatcttctggacatgtcctactgtgatggcttgataatcgattctcctcgtgatccacatgacggtagcctcatgtagaagaaaaagttaccaacgcaaaatgacacttttaatagcaagagacgatggactgtcttcctgaaatccagcaactccctgtataaaaatcgtgttgcatgttggatggaacttgtatcttgtcttggcaaaaataattgcattgctgttctgttaatgcccctaactggtttggagagcatttttcttttgcaggtttgaagagcattttgaggggtgttgtaggtcaaaatgattttttttcgttgttttgggttggacaggtccccatcactctttttatgcaaagcatagcacgccccttataaaccccataaaaaaaaaaaacaagc

SEQ ID NO: 2883 - DNA, 1055 bp, Zea mays
  Clone ID: TF_ZmC39133_1
ccgcggctccgcctccccctcccccaaatttgaaacctccgaggcggacgcgaggcgaagacgtgcgtcggtcatcgagacggccggctgggcgaccgcgccgccgcctctctcctctcgttgcgcgccgcgggggttgcccgcacttgggggcgcgcttgggcgcggggttggatgcagctccgccgacggaggtgctcgtcgatcgcgtcggccacaccgggacggtggtaatcatgccgagtgataaagcaaaagctccaaagaagaagggcgaagaggatcctggaatcccgccagctccctgtgaaggagaaattagccatgagccacatagacaacggtcactcaatgggaggaccactggtccgacccggcgttcaaccaaaggaaattggacacccgaagaggatgctatattgtcccgtgcggttcagacataccaagggaaaaactggaaaaagatagcggaaagttttccagacagaaccgatgtacaatggttgcacaggtggcaaaaggttctaaaccctgaattggtcaaagggccatggtccaaagaagaagacgaaatcatagttcagatggtaaacaaatatgggccaaagaaatggtcggccatcgctcaagctttgcctggacgcataggaaagcaatgccgggagcggtggcacaatcatcttaacccagccataaacaaggaggcatggacgcaagaagaggagattactcttattcatgctcataggatgtatggaaataaatgggccgaacttacgaaatttttacctggaaggacggataatgcaattaaaaatcactggaacagttcagtgaagaaaaaggtcgattcgtacatatcttctggtttactttcacaagtcccatgcctctctctgattgaatgtcctgcacaatgtgactctttatcggctatggaccaacaaaacaacggaggtactgattgcaatgaccagaacactagtgtgggcttaagctctgatttacaagtaaatgtggatgccaacaagaaagagcacatgactctcactcgt

SEQ ID NO: 2884 - DNA, 424 bp, Zea mays
  Clone ID: TF_uC-zmflteosinte056a06b1
ggcaccggcccgtacttattggttttcttacccacccgttcttatcgacgagccttctaacagggagaggcggcatgttcttgtggaaaggggcgacaaggatccatcatttattggaacgtgagagtggatccaagacgaggaggacctcatcatccatctccatcccatgatgggcaacaagtgggctcacattgctaggcatgtgccggggcggacggacaacgaggtgaaagaacttctggaactgtgcaaccaaaagaacttctgtgatgattggtagtggactttcacccaacacccttttgcgagtggactataacggaatccagaggcgaccgggcatgtttaatcactgcgagctaattcatgtggtactgagcagctgaaaagactgggcggtacatgccggcgccgacagagg

SEQ ID NO: 2885 - DNA, 755 bp, Zea mays
  Clone ID: TF_ZmC8104_1
cgccctctagccttcgtgccgtctgcccgcccgccgtctagtcctctcttcgttctcttcctctcgcgctagcagagcggaggaggaggagaccaaccgggttggtggacgtgggcgggaggtgtgtgcgtgtgtcgtttcatggggcggacgccgtgctgcgacagggcggccgtgaagcggggcccgtggtcgccggaggaggacgaggcgctgcgcagctacgtccagcgccacggcagcggcggcaactggatcaccatgcccaagaaagccggtgagcgatcgagcgtgtgctccccttagcttgtgtgtatgtgccatatgtagctagcaagagccatatatgcacaggtgcactgacgacgggtcgatcgttgccggtcggcgtcgcgtgcagggctcaagaggtgcggcaagagctgcaggctgcgctggctcaactacctccgcccggacatccgccacggcggcttcaccgccgaggaggacgccgtcatcatgtccctctacgcccagctcgggagcaagtgagtactgatcgtacacatgtgaatccgagaagctcttcttccttcttcgatcctccaatatcttgagccgagcgcatgccatgccatgccaaagcgtctcccttaatttgaccgatcgacgcgcacaggtggtcgctgatagcctcgcagatggaggggaggacggacaacgacgtgaagaaccactggaacaccaagctcaagaagcgcctcctggccgca

SEQ ID NO: 2886 - DNA, 800 bp, Zea mays
  Clone ID: TF_LIB4767-058-R1-K1-G8
cattgggtacctcgaggccggccgggaaaattcagcgcgaccaggacagtgcagtgctccccgaggtccccaaaagacaagcaggcaagcagcaaagacacgcctccctgcttgcactccccacacgcccagtcgcccacacctccaacagacaaagacaatctagcaagcacacacagcatcaggaggaggagatcgagtaggagcagaagcaaagaatggggagagctccgtgctgcgagaagatggggctcaagagggggccatggacgccggaggaggacaagatcctggtcgcgcacatccagagcttcggccacagcaactggcgcgcgctgcccaagcaagccgggctgctgcggtgcggcaagagctgccggctccggtggatcaactacctgcgcccggacatcaagcgcggcaacttcagcaaggaggaggaggacgccatcatcaccctccacgagcagctcggcaacaggtacgtaacgtacctaccgctctgctaattaatctcgcgccacccatttttctccgcatcccttttctttccctttctagcgcgttgctgtcttttcgggtgttttgctgaatcggaggagcaatgatggcttcttgttgcttcaaacgcaaatcactcttcgtcttcctcttgctcctgtcactggggcagggcatagcatacacatacattatcccctcatggccatgggccccccgcctcgatgccgacgcgaagaaagaaacgcaagtgtgggtgccactagttaatttatcacactgacgctgcgcgagatgcg

SEQ ID NO: 2887 - DNA, 782 bp, Zea mays
  Clone ID: TF_ZmC659_6
ccggccgggatccccctttgccttagcaatcagcacgaccaggaccaggacagcgctccctcccgtccccaaagacaaacaggcgagcagcaaacacacacgctcgaaccgagacaagccaatctaataatggggagggctccgtgctgcgagaagatggggctgaagaaggggccatggacgcccgaggaggacaaggtcctggtcgcccacatccagagcttcggccacagcaactggcgcgcgctgcccaagcaagccgggctgctgcggtgcggcaagagctgccggctccggtggatcaactacctgcgcccggacatcaagcgcggcaacttcagcaaggaggaggaggacgccatcatcagcctccacgagcagctcggcaacaggtactttttactcacgccgctgttctttcccttcgtcctcgcattgctgtcttctcgggtgtaaaaatcagaggatcaatgattgtttgcttgttgcttcaaacgcaaattactattcgtcttcgtcttctcccctctctcctctgaattgttcctgtcagtggggcagggcatacaatacattatccccgtgggccccgcctcgaggcccgcccgacgaagggagaaagaaagaaaatccaagtgtgctggccacttggtcgctagtatagttcagcttgttcgctgcggcttgctgcggctgcaatccggctgcggctgcggcttctacagtatttttctctctatggattgcagctgcagcagtccaaacagctgccacagtgtcgg

SEQ ID NO: 2888 - DNA, 1877 bp, Zea mays
  Clone ID: TF_ZmC11324_1
cccacgcgcccgccggcccggccccggccttcccttcgcgcctaggggcggaaggccgccgtgcccgttcttcccagctgcagcaaccggccagtgcgcgcggttgcgttgcatttgcatggctgcgcgctgcgctctgggagcttgcactagcgggtcggcggcctaggcgcggggcatctttcgagtgcgtgcgtgtctgttcaagctctgatcgtctctccggcccattcgccggaggaaactgaccgccgccttctcgctctcgctctctaccctattcccggggctgagaggggaggagagaaggccacgtccacaccataaagcaggacgtacagacacgtgtacgagggggatcacggtcgggtgaggtgactaagctggcggacggaacgacgacgatggcgaggagcggcggcgggatggaaggcagcggcgggctgaagaaggggccgtggacgcaggcggaggacaagctgctgagggaccacgtgcggcggcacggcgagggcaactggaacgccgtgcgccgggagacgaggctgcagcgctgcggcaagagctgccgtctccggtgggccaaccacctccgccccaacctccgcaagtgccccttctcccccgaggaggagcgtcagatccttctcctccacggcctcatcggcaacaagtgggcgcgcatctccaagcacctctcagggaggacggacaacgagatcaagaactactggaacacgcgcttcaagcgccggcagcgcgcgggcctgccgccctacccgccggacgtcgagcggcagatcaagctgctgcgcgcccaacgtcaaccgtttgcagccgccgcactcgcatcgcctgaacaactacccgctgcggtgtcgcgacgtcggaaacccgttcgcgttgctctccagcataccgtcactgtcgcagacggcctcgcactcgcactcgccactgatcaaccagaactacccgcttctgaaccagatgcaggtgttccaccacctcggcggcagtcagcagccgtcgttccaccaggacggcagcgcggcggctttcggtgacatcgtctcctctcgcctgccgccactgccaaccgccagaacgcaggcggagctacattcgaaccaattcgacacctccagcagcggcgggctgctggatcagtcgatgctgatcggcgacgaacacctgctgcggcccaacccgagtatggtcaaggtctcctccatgcccgcgctctcctaccgtgagccggatgggtccaggatgctgccagcccatggcgccgggagcgacggcgacgtctcctcgctggggcactgccctccgggacaggacctccaccgtggtgcgacatgggacttcaccttcgcggccgcgaagccggcgaagaggaagacggcgagcgaggtggggttctccgacatgttcgccgtcgcaccggcgggggattggttcggcggcgggtcgacggcgccatcgccggggccgtcatcggccgtcaccgacgaagagtttaacctggagatgcagcagttcatgtcaatgctaccactgtctgacgagcacggctggaacgcataatgcggccgggtaaaatggaaatcgaaaactgtgtagagcgtgtgtctccttgcttctgcgacgagaatggtgtgcgcattgtttttgtaatgtgcccactcttggatctttatctgttctagacgtcgattgagtttcaaacattgataatgctagggcaccatcggcgtgggataaacaccaaatagtccaagaattcactgcaacaactgctgtgcaccttcgtaaagccaaacatgttcagttttgatatatatatatatttaaagcgacgaacacgaacttgc

SEQ ID NO: 2889 - DNA, 1147 bp, Zea mays
  Clone ID: TF_ZmC4021_2
attcggctcgagatccgagttcgtctcaaaggcatcgcctttcttcctggcagcagagagagagatggcatcctcctcgaccacgaatacatcagatggtggtgcaaagtcatcgtcttgcccgagaggacactggcgacccggcgaggacgagaagctgaagcagctcgtcgagaagtacgggccgcagaactggaactccattgcagaaaagctggaggggagatcaggcaaaagctgccggctccggtggttcaaccagcttgaccctcggatcaacaagcggcccttcacagaggaggaagaagagcggctgctcaacgcccaccgcgcccacggcaacaagtgggcgctcatcgcccgccacttcccgggccgcacggacaacgctgtcaagaatcactggcatgtcgtcatggcacgtcgcagccgcgagcgctccaggctccttgccagggccgcgagctcatcctcctcgccgtccaccggtgggtacctcttcggcgctgtcacgccggcgactagctcgctctgcttcggcttctccaagcttggtggtgccggcagcgccagcggaagcggaggcctgttcaggtcgccggtgcctgcacctcctacttcactgttcaagaactttggcacagccactgcaagtaagggcttgctggggtcgagtttcgaggcgtcaggacggtacagctacagcggcaagcagccgacggcacctctctccatcaccttctcctctccaagagaagcgctaggcatggatatcggccaccatggccgccatgagcaccaccaaaaggattatcacgccagcgaaagcgccgatgagccactgaagaagaaggacgtgccgttctttgatttcctcggcgtcggtgtgtcctcgtaatcaataataatattgcattcctgaaataccaatcgatgttgatcaatcaagtgtattgatcagtgtttgttttttttaattattagggcgaactgcatgcggtagtagctgacaagtattcagggttagagttcatcgtcattgatggttacagtgttctgatcatcatgtgctgattcatcagtcaaataaggctccagacacatggctatttaatatttatttaaaagtttttttactagcctgctg

SEQ ID NO: 2890 - DNA, 777 bp, Zea mays
  Clone ID: TF_ZmC2251_1
gccggccaggccgggagacggataaacagatgtcagctgcagtgaacaagtcgtcggccgggacgaagaagtcccggaagccgtacgtggtgagcaggccgcgggagaggtggaccgccgacgagcacggccgcttcctccacgcgctgctgctgttcggccgcgactggaagagggtccaggcgttcgtcgccaccaagacgggcacgcagatacgcagccacgcccagaagcactttctcagagcggacaagaagctgggcctcgccgtgccgccgccgcaccctcgccgctctgccgccgactatggtggtgccctggcgccggacgtcgagacggttcagctcccgttgtctcaggacgacctgcgcttcgctcaggtgtacaggttcgtcggcgacgtcttcggctgtggcgcgatgtggccggtcgaggcgcagctgcagaggctgctgggcgcggaccctgtagtcgtggacaccatcctacgggtgctggccaacctccaagacaaaacttccctccctgtagcttgtaggtcgacaatattttgtagccagttacgttatggcgggattggttttgaatcctgtgattacaaatttcctgctagataaaaaatagggatttttacgtcactagttctcaaagtcgatcggtacgagtaaaccgatctgtgctagacatgtcctcgtctaagggcctatgcaggaacttcatagaaattatgtgcaaattttagaaggatcccaaaaaaaaaaaaaaaaaaagccccta

SEQ ID NO: 2891 - DNA, 665 bp, Zea mays
  Clone ID: TF_ZmC2251_2
gcagtgaacaagtcgtcggccgggacgaagaagtcccggaagccgtacgtggtgagcaggccgcgggagaggtggaccgccgacgagcacggccgcttcctccacgcgctgctgctgttcggccgcgactggaagagggtccaggcgttcgtcgccaccaagacgggcacgcagatacgcagccacgcccagaagcactttctcagagcggacaagaagctgggcctcgccgtgccgccgccggacgtcgagacggttcagctcccgttgtctccggacgacctgcgcttcgctcaggtgtacaggttcgtcggcgacgtcttcggctgtggcgcgatgtggccggtcgaggcgcagctgcagaggctgctgggcgcggaccctgtagtcgtggacaccatcctacgggtgctggccaacctccaagacaacttccctccctgtagcttgtaggtcgacaatattttgtagccagttacgttatggcgggattggttttgaatcctgtgattacaaatttcctgctagataaaaaatagggatttttacgtcactagttctcaaagtcgatcggtacgagtaaaccgatctgtgctagacatgtcctcgtctaagggcctatgcaggaacttcatagaaattatgtgcaaattttagaagaatcc

SEQ ID NO: 2892 - DNA, 661 bp, Zea mays
  unsure (1)..(661): unsure at all n locations
  Clone ID: TF_LIB4977-051-Q1-K1-D10
tcgaggccggccgggncgggttactagagcaccccccggcccgtcgtctactgtctacagcacacatcgcagcagctcgcgaccatcgtccatccgctcaattgtgattgatcgagctgcgagcccatcgcctctagctaagctaccatgggtcggcagccgtgctgcgacaaggtggggctgaagaaggggccgtggacagcggaggaggaccagaagctcgtcagcttcatcctcggcaacaggcagtgctgctggcgcgccgtgcccaagcttgccggtgcgtatctatctatctatgtacgtgcatgctcgatcgatcgtcgcagcttttgtcatgacgagagaagcttgtcgcgcgttgccatgccatgcagggctgctgcggtgcgggaagagctgccggctgcgctggaccaactacctgcggccggacctcaagaggggcctgctctccgacgccgaggagaagctcgtcatcgacctgcatgctcagctcggcaacaggtggtcaaagattgcgtcgcacatgccaggacgaacggacaacgagattaagaaccactggaacaccacatcaagaagaagctcaggaagatggggatcgacccgctcacccacaagcccctcccggcgcccgatccgcatccgccgaaggacc

SEQ ID NO: 2893 - DNA, 1518 bp, Zea mays
  Clone ID: TF_ZmC1497_3
cccacgcgtccgcttctctagatctcctcctcctcttcctctctatctctctctctccccaaccaacaacctgtcgattaagctagctctcagctcatcccggcctcagaaccaaccaattcctgttttagacggttaacaacctacaacaacagttagcatggccacaacacagagcaggggcggcggcggtgttgttcccgttgaggtggacgaggagcacggccgccgccggcagggaggagcagcgccgcaggaggaggaggaggaggaggcggccgagaagccggagctccggcgtggcccgtggaccgtggacgaggaccacaccctcgtcaactacatcgccgacaacggcgagggccgctggaactccctcgcccgcgccgccggtctgaagcgcacgggcaagagctgccggttgcggtggctcaactacctccggcccgacgtgaagcgcggcaacttcaccgccgacgagcagctgctcatcctcgacctccacacccgctggggcaaccggtggtcgaagatagcgcagcacctgccggggaggacggacaacgagatcaagaactactggaggacgcgggtgcagaagcacgccaagcagctcaactgcgacgccagcagcaagcgcttcaaggacgccatgcgctacctctggatgccgcacctcgtcgacgccaccgctaccaccgccgacgacgaataccaccaccaccaacaccaacaccaagccgctgcagcaggcaacatcgacggcctgctcgccggcggcgacgtcgacgacgtccagaacgctctggcggcgggcgtggccgctgctatggcgtcgtcgtcgtccgactcgctcgcgtcggagccgtactcgtacgaggacggtggcctcctcgcgagcgtgcgcgccggcgaggacatgcagctggtgatgagcggcggcggttgggcgatggcgcaggaggccaacgaccaagggctgtggccgtcgtcgtctggtcatggtctgtcgtcgtcggtgcaggccgctgccggtggtgccggccagtttgaggacccggagctcagtggatgggtgcaaggtttctccgacagcattattactggtaacctttgggccttggaggaaatttggaagatgcaatgagcaattttgcgttttccacacgcatccaacgaagagctagcggaaatgtatacgactagtgatgttgacagtagatagaacatgaggttgtcatatataattctcgatctctccctctctctctctatctatatatctctctctctctctctctctctctatatatatatatatatatatatatatatatatatatatatatatatatatatatatatatatatatatatatactctaactccaaatatactatacggtatactaaagttgtatagcattttcatttttttcctcgtttttttatttcgcctcttaaggttcattcttatagaggttggaaaaggagggtattgtttatgcaagtcgaaac

SEQ ID NO: 2894 - DNA, 1105 bp, Zea mays
  Clone ID: TF_ZmC20189_2
ctgtagctagctgatctccctccgaaactctctgctcgcccgctgcctgctggaagcttggcgcggtcccggcggcggcattctccggcaatggggtgcaaggcgtgcgacaagcccaagcccagctaccgcaagggcctgtggtcgccggaggaggaccagaagctccgcgactacatcctcctccacggccacggctgctggagcgcgctccccgccaaagccgggctccagcggaacggcaagagctgcaggctgcggtggatcaactacctccggccgggcctgaagcacggcaccttctccccggaggaggaggagacggtgatgagcctccacgccacgctcggcaacaagtggtctaggatcgccaaacacctgcctggcaggaccgacaacgaggtcaagaaccactggaactcgtacctcaagaagagggtcgagggacccagcacgccgccgtccgactcagacgactcgcattgcgccaagcccggccggggcggcagcacggcgcgggagacgggagacgaccgcccggcggactactccggctcgtcggagccgcgcgagccgtcgtcgtcgcccgacacgagctgcctgacgggcacgcccaaggtcatgttcgtggactggctcgacatggactgcatgggtggtggtggtggtggcccgccgggcgcggcggcagcggcagcggcacctggtctgggcgctgctgcgggcgtggccagggtcagcacgggcgatgatcagatgacgatggatgatgggtcggcgtccggtcgtgccgacgtgtccctgcacggtacgttcggtgacagcggcggcgccggctgctgggagttccacgagagcttcgatcagatgcaggcggccggcttctgcgacctgctctcctccattggcgagtactacttcggactcgactaggctctcggccctggttggtgatcggtcgttgctcaaaggatttgcgcgttttttttttaactttgttagaagtttcgatggatggctttgtctgtgcttgtaaattgttgtcgtgtacggtatagatagagcaattttaaaggcagataaaagtcaaggacggtgacgagtc

SEQ ID NO: 2895 - DNA, 1589 bp, Zea mays
  unsure (1)..(1589): unsure at all n locations
  Clone ID: TF_ZmC16443_1
cagagccccgagcaatcccttctcgcccttttcacttttcagatccagccagccagccagccatcccactccgcaccgcattcctcgcagtggcagagcttgcagcggtggtctcttccccttcctcctgtctcctcctcgctcgatctcctctcccaaacagcgagaagcggatggggagggcgccgtgctgcgagaaggtggggctgaagaaggggaggtggaccaaggaggaggacgaggtcctggcgaggtacatcaaggagcacggggaaggatcgtggaggtcactgcccaagaatgccgggctgctgcggtgcgggaagagctgcaggctgcggtggatcaactacctgagggcggggctcaagagggggaacatctcggaggaggaggaggacatgatcatcaagctccacgccacgcttggcaacaggtggtccctgatcgccggtcacttgcccggtcgaacagacaacgagatcaaaaactactggaactcgcacctgagcaggcgggcggccgacttccgcgacggcgtcgtcgtcgacatcgacctcagcaagctgcccggcggcgggaaacggcgcggcggccgggccagccggggcgccgtcgtggccgcggccaaggagaagaaggccaaggagaaggacgacaggggcaatagcaaggtcgcagaagcggagcagcagctcagggacacggaggacgacgacggcggcagcgtctccacgccgaggcctcagtctgatgactgcggcaccgcccagagcgaagaggagcaagcgcaggccagcgccagcgacctgacatccgatgggcatgggcccgaggaggaggaggaggaggacccgctggctctgagcgaggagatggtgagtgcgcttctggccccggaaagcccaaagctggaggtgggccccgatggctcgtgcatggacagctacagtggccctccgtcaggggaaagcggctgtgggtccagtgggccttctggcgacgtggcccaggacctggacctagacgacgacaaggccatcatggactgggacttgatggggctggacatctcgaccgccggtgacatgtgggaccagctggtgtgggactacgacgaaacgttggtcacggaaccggaaggaggtgaggaagggcaccagcagcaggacgatgtcatgtcagacctcttcttcctggacaatctctaggaggtgcgaggatagcatgggcatggctgccgtgatgctttatgctttttaatttgatccggtacttgtaggtttttgggtgtgttcagttcagagatgagtggcggtgtcagagacgagataaggggagtgctccagtgacatctttgtttgctggccggatctcacgaacccgtagaatggcaagaatgtagaaaaataagcacgcaatatcacttggaaacctttcatcagtagagcctgtctaacatctacagacggagaaatgcaaaaaaaaaaaaaggttgctgggattgccatagtctgctaatccttaggtcttttcttttgacaaacacgattgctttattaattgattcaagtcatgattacnnanca

SEQ ID NO: 2896 - DNA, 326 bp, Zea mays
  Clone ID: TF_ZmC11751_1
ccccaccttcttcgttgcctctcttcctccctctcctctcttccttcctctcgatcgatcgtcatagcaatccaagctagcaagcccgtccgtcgtctctcgtccaagaagcatacaactactaatggggaggtcaccgtgctgcgaccaggacgcgggcgtcaagaaaggcccgtggacgccggaggaggacaagctgctggtggactacatcaacggcaacggccacgggagctggcgccgcctgcccaagcacgccggcctcaaccgctgcggcaagagctgccgcctccgctggaccaactacctccgcccggacatcaagc

SEQ ID NO: 2897 - DNA, 1025 bp, Zea mays
  Clone ID: TF_ZmC19314_1
ctcatctaggcgtcggtcagagctctctcgagctcgccagcggtggttggtcgtcgtcgtcgtcgtcgtcgatggggaggccgccgtgctgcgacaaggcgaacgtgaagaaggggccgtggacgccggaggaggacgccaagctgctggcctacacctccacccatggcaccggcaactggaccaacgtgccccagagagcagggctcaagaggtgcggcaagagctgcaggctgaggtacaccaactacctgcgtcccaacctgaagcacgagaacttcacccaggaggaggaagacctcatcgtcaccctccacgccatgctcggaagcaggtggtctctgatcgcgaaccagctgccgggaaggacggacaacgacgtgaagaactactggaacacgaagctgagcaagaagctgcggcagcgcgggatcgaccccctcacccaccgccccatcgccgacctcatgcacagcatcggcgcgctggccatccgcccgccgcagccggcgacctcccctaacggctccgccgcctaccttcctgcgccagcgctcccgctcgtccacgacgtcgcgtaccacgccgccggaatgctgccgccgacgccggcgccgcagcggcaggtcgtcatcgcgcgcgtggaagcggacgcgcccgcgtcgccgacggagcacgggcacgagctcaagtggagcgacttcctcgccgacgacgccgccgccgccgcggcggccgcggccgaggcgcagcagcagctggccgttgttgggcagtaccaccacgaggccaacgccgggagcagcagcgctgcggccggcggtaacgacggttgtggcattggcgtcgggggcgacgacggcgcggcggcgttcatcgacgccatcctggactgcgacaaggagacgggggtggaccagctcatcgccgagctgctggccgacccggcctactacgcgggctcctcctcctcctcgtcgcccgggatgggctgggccagcatgggcctgctgaacgctgattaa

SEQ ID NO: 2898 - DNA, 319 bp, Zea mays
  Clone ID: TF_LIB3245-455-P1-K1-H9
cggacgcgtgggcggactcgtggggccacaactccggccagaagctagctagccaagttattagctagtacatactagtggccggccggacacgatcgatgggcaggccgccgtgctgcgacaaggcgggggtcaagaaggggccatggacgccggaggaggacatcgtcctggtgtcctacgtccaagagcacggccccggcaactggcgcgccgtgcctgtcagcacgggcctcatgcgctgcagcaagagctgccggcttcgctggaccaactaccttcagcccggcattcggcgcggcaacttcacaccccacga

SEQ ID NO: 2899 - DNA, 1229 bp, Zea mays
  Clone ID: TF_ZmC2204_1
gaattcggcaccatagtggcttcttctccctaatagctaccttcttcctatcaggctggagttcatcaaggatttgaacctggaactggagcccacaagcacacagaggaggaagaacaccaagactggttcccaacctatccaaggtagaagcgagcaacgttagtgtggtagtaacatggtgactgtgagagaggagatgcgtaaggggccatggacagagcaggaggacattcagctggtatgcactgtccgcctgtttggtgaccatcgttgggacttcattgctcaagtctcaggcctcaacaggacaggaaagagctgccgcctgcgctgggtgaactatcttcaccctggcctcaagcatggccgcatgtcaccacaagaagagcgcattatcattgagctccatgctcggtgggggaacaggtggtctaggatagcaaggaggctgccagggcgcacagacaatgagatcaagaactactggagaacacacatgagaaagaaggcacaggagaggaagatgggcatgccatcaccttcatcctcatcctcctcactgacataccaaacctgccttcttgacaccattccagtcattgggatgggcagtggtgacactcacaatggtagctgtgtcaccagcaccctcgagaacacacagagtgtcatggatggatatcccatggatcagatatggaaggagattgaggcaccacatgcacctaacttgctgagtattgctgaagggaaagagaagacgtgcagcagtatcccctgtcatctaccatcacctgtaatgtgggactacaaatgccctgagatattctggaagatgggagatcaagaaatcatgatgtgatggaagatgaaatcaagatgttggctgcacgatttggttatgggcttatggtaaataaggccatcgctattgaaggctgaaggaatacatttatattggtcaggccactcagctatctgcctagcagatttgcagtatttgtacttcctaactatgcttgcattagtatgcagtatttttaaatctagtgtaacactggtggtatgctcataatgtatgtatctatgtagtgtgaaaaatagtttgtatcagtttgtgcaatagtgtggacgctctatatgcatgatatatctatttatctctgttcttgttgtgctgaacgcttctatatgcatgataaaaaaaaaaaaaaaaaaaaaaaaaa

SEQ ID NO: 2900 - DNA, 1514 bp, Zea mays
  Clone ID: TF_ZmC152_1
caatgctcgaggtcgggggggggcggcgaagtttagtcatcgtctccagctgctgtcttgctcttccccgccagcaccagcacgcagcacgcagccaccacaccacccgtcacgtcactactgctccttcctttgtcctctcctgcctcacgtctcacgccagcagaagcgccaaacaccagcagcggacgaccacgccaactctaggtctacgaggaaggaggggggagggaggagcagcgcagcggcagccgatggtgtcgatgagctcgacgccgcaccctctggatccgtccgttccggccgtcgtggggggcggcaaggaggaggaggaggcggtggagtcttgtgccgccgccgcgcccttgccgccggttgggatcgacgacgacgaggagggcccccggagagtgcgcaagccctacaccatcaccaagtcgcgcgagagctggaccgaccccgagcacgacaagttcctcgaggcactgcagctctttgaccgtgactggaaaaagattgaagcatatgttggctccaagacagtaatacagattaggagtcacgcacagaagtactttttgaaggttcaaaagaatggaacaggtgagcatttgcccccacctaggccaaagcgaaaggctgcccatccatatccacacaagtcctcaaaaaaggcccttcaagttgtcttaccacaacaagtttcgcacataatggagcaaggctgtggtacacctatggatgtagctactgttgctacagactctagtgtaaataatgcttttcctgttcaacatttcagtccgaggcatacacaagccatgccagactttgctcgtgtatacaacttcctgggaagcatatttgatccagagacaaatgggcatttgcagaagttgaaggaaatggatcccattgatgctgaaacggtactgttgctgatgaaaaatctgtcaatcaacctaactagtccaaactttgaggagcataggaggttgctctcttcggatgcctcaagcatggatcaaaagtcgggctcttcccgggttcatctcccgttcatgataacgagcaagtgagagaagcagctggctggcctgaaggcaagaaggtcgtttggagtcgtcacactcaggagcaaggcgatgcgtatgtacatatatcttaataagcagctttaggatagcttggtttgctcgacccacatgttgcaagtttatgcgcctttttctttattctctgcccctccagttttgcccattgtagtatggaacttataacatgcgtgttttatgccgcatcttacaaaatttttttgtcccatcacaaggatgaacgggtggggcatgtgtgtgtgttttttgccgtgtgtgtatgtatacaacatgcggctgtgtgtagatcaggctatatatataacagactctgtgctgttctattattgccctcgtttcaaatacttgttttttttgccgttattaataatattattacatggagtatggtattagtat

SEQ ID NO: 2901 - DNA, 1793 bp, Zea mays
  Clone ID: TF_ZmC42_55
agcgacggccgcccttttttttttttttttaatagaacatcatgtctaaacttctactagctagtaactggcaaagcaacaatggcggacaaaaaccttgcgagaccccactacaagcatcacacactacaagtgttaacaccatctggtgggagatgttgcacacaccaaaaatacattaacaattaagccggtacagaaatcttctgatcctggatcctaatccaagccgccggtgacgctggaagaggctttttatcgaatgctttattgttcggtaccgtggaagttgttggactctgtacttgtcgaattttgtacactgaaccgaaatggacgctggaacggcacgcgtacgcccatgggccatggcctcttgttctcgatgaacacaacacagccactcggagctgccgcgagctggcagctggacgacgagactgttccactcttcatcctcgtcacacgcggcgggacgtgccagccatctgatcggtaggagtacacctgaagcaactctgcatccaagcctagcacgacgacgtgcgacttgtgccgccggccctgatgcccgcccggggatagatgaggtggtggttggtggcgtacgttgcgacgggagcggttctcgccgcaagaacagcccgttacaactgtccgcagtgcatcaggaggacggagtcgttgaagcccaggccggccaccagcgagctcttaggctccagcttcacgttgccgtaggggtgcgacacgccgagcgcgtcttggagcggcgcaatgaagggcttcatgtccgggagggcgacggaggggttggtagtggtggtgaccgcggacggtggcgcgttgccgcggtcttcgtcggggaggttgacggtggtgatgtcgtggatgctggaccggcgcttgtccttgccgccggagttgaggcggatgaagtacttctgcgcgtggctagccacctgcgtcggcgtccgggtagtcacgtacttgcgcgagatgttcctccagtcccctctcccgtacttcttcagtcccatcaagaaaagcttgtgctcctcctccgtccaggggacgcccttcttccgctccgggtccgagccgcgcgcgcgcttaaggcagtagccgcgcctgaaccctccgtcccaatcctcgtggtgggtgaacccgaacgacggaaccgagccgctgtagtgcgggaacggcacgagcccggcctcgatgaagccgacgtcgttctccaggtcgtggtagtggttcctcacgtcgtcgaccgtcttcgtgcgcaccacctccgccaccttctcccacctgtcgggcgcgttacggtcgatctgcgccagcgccttctcgaacagtttgttctccgccgccgtccacgcgtctcctccccgccagaaaaccgagtgcgtgtcgtgcagccagaagcagggcgccgtcggcgggaacggcaccggcgtccacgcctccgccatcatcttggccgctgcctgcacacgtgagctgcccgtctggctggtagcgaagaagatgagggagagaagtagggggaggtggaaggtagcgtcagtatttaggggagaagaatcaaattcccggcggatgccgaagtggccggagtttattccggctccaccgttggaggccttaaagaaaaggcgagcaaggaagcggatgcttgtgattgggtcttggactcttggtggagttcgtggcctctcaactctcaaccaaaggccactttctcattgtagatccctggtaaatttgatcccggcccggccggcctcgag

SEQ ID NO: 2902 - DNA, 641 bp, Zea mays
  Clone ID: TF_ZmC256743_2
attgggtacctcgaggccggccggggtctttgctcgcagctaggtccctccttgaactctgcttcttcttcttccaactgatcatctcctaccttttcttttccaatccctaaacctacacacagctttacggtagctgctagtgctagtgcatggccatatatatgcatctataagtagataggttgcaccctccaaggggttcatatcatccaaggtgcatgcaaggagacaggccacaataatgtcccagaggaaaggcgccatggcggctgcagtgacggccagcaagcatcgcgaggaccaggaggcgatgatggtggagctcaggagaggcccctggacgctcgaggaagacaacctcctcatgaactacattgcttgccacggcgagggccgctggaatctcctcgcccgctgctccgggttgaagaggaccggcaagagctgccggctcaggtggctcaactacctgaagcccgacatcaagcgcggcaacctgacgcctgaggagcagctgctcatcctcgagctccactccaagtgggggaacaggtggtcgaggatagcgcagcacctgccggggcgcaccggccaccagatcaagaactactggcggacgcgcgtgcagaaacaagcgc

SEQ ID NO: 2903 - DNA, 1628 bp, Zea mays
  Clone ID: TF_ZmC14101_1
cggaccgggccgggcctcccgggccacaactccacctaaaccgaacgaaaaggctagaagctagctagccaagttattagctactacatactagtggccggccggacacgatcgatgggaaggccgccgtgctgcgacagggcgggggtcaacaaggggccatggacgccggaggaggacatcgtcctggtgtcctacgtccaggagcacggccccggcaactggcgcgccgtgcccgtcagcacgggcctcatgcgctgcagcaagagctgccgcctccgctggaccaactacctccgccccggcatccggcgcggcaacttcacaccccacgaggaaggcatcatcgtccacctccaggccttgctaggcaacagatgggcggccattgcttcttacctcccacagagaaccgacaacgacatcaagaactactggaacacccacctcaagaagaagctccggaagcagcaagccatcggcgccatcttcgcgccacctcccccctccgaacccaccgccggccatgccgattgccgtcgtcacgacatgacccgctcctccaaggacagccacgcttgcctggccgacagcacaccagcggctgatgaggtcgtcacccagctcatcgcccagcagttcgccgccaccgacggtgacacctcgtcgtcgtcgtcgtactcgtacgcctccagcacggacaacatctccaagctgctcaacggcttcatgaagagcgccttcgccggcgcgggacgacgctaccgacaccatcaagacttcctcggccattgacatcgaccctttcgaccacaagtccggcggggcactactaccaccacccaagaagcggcagcagcagcagcagcatctgtcctccatagagaactggttgttcgacgatgccactgagcaggtcgttgtccagctgatggaggagatctccggcggctcatgctcagttcccatgctgctttattagcaccaagaaaaagaagcgaacatgcatgatagccgatcgatagatgtgacttggataggagaatgaatttgtgcatgggtgcaagttacccagctgataggagaattttatatacacccatatgcatgtttcaagttttatttacacaaccatgagccatgagataagaacaatatatatgcatagtcaatcaaaactcccaagcgagaggcacctcaaagaactcaaaaaaaaaaaaaaaaaaaaaaaagacaacgcctggtccaacaagtcttggtgacctggtccggccttccagatgagttggctacgtgggaggatcaggaagccttgcatcagcgctttccattggctcctgcttggggtcaagccggctttccagggtgagggaatgtcacgagctcatccacaccacacaagccacatgaacctgaagaagcagcaaggagaggagagcgtgtccgtcggacaaatgtgagaattactgggcctgaatgggtgtagtgcgttgaatgggccactgttgggctggctttgtaggattcctgtgtgacccttgtaatgggagatagttaaactctgcagtagccagggagatgaggaagaaagaaatagacactgctcctatctacctcctccttccttc

SEQ ID NO: 2904 - DNA, 662 bp, Zea mays
  Clone ID: TF_LIB5116-021-A1-PF1-H6
accagccgtattcttcctagcagctctggcagcctttaccttcggaccagcgtcaacacactgagcaatccatacatcacacacacagcgccagaggtttaacttaattagtcggccgagaagagcagaggagtgagcaaggtagctatggggaggtctccttgctgcgacaagacagggatcaagaggggcccgtggacggcggaggaggacatgaccctggtcgctcacatcgagcagcacgggcacagcaactggcgggcgctgcccaagcaggccggcctgctgcggtgcggcaagagctgccgccttcggtggatcaactacctgcgccccgacatcaagcgtggcaacttcaccggcgaggaggaagacgctatcatccagctccacgccatgctcggcaacagatggtccaccattgccgccaggctgcctgggagaacggacaacgagatcaagaacgtctggcacacacacctcaagaagcgactcgactcgtcctcgtccaagacgtccggccaggcagcgcctaagcgcaaagccaagaagcctgtggctgcagcgagcacagccgatggcccggtctccatgccagtgtcatcaccggagcagcccatctcgtcgtccgccacagattactcgatggcatcgtcgttgga

SEQ ID NO: 2905 - DNA, 1471 bp, Zea mays
  Clone ID: TF_ZmC16901_1
acgcacgtacgggcagtcgcccaggccccagctagctagggcaccgcgcacgcggcacgccccggcccccgctctatttatgccgctagctagcgacaccgaccaggtcactggggggggtcattcccttgtcactagctagatcgactgactggagaggagctatcctcgtctactacctctgggcgagctgcgtgtcctgtcgtccttctcgctcctgtggtcgccgcgcgcggcgctgcgatggggcggtcgccgtgctgcgagaaggaggccgggctgaagaaggggccgtggacggccgaggaggaccagaaactgctggccttcatcgagcagcacggacacggctgctggcgctcgctgccggccaaggccggtctgcggcggtgcggcaagagctgccggctccggtggaccaactacctgcggccggacatcaagcggggcaagttcacgctgcaggaggagcagaccatcatccagctccacgctctcctcggcaacaggtggtcgtcgatcgcgacgcacctgcccaagcgcacggacaacgagatcaagaactactggaacacgcacctcaagaagcggctcgccaagatgggcatcgaccccgtcacgcacaaggcccgcgccgacgtcgtggggggctcctctggcgccggcaacaactctggagcgcgctacagggcagccgcgcacctcagccacacggcgcagtgggagagcgcgcgcctcgaggccgaggcgcgtctggcgcgcgaggccaggctgcgtgcccttgcctcgccgccgccgccgccagggccagggccgggacccgcgtttagcgggctcgagtcgccgacatcgactctgagcttctccgagagcgtgctgttcgccagtgcggcgcacgacacccacgccctgacgtcacgcgcttacgcagaggcgttcggggcggagcagcaacagcgcttcgctgacactgccgccgccgccgacgccgcgccaggcttccttgcaggcgtccttctcggctgctccgtcgccggcgcggagaaggggttcgcggcctcgtcgacggacgccagcgtctgtgagcagcagcaggaggaagaggacaagggctactggagcagcatattgaacatggtcaactcctccatgtcgtcgtccacgtcctcgctgacttccgatgctgtcacggaccccgccgccgcgtacttgccgccggcgacggcggcggccgagttctgagtgattgtcgtgcaataataacgaacctgtgctaatgttaccttgtcatgtgtgttgcttactagtaagtgcgttttttggtgctagttagtttatttacgtgctaatggggtgtcgtccacgtgtgcttgtgctttatgatgtgcaataaacatgtacgtactgattttgtttgcgcgggcgtgtcgtcgatcacctatgtggcccccataacgcccaacactataac

SEQ ID NO: 2906 - DNA, 726 bp, Zea mays
  Clone ID: TF_ZmC741467_1
gggtacctcgaggccggccgggccgccgtttctccaagtccaacgctgcccccaccctctcggcctccgcctccgccaccgccgcggtccttccctcccctgcccaccgagtagatttgaggatctccagcttttttaggacaatccagttttcgtcgaagttcaaaatgacggtggtggaggcgggtgaagtgttgaacttgaaggtgggcgagaaccctctactggagggtgaggccaagacggggtacgtctcgcccgacgaccaagacggggagaccgccagcgaaaaaccctgcggcgcgccccagctgaagaagggcccctggagtcccgatgaagataagcttctcaaaaattatgtcgaggcacacggcgaggggaaatggaacaaggtgcagcgcaactccgggctcaatcgctgtggcaagagctgccgcctccgctggaccaaccacctcatgcccgatctcaagaaagggtctttcgacaatgaggagatcgacaagattttgaagttttacctcaagtggggccccaagtgggccaagatagcctcgcgattgcctggtcgcacagataatgaaataaacttttggaataccagtgagactgatttgcctatctatctttctcaagctcctgcagtttcgagcttacttcctacatgcttcttgggtgtagtgggaatgtgctccctgcatcctggaactgatctgctatgcc

SEQ ID NO: 2907 - DNA, 132 bp, Zea mays
  Clone ID: TF_6165807
ctgaactacctccggcccaacatcaggcgcggcaacatctcctacgacgaggaggatctcatgatcatccgcctccacaggctcctcggcaacaggtggtcgctgattgcaggcaggctgcctggccgaaca

SEQ ID NO: 2908 - DNA, 281 bp, Zea mays
  Clone ID: TF_LIB3079-030-Q1-K1-F3
cggacgcgtgggggcgcgccgccccttcactgtcgacgaggacgcggccatcgcccgggcggacgcccgcctcggcaaccgctgggccgtcatcgcgcgcctgctccccggccgcaccgacaacgccgtcaagaaccactggaactgctccctcaagcgcaagctcggcgccgccgacgccgcgtccggttcggcggttgccgctgacgactgcgtcgccgacggcgagaccgaggcgcgccggggcaagatgatgatgatgagcatctcgcccgccgaca

SEQ ID NO: 2909 - DNA, 958 bp, Zea mays
  unsure (1)..(958): unsure at all n locations
  Clone ID: TF_ZmC764246_1
ctttgtagttattgttcacacctttgcccagtttgcactatgaatcacaaaaggaggcagacatcgctctttgctcggattgcttccatgatgcaagatttgttcctgggcactcaagcttagattttcagagagtggatggaacgaaagatggatcagacaatgatggggacagctggactcatgaggaaactttactgttgctggagggcttggagaagtacaatgataattggaatgctattgctgaacatgtcggaacaaagtctaaggcgcagtgtattcaccattttattcgtattccagtggaagatggtctgttagagagcattgaagtaccagaagcatccgtttcatctagagtacaaagcaatggattttcgtattcaaattccaatggcggcatttcaggtagcgttcctcaaagtagccaacctggacaacagcttccatttgttaattctgctaatccagtcatgtcactggttgcatttttggcctctgcagtaggaccaagaatagcagcatcctgtgcaaatgcagcattatctgttttgacaagagatgattccaggatgtgttcagaaggcaatgatgtcatgggtcaagctgctcgtccaaactatgatgcctcatcatctgtctctcccgaaaacgtcaaatacgctgcaatgtgtggcttgtcagcagcggcaacaaagtgcaaactttttgcagatcaggaggagcgtgaaattcagagattagcggccaccatcataaatcaccagttaaagagattggagttgaagctgaagcaatttgcagaggtggagaccttgcttttgaaggaaagcgagcaggttgagagggccaggcagaatctacagcccagcgtgtccggnttatgtcagctcgattgctttcctccggagtcccatgncctggagcagcagcagcaccatggcatcaaatccaa

SEQ ID NO: 2910 - DNA, 536 bp, Zea mays
  unsure (1)..(536): unsure at all n locations
  Clone ID: TF_LIB4764-028-R1-K1-B7
attgggtccctcgaggccggcctacaacgctgctggaagagctgccggctgcggtggatcaactacctcaggccggacatccgccgaggccggttcacggcggaggaggagaaactcatcatcagcctgcacgccattgttggcaacaggtgggcacacattgccagccacttgcccgggcggacggacaacgagatcaagaactactggaactcgtggatcaagaagaagatccggaagccagcgatgagcacgacgacgagctcggccgtgacggcggccagccctccgtgcagcacggcggcgttggacgcggcgcttggtcgtcacctgcagacgccgttcagcgcggcggagcaccggctcgacgccatcctcagccagagccttgccttgccgccgccgaagctgggctccggcgngcggcgggcggcggcggccaagagtccccgccgctgcccccgcactgccccttcttcatgttcgacacgagcgtcagcgtcagcccgccgtcgtcgctggcgtcgcccgcggcc

SEQ ID NO: 2911 - DNA, 1389 bp, Zea mays
  Clone ID: TF_ZmC21035_1
cttgctttctgtgcctctcagcaaagggcagcgttccttgctatgtcatctagctagatagcacagagcaagctgcctgggcaggcagctagaaaattaacaacaaaaaaaaaggtcaggagcagtgggatttggtcgcttgctgttgcttttggcttcgtctccgggcacatctcactgctgaagcctcatggggagagctccgtgctgcgacaagaacaatgtgaagaaagggccatggtctcctgaggaggatgccaagctcaaggagttcatcgagaagcatggcaccggtgggaattggattgctctccctcaaaaagcagggttgaggagatgtggcaagagctgcagacttagatggttaaactacctgaggcctaacattaagcacggggagttcactgagaccgaagacagggtcatctgcagcatgtatgcaagtataggaagcaggtggtcgatcatcgcgtcgcagctgcccgggcgcaccgacaacgacatcaagaactattggaacaccaagctgaagaagaagctcctcggctccacagccgcgccacaccctcaccgcgcgccacggcagcagcagcagcaccaccaccaccggcccggcctcaacctgatgctccaacaaacgttgccctccttaccccagctggccacctacaacagcttcttctccgtcgcaggcggaggagccctccaccacgacgacccaatcatcccagcgctagcacttccgccgccacaccaggactacatgctaagccccggcggcggcggcggcggccttggcatcccaacgtcactgctgcacgcgcagcagcagtttcagcagcagcaccagcagcatgtggtgaaggaggagagcggcagcatgatcgtgttcggcagggaccagcagagctgcagctcgtcggacggcggcggcggcgcgcatagccagcaccagcagccgcagtacggcaatggccatggcaaggagctgagcttcgacggctacttgttcggctacagcaacggcggcagcggcatggagcacgacaactgcggcaggctgatgcagcagctgcaggacgctcaccagcagcaagcccatcagcatctagtgcctgtggagtacaactacgaggagatcaagcagctgctcatgagcacagccgccgccgatactctgcacgccgccggcagccacgacgacgacgacgacaacggcgggattgaagggttcggcggctcgcaagggaataaggtgacgatgatgtaaattgacgactgatgctgagagatggacgtacgacacgacacagggtaaaagcgattgatgatcaacgcgcaaggtgtgtgtttgatttttactgctgtattatttcttcttgcttcttc

SEQ ID NO: 2912 - DNA, 2114 bp, Zea mays
  Clone ID: TF_ZmC2041_1
ctcctctgcacatgtacactcacctcaaaacccccaagcatcgtgctaaaacccggcctagccctcgaatccccccttgcccgcgcggagtagacgagcccagcccgtcccatcgaccatggcatcctcagggtccgccgctaacctctggtactgcttggcctaagcatcgcgggcgtcctcctggcagcgcggcgattgaggcaccatacgcgccctgaccacgacgctttcatggcccgcctagagctcctcccaccgccacagcctccgccgtcgcaaggaggccagcccgggcgaggtggcgcaggccatcgccatgttccccagatcctgttccacagcgtcgccttcttccaggtacacccagctctcgccttcttcaggcacagctccaagccgtcaagcgccacccagtcccgattcccttcacaccgtctctcgccctatcctatctgacggtccaagactctgagtttgccgtggtgagtgtgcttcactgcttctctaattcctcccgttgcattggttcgatggaatatggcgctgaggaggaggcggcgaccgatgaccccagtagcagcgggggcaccaggcgttgggcgactgaaggggagcccgaagctgactgtggatgcggacatgcgagatatggcgaagacggccgcgtggagcgttagttcctacagggctggcaacggtgtcacggccctgcacgacaacaaccttgacacctgccgacagtctgatggggctcaagtgtacagccgcaaatggtgaacatccagttccagaagaagttgcaggcgtgtagctgcagcctgcagctcgtcgtgatatacgtggatttcaagctcgaagaagtgctccactaaaaatgaaacgttagaattcagctgagcatcttactctacattgcagcaaactgtgacgtgctttgctgagttagattagtctggcatgcttgagtttcccatggtagggcgccgcgaagcgcgcctctttttctagtaaacaaaagcgcaaatggaagccgcttcacgtagcagcccgtgcaaagcaagcgaaagggacccgcgagcagcgaagcaaccaggccaagcgcaacacgacctacaccgtggggccggccatccaggagacacgcgtattccgtcctggacaaaggaccgcatccacttgctagctcgctagtcattacctgatttcgccgcgggcgtcgtcgtctttctccttcctcgtcctttataaaggaaggtggcaatggcctttccctctgcaccgccaagttagcttgcctagccacatcaaagcaaagctagctacggccagctttggcgatctgcttgcttctctctgagcgtttctttacaactaaaccaactgagcaatggggaggcaaccgtgctgcgacaaggtggggctgaagaagggcccgtggtcggcggaggaggacgagaagctcgtcaccttcctcctcaccaacggccagtgctgctggcgcgccgtgcccaagcttgccgggctactgcggtgcggaaagagctgcaggcttcggtggaccaactacctgcgcccggacctcaagcgcgggctgctgtcgtcggaggaggagacgacggtgatcgacctgcacgcgcagctgggcaaccggtggtccaagatcgcgtcgcacctgccgggacgcacggacaacgagatcaagaaccactggaacacgcacatcaagaagaagctgaggaagatgggcatcgaccctgccacccacaagcccctccacccacagccagcagctcctcctccgactcagcaggagcaggacacgggcgggtcgcccgaggaggagggggagaaggccgacgcggtcatgatggcagcagctacgccgattatcgggcacgagacggcgccgttctttaccgacgaggaggagatgctggcgcacctccttgacgacatcgacgacttcccacccgcggcttattctcccgacgactcttcttcgccctcctcctcctcctccgcgtcccggtcgtctcactcggcctccgtcgtcacagcgccgtcgtcgagcggagctggtggaagcagcgtcgccgacggcgagcggccgc

SEQ ID NO: 2913 - DNA, 846 bp, Zea mays
  Clone ID: TF_ZmC14028_2
cagctcgccgctccactctcctggttctgctgcggccgtcgccggctaactagctatagccagccactcggagtcggaggcacagcacctccccccgcgtcgccagcgcacttggacgaccgatggggagggcgccgtgctgcgagaagaaggggctgcggcggggcgcgtggagccccgaggaggaccagcgcctggtggcctacgtccggcagaacgggcaccccaactggcgcgcgctgccccagcaggcgggccttccccgctgcggcaagagctgccgcctccgctggatcaactacctgcgcccggacatcaagcgcggcaacttcacccgcgaggaggaggacgcagtcatccaactccaccaaatgctcgggaacagatggtcggcaatcgctgccaggctgccggggaggacggacaacgagatcaagaacgtctggcacactcacctcaagaagcgactggagcctaagacagccacgcaggcgcccaagcgaaagcccaagaagcagcagcagccagaggcggtgacgctcgcagcgcctgtctcgccggagcagtcagcagtctccacgtcgaccaccagcaccaccactgactactcggcggcctcgtcgtcgttggagaacgcggatagcttcacctcggaggaggaggactaccagattgacgacagcttctggtccgagacgctggcgatggcggtggacagttccgactccgggatggaggaggcagagggcgccttcggcgcgtcgccgccggcgccgtcgaccaacgacgacgtggacttttggctcaagctgttcatgcaggccagcgacatgcagaattcgcccc

SEQ ID NO: 2914 - DNA, 1272 bp, Zea mays
  Clone ID: TF_ZmC17037_2
ttgggtacctcgaggccggccgggggctccttgcctttgttctgttctccattcgcgaaaggctcgcagcaaaaccacgccatcgatcgccgccaccagtccagcatcctccgatcgactacgtactcccacccactccggcagcagcgaggcctctctgtctgtgcgcggcgtggctgtcgtcgatctctgcctggcgggcggccggcatggggaggtccccgtgctgcgagcaggcgcacaccaacaagggcgcgtggaccaaggaggaggaccagcgcctcgtcgcctacatcaaggcccacggcgagggctgctggagatcgctaccaaaagccgcaggtctgctgcgctgcgggaagagctgccggctgcggtggatcaactacctgcgcccggacctcaagcgcggcaacttcaccgaggaggaggatgacctcatcatcaagttccacgagctcttcggcaacaagtggtcgctcatcgccgggaggctgccgggcaggacggacaacgagatcaagaactactggaacacgcacatcaagcgcaagctcctcgcccgcggcatggacccgcagacgcaccgcccgctcgccagcgcgaccgcggggcagcagcattaccagctgcaggagccgcagaagcgagcggccggcggcggtccagcaggccatccgcaccaggaccacttggaggtcgtcgtcatctccaactcgccggacgaggcctacagccgtagcagcgacgacgagccgcggtccgccacgccgccgcggcgccacctcgacatcgacctcaacctgtccatcagcctagcggcctaccagccgccggaggaaaccggcatcatcaagcagccactggtgatgaagcaggagcaggaaacggcggcgggcggcaccaatgccgcggcggtgtgcctgtgcctcaacagcctcgggtaccggccgggcgtcgagtgcgtttgcggcgacggcagctcctcctcctcctcctggcactcccactcccactcccaccaatgggctctgaattttttacaggcggcggcgccctgctacagaggccaatagtgtagtaagagcgatcagtgacatcattaaaatgggagcgttattacgatcgagactgagggtgagggaggggggcagagctgagcagggatagtagttaactacagctagtagtagtagtagtacgtaaaagacacacatgcttaggctttaacaagtctctgaaacacgcatcatgggttatgagttgtgctct

SEQ ID NO: 2915 - DNA, 1348 bp, Zea mays
  Clone ID: TF_ZmC1497_1
ccggccggggagagctccctttcaggtagagaaaactgatcatcttctctagatcttctcatcataccgataccggcctcaacgccctctctttcccagcctcacaaccaattcctgtttcagtcgatcgcagttagcatggccgcgacacagagctgtcaggctgctgcttgcttcccggccgccgtggcggtcgacgaggagcacggccaccacagccaccagctgaagggaggagcgcaggaggaggctgagaacgacaataagccggagctccggcgtggcccctggaccgtagacgaggacctcaccctcgtcaactacatcgccgacaacggcgagggtcgctggaacaacctcgcccgcgccgccgggctgaagcggacgggcaagagctgccggctgcggtggctcaactacctccggcccgacgtgaagcgtggcaacttcagcgccgacgagcagctgctcatcctcgacctccacacccgctggggcaaccgatggtcgaagatagcgcagcacctgccggggaggacggacaacgagatcaagaactactggaggacccgggtgcagaagcacgccaagcagctcaactgcgacgccaacagcaagcgcttcaaggacgccatgcgctacctctggatgccgcacctcgccgacgacgtcgataccatcgctgcggccaacgacgacgacgaagaccaccaccaccacctacgcctcctcgtcctgcatcaccaccaggcccagcacctgcagcaagctgctgccgcggccggcggcgctgccaacgaccttgctgcgggcgcctacgacgtccgccagctgcacgcgctgccgtcgtcgggcatggcggcgacgtcgtcgtccgactcgctcgcgtcggagtcgtacgatgacgggggcctgcttttcgcgaacttgcgcgccggcgagatgctgatggacggcggagattgggcggcgcagcaggaggccgaccaagggctgtggccgccgccgccgccgacgtctgatcttgatcagtcggtggtgcaggctgctggtgccggcgctggccagtttcaggacatggagctcagtggttgggtgcaaggcttctccgagagcattacagataacttttgggccttggaggaaatttggaagatgcaatgagcgagcaattttacatcttacacatccatccaaattaaagacaacatagatacacatatacataccatatattctaacaacaggtgccatatacgatatacatacacaagttgttgtatagttgtattccgcttatatatatatatttttgcctctcaatgaagttcattcttatagaggttgg

SEQ ID NO: 2916 - DNA, 1421 bp, Zea mays
  Clone ID: TF_ZmC1497_2
agactaataaattccctcacatgctttactctctcctcgcatcttagcctataaaaggactgaggaattgcgatacggctgctgctaactgatcatcttctctagatcttctcatcataccgataccggcctcaacgccctctttttcccagcctcacaaccaattcctgtttcagtcgatcgcagttagcatggccacgacacagagctgtcagagcaggagcagcgcctgcagcaaggctgctgcttgcttcccggccgccgtagcggtcgacgaggagcacggccaccacagccaccagctgaagggaggagcgcaggaggaggctgagaacgacaataataagccggagctccggcgtggcccctggacggtagacgaggacctcaccctcgtcaactacatcgccgacaacggcgagggtcgctggaacaacctcgcccgcgccgccgggctgaagcggacgggcaagagctgccggctgcggtggctcaactacctccggcccgacgtgaagcgtggcaacttcagcgccgacgagcagctgctcatcctcgacctccacacccgctggggcaaccgatggtcgaagatagcgcagcacctgcctggaaggacggacaacgagatcaagaactactggaggacccgggtgcagaagcacgccaagcagatcaactgcgacgccaacagcaagcgcttcaaggacgccatgcgctacctctggatgccgcacctcgccgacgacgtcgataccatcgctgcggccaacgacgacgacgaagaccaccaccaccacctacgcctcctcgtcctgcaccaccaccaggcccagcacctgcagcaagctgctgccgcggccggcggcgctgccaacgaccttgctgcgggcgcctacgacgtccgccagctgcacgcgctgccctcgtcaggcatggcggcggtgccgacgacggcgacgacgtcgtcgtccgactcgctcgcgtcggagtcgtacgatgacgggggcctgcttttcgcgaacttgcgcgccggcgagatgctgatggacggcggagattgggcggcgcagcaggaggccgaccaagggctgtggccgccgccgccgccgacgtctgatcttgatcagtcggtggtgcaggctgctggtgccggcgctggccagtttcaggacatggagctcagtggttgggtgcaaggcttctccgagagcattacagataacttttgggccttggaggaaatttggaagatgcaatgagcgagcaattttacatcttacacatccatccaaattaaagacaacatagatacacatatacataccatatattctaacaacaggtgccatatacgatatacatacacaagttgttgtatagttgtattccgcttatatatatatatatttttgcctctc

SEQ ID NO: 2917 - DNA, 1319 bp, Zea mays
  unsure (1)..(1319): unsure at all n locations
  Clone ID: TF_ZmC1497_4
gcacgagccgataccggcctcaacgccctcnnnnncccagcctcacaaccaattcctgtttcagtcgatcgcagttagcatggccacgacacagagctgtcagatggccacgacacagagctgtcagagcaggagcagcgcctgcagcaaggctgctgcttgcttcccggccgccgtagcggtcgacgaggagcacggccaccacagccaccagctgaagggaggagcgcaggaggaggctgagaacgacaataataagccggagctccggcgtggcccctggacggtagacgaggacctcaccctcgtcaactacatcgccgacaacggcgagggtcgctggaacaacctcgcccgcgccgccgggctgaagcggacgggcaagagctgccggctgcggtggctcaactacctccggcccgacgtgaagcgtggcaacttcagcgccgacgagcagctgctcatcctcgacctccacacccgctggggcaaccgatggtcgaagatagcgcagcacctgccgggaaggacggacaacgagatcaagaactactggaggacccgggtgcagaagcacgccaagcagctcaactgcgacgccaacagcaagcgcttcaaggacgccatgcgctacctctggatgccgcacctcgccgacgacgtcgataccatcgctgcggccaacgacgacgacgaagaccaccaccaccacctacgcctcctcgtcctgcaccaccaccaggcccagcacctgcagcaagctgctgccgcggccggcggcgctgccaacgaccttgctgcgggcgcctacgacgtccgccagctgcacgcgctgccgtcgtcgggcatggcggcgacgtcgtcgtccgactcgctcgcgtcggagtcgtacgatgacggaggcctgcttttcgcgaacttgcgcgccggcgagatgctgatggacggcggagattgggcggcgcagcaggaggccgaccaagggctgtggccgccgccgccgccgccgccgtctgannntcttgatcagtcggtggtgcaggctgctggtgccggcgctggccagtttcaggacatggagctcagtggttgggtgcaaggcttctccgagagcattacagataacttttgggccttggaggaaatttggaagatgcaatgagcgagcaattttacatcttacacatccatccaaattaaagacaacatagatacacatatacatatcatatattctaacaacaggtgccatatacgatatacatacacaagttgttgtatagttgtattccgnnnnnnnnnnnnnnnnnnnngcctct

SEQ ID NO: 2918 - DNA, 337 bp, Zea mays
  Clone ID: TF_LIB3245-072-P1-K1-A9
ccggagggaccgtcccgggatgaccgacgcgtccgacgcctcctacctcgcacagggatttaatagtctttttacaaagacaaacaggcgaacaggaaacacacacggtcgaaccgagacacctcaatataataatggcgagcgcctaccgtgctgcgagaagattgggctaaataaggggccatggacgcacgatgaggacaaggtcctggtcggccacatacagagcttctgacacacgaactggagcacgctcgccaaacaagcactgctatttcggtgcaccaagagttctcagctccggtagatcaactacctgagccatgacatcaagcgc

SEQ ID NO: 2919 - DNA, 1388 bp, Zea mays
  Clone ID: TF_ZmC42_25
aagcacggcccaatcgccggccgacactcacaagaacctgcctccctctggatcgctatctcttttctagtgcccagggaaagctagctagctcacagctgagctgagggaagaaagcaaggagagggagccagggaggaaggggaaaaacacgcggagagggtgagcaagaaagaaccgaggcggatcgccttctgttcctcctgccggctccgcgagaggaggcactgctcaggggggaagaaagaggtggaacaacgcccggggcagagcagagatgatgcgggagacgtacatggacgtgctgccgccggtggaccacatagccgcacggagcaactggttcccggcggcggcgcgtctgtggacggcggcggagaacaagcagttcgagcgggcgctcgccgggctcgacctctgccgcccggactgggaggaggtggcgcgggccatccccggccggacggtccgcgaggtcgtcagccacttcaagcacctcgaggtcgacgtccagcagatcgagagcgggcaggtgcccttgccggcctacggcggcggggccagctcgttcaccctgcagtgggacggctacggccccggtccgggggacttcaggcacgggtaccgcttcgctggaggctgcgggaggcggcaccacggccgcacgccggagcaggagcggaagaagggcgtgccgtggacggaggaggagcacaggttgttcctcctaggcctgaagaaatacggcaagggggactggaggaacatatcgcgcaacttcgtccagaccagaacgcctactcaggtggccagccacgcgcagaagtacttcatcaggctcaactccggcggcaaggacaagaggaggtccagcatccacgacatcaccacggtcaacctgacggacgaccagccgccctcgccgtcccagtcctccctgatcaccagccagtcgaacgcaccagctccagctccaggtccggctccggccgcagggatatgccaggtcccattggcggccgacgccaagcgacacggtgccagaactctgcccttcagctcaccgaacaggacctctgcggcgccggcctacaggatggagtttcatgaccaacagggcctgcagtgtggccctctgcatgatcagttgctcgccagccagagcgttctgttctaggcgcggtggcagcccaccctgcggcatggatcgaccaggtcaggtgcctagtgtataatacttgtggtatcgctgtagcttcagcgcctgtattgaagggattagccttttgggagcataacagaaaggaggtcttcatttcatggtggtccataatttgttggagaatgtaacaaaaggaacgccgagaattcgatgccatggtattttc

SEQ ID NO: 2920 - DNA, 1600 bp, Zea mays
  Clone ID: TF_ZmC42_41
cccaatcgccggccgacactcacaagaacctgcctccctctggatcgctatctcttttctagtgcccagggaaagctagctagctcacagctgagctgagggaagaaagcaaggagagggagccagggaggaaggggaaaaacacgcggagagggtgagcaagaaagaaccgaggcggatcgccttctgttcctcctgccggctccgcgagaggaggcactgctcagtcccgtgattcctacagggggggaagaaagaggtggaacaacgccccggggcagagcagagatgatgcgggagacgtacatggacgtgctgccgccggtggaccacatagccgcacggagcaactggttcccggcggcggcgcgtctgtggacggcggcggagaacaagcagttcgagcgggcgctcgccgggctcgacctctgccgcccggactgggaggaggtggcgcgggccatccccggccggacggtgcgcgaggtcgtcagccacttcaagcacctcgaggtcgacgtccagcagatcgagagcgggcaggtgcccttgccggcctacggcggcggggccagctcgttcaccctgcagtgggacggctacggccccggtccgggggacttcaggcacgggtaccgcttcgccggaggctgcgggaggcggcaccacggccgcacgccggagcaggagcggaagaagggcgtgccatggacggaggaggagcacaggttgttcctcctaggcctgaagaaatacggcaagggtgactggaggaacatttcgcgcaacttcgtccagaccaggacgcccacccaggtggccagccacgcgcagaagtacttcatcaggctcaactccggcggcaaggacaagaggaggtccagcatccacgacatcaccacggtcaacctgacggacgaccagccgccctcgccgtcccagtcctccctaatcaccagccaatcgaacgcaccagctacagctccggccgcggggatatgccaggtcccattggcggccgacgccaagcgacacggtgccggaactctgcccttcagctcaccgaaccggacctctgcggcgccggcctacaggatggagtttcatgaccaacaaggcctgcagtgtggccctctgcatgatcagttgctcgccagccagagcgtcctgttctaggcgcggtggcagcccaccctgcggcatggatcgaccaggtgcctagtgtataatacttgtggtatcgctctagcttcagcgcctgtattgaagggattagccttttgggagcataacagaaaggaggtcttcatttcatggtggtccataatttgttggagaatgtaacaaaaggaacgccgagaattcgatgccatggtattttcagactgttgctcgagtggtatggctggaaacgtatcatgcatcctatgaagtggacttgcattcaatcatggatgatcctatgaagtgtcggttaaccttggttgtgaccatctgattctgctgctgtctctgaagatggtgccttatattgaggccttccgagttcaaaccattctgtagtgtccagacatatttatccgtagtaatcagtttgcct

SEQ ID NO: 2921 - DNA, 1893 bp, Zea mays
  Clone ID: TF_ZmC42_48
cattgggtacctcgaggccggccgggaagcccggcccaatcgccggccgacactcacaagaacctgcctccctctggatcgctatctcttttctagtgcccagggaaagctagctagctcacagtcacagctgagctgagggaagaaagcaaggagagggagccagggaggaaggggaaaaacacgcggagagggtgagcaagaaagaaccgaggcggatcgccttctgttcctcctgccggctccgcgagaggaggcactgctcaggggggaagaaagaggtggaacaacgccccggggcagagcagagatgatgcgggagacgtacatggacgtgctgccgccggtggaccacatagccgcacggagcaactggttcccggcggcggcgcgtctgtggacggcggcggagaacaagcagttcgagcgggcgctcgccgggctcgacctctgccgcccggactgggaggaggtggcgcgggccatccccggccggacggtgcgcgaggtcgtcagccacttcaagcacctcgaggtcgacgtccagcagatcgagagcgggcaggtgcccttgccggcctacggcggcggggccagctcgttcaccctgcagtgggacggctacggccccggtccgggggacttcaggcacgggtaccgcttcgccggaggctgcgggaggcggcaccacggccgcacgccggagcaggagcggaagaagggcgtgccatggacggaggaggagcacaggttgttcctcctaggcctgaagaaatacggcaagggtgactggaggaacatttcgcgcaacttcgtccagaccaggacgcccacccaggtggccagccacgcgcagaagtacttcatcaggctcaactccggcggcaaggacaagaggaggtccagcatccacgacatcaccacggtcaacctgacggacgaccagccgccctcgccgtcccagtcctccctaatcaccagccaatcgaacgcaccagctccagctccggccgcggggatatgccaggtcccattggcggccgacgccaagcgacacggtgccggaactctgcccttcagctcaccgaaccggacctctgcggcgccggcctacaggatggagtttcatgaccaacaaggcctgcagtgtggccctctgcatgatcagttgctcgccagccagagcgtcctgttctaggcgcggtggcagcccaccctgcggcatggatcgaccaggtgcctagtgtataatacttgtggtatcgctctagcttcagcgcctgtattgaagggattagccttttgggagcataacagaaaggaggtcttcatttcatggtggtccataatttgttggagaatgtaacaaaaggaacgccgagaattcgatgccatggtattttcagactgttgctcgagtggtatggctggaaacgtatcatgcatcctatgaagtggacttgcattcaatcatggatgatcctatgaagtgtcggttaaccttggttgtgaccatctgattctgctgctgtctctgaagatggtgccttatattgaggccttccgagttcaaaccattctgtagtgtccagacatatttatccgtagtaatcagtttgcctattggtggtggtgcctgcctcaatctatgtttggagtttggacaagtttaattttctcgtatgaacgaatttcggtgaagagaagataaacgaagctgagtttgcaatgagtcactcagcattgctgctacttgtcaatatctctcatatagtcaactttttgctttggttcatcattttcttatagaaaataacagctttcttaaacccgctccactgttaagtgctcatatgtggcgtttttctgtcgatgatgctagctccaccgaat

SEQ ID NO: 2922 - DNA, 1231 bp, Zea mays
  Clone ID: TF_ZmC17859_1
gcccagcgttccatactcctggagatagaaaatatatagacagagctcgttactagtcgtagctagccagggctagctgtagctgaagtcatcatcagataaatatattcatcagcctgtaattaatagctagttttcagtggattagctagcttggcaatatatatttaactaataaggcggcggtggcatggacgcgatcagcagcctgctgctgcaggagggctggaggaagggcccgtggacggcgctggaggacaggctgctcaccgagtacgtgcagcagcacggcgagggcagctggaactccgtcgccaagctcacagggctgcgccggagcgggaagagctgccggctgcggtgggtgaactacctccggccggacctcaagcgggggaagatcaccccggacgaggagaccgtcatcctccagctgcacgccatgctcgggtgcaggtggtcggcgatcgcgcggtgcctgccagggaggacggacaacgagatcaagaactactggcggacgcacttcaagaaggcccggccgtcgcggcgcgcccgggcacagctgctgcaccagtaccagcagcagcaggaggaggagcgccgacagtacctccagagcctgcagctcctgcagcaggagcagcaacaacagcagctgctcctccagcagcagagtcagcagctggtggtgaaacaacagcagctggagcagcaaagcccgccggagcctgatcaccaggccgtgatggcgatgttggacagccagcagagcacggcggaatgctactgcagcccggtgccggtggtgccagagcagtgctgcgcgctcccggccgacgacgacgacgccatgctgtgggatagcctgtggaggctggtggacggggacgggcgcggctgcggcgacggcgacgactccagcggagtcgcatactagccggctagtacgtacgtgtgcgtgtctataccagtgtaaaaaaacaaagcgggatgaagaggaggttcttcaggtttcagctgctgcaaggcaaggatactgctagtggtagtagagacatgctaattttgcaacgagaatagttgatcatgtttcatgttttttttattttacccatgaaccatgagcaagtggcattgtatcaaaaggccctctgtttatacaaggtcgaaataccttcatgtaactttggtttcaagaataaagaccgtgttttagcatggatttatt

SEQ ID NO: 2923 - DNA, 862 bp, Zea mays
  unsure (1)..(862): unsure at all n locations
  Clone ID: TF_ZmC1193_2
gcccgggcccgtnagcacttagcccccaacaacaacaacagcaccaacttccactcctgcaaacccaacccaacccaacccaccaccgagcacaagaaaaaggagagccatcggcggcggcagaccatcgtctaaagagatagtgaggcagcaacgatggggaggtcgccgtgctgcgagaaggcgcacaccaacaagggcgcctggaccaaggaggaggacgaccggctgatcgcctacatcaaggcgcacggcgaggggtgctggcgctccctgcccaaggccgcggggctgctccgctgcggcaagagctgccgcctccgctggatcaactacctccgccccgacctcaagcgcggcaacttcagcgacgaggaggacgagctcatcatcaagctccacagcctcctgggcaacaaatggtctctgatagcagggagactgccggggaggacggacaacgagatcaagaactactggaacacgcacatcaggaggaagctgacgagccgggggatcgacccggtgacccaccgggcgatcaacagcgaccacgccgcgtccaacatcaccatatccttcgaggctgcggcgcagagggacgacaagggcgccgtgttccggcgagacgccgagcccaccaaggcagcggcagcggcgatcacccacgtcgaccaccatcaccgtagcaacccccaccaccagatggactgnnggccagggaagccgctcaagtgcccggacctgaacctggacctgtgcatcagccccccgtcccacgagggacccatggtggacaccaagcccgtcgtgaaagaggaggccggcgccggcggtcggcgtcgtgggcctctgcttcagc

SEQ ID NO: 2924 - DNA, 2224 bp, Zea mays
  unsure (1)..(2224): unsure at all n locations
  Clone ID: TF_ZmC21016_1
ccggccgggccgggctcgccatttccatttccttgcccttgccagccagagcgagactccaccgcttcctctccgccgcgtcctcctcccctcccttccgttcctcacggctctccggactcgccccgcggctggccgtgctgagtttcgttctctggccggcaaagaagcgatttttttgtgctttctggacggatcccggccggagaagggaccgaatttccacgacctcgaccgccggctgctcctctgctgggctctccgtgcgcaagaagagcctaccaaggtgaatccggagatttgagctccgggcccgcctcatggagtccatggcgcaggaaagggacgcgttggattcacctgccttgtcgattgacaaaaggctgcggtcggatgctgtcgaatcacccctggtggatgatgcaacgcaacccaaggagggggcggacggttaccctgtcaaggttcggaagccttacacgatcacgaagcagcgagagaagtggacagaggaagagcatgggaagttcctggaggcactgaagctctatggtcggtcttggcgccagatacaagaacacattggcacaaagactgctgtccagattcggagccatgctcagaagtttttctccaaggtcgtgcgtgaacctggggccagtaattcaattgagatcccaccccctaggccaaagagaaaaccactgcacccataccctcgcaagtgtgccgactccaccgtgacaaatgctccaatgggcgaaccgaagaatgctcctgtttcatcaccatctggttctgaccaagagaatggttcgcctgtctcggtgttatctgcaatgcagtcggatgcttttggttcatcaatatcaaacccatcaactgggggcacgtctcctgcgtcatcagatgatgggaataatgtccctgagatagtgaatggggaggaaaatttgctcactcagcaaatagaagaccgatcccatcaggaatcaaagcaggacaacagtgatggtgagctgtctgaagaagattcatcacgagtccaagaaaccagtttgaagctttttgggaagacagttatcatcccagacccaaagaaagtctgttcctcggatgggggagctggagatgatacacaagaagtgatgcaaacatcctgggttggaggaggggtggcagcataccctgcccataacggatggtttcttccgttccattctttccctgctcatatgtatgagtcaggggatgctaggatttcccctcttcatatgtggtggccttactacggttttccggccggccatccaagagggtttggcacagggctgcttaacgaaggcgccattgagagtgatgccgacaatagcccatcggttgaaactaattctgatcgcacgggcaatgttcatgttcagacgacgacccctaccattcacaacaatgctgtcaaggagtcagttgggccagttgagatgccagagtcgggtccgagcattgagctgaaacccagcgcgaactcggcctttgtaagagtgaagccgagcagcagcgtcagcggagaccaatcactggtaagggggttcgtgccatacaaaagatgtaaggtcgaataacccaacccaacgacatacctgtctgctgctaatcttactggagattgattgatcctgaacagtgtagggactcgagtggcacacatcccttgttccagtgtgcctgccattttttgcctgcaaaattggctgctggtgtatgtgtaatattgtcgttttactgcctgcagcggaatgtaagatgccgcaggcttgttgctgtcacctaggcgtagactgaacagatgttgtgcagggatcgccgatctctgcacccttatgtttgttgtacgaggaaaaccggattctgttgaactctcgtgttcaaaaattcattgattcctgatggaaactgatttgtaaatgaacatggcaatgccgccggacaggtcacagtgtatcctgtaagaccaattcttttggtccttgaacaatggaatgcagactaggttttggtcattcaaataaaaaataaggtaagatgttagagttcgaattcttctagttgcttgttttttgtttttgtgattttctgaactgaaagagtgcgtctgggctgatgctgtganagaaagtgtaggatgataacatataaaaaaatatagaaattaaaaaagagaataagt

SEQ ID NO: 2925 - DNA, 737 bp, Zea mays
  Clone ID: TF_LIB4764-081-R1-K1-H2
ccggccgggaaggaaatacacagagaccgggcatataaatgtaagcaagaccaatgtaaggcctcccccccaggggggcggggcagcagcggagggggaagatgacgccggtggtcctcaggctgttcggcgtggacgttcgccgggttggcgccagcggggagccggaggagtcgccgatggacctgaggaagagctccagcatgcccgacctcaccatcaacccgctgctgacgccggaggagaaagagggctgcaaggggtacgcctccgacgacgcggagctggcgtccggccagcagaagcgccgccgtcgcaaggcacaggacaggaagaaaggaattccatggaccgaggaggagcacaggaagttcctggacgggctaaggcagctgggcaagggggactggaggggcatctccaagggcttcgtcaccaccaggacggcgacgcaggtggccagccacgcccagaagtacttcctccggcagaccaaccccgggatgaagaagcgccgggcgagcctcttcgacgtcggtatcgcggactacaaggacaaccaggtgccaggccctcagagcatcgtcactgccaaaccggcgcctacgcaggagataatccacaccgaccgcggcgacgtccccataccaagacgatatagaggcctcggagagattttaggcagtaacatgcaggttaatcaactgactgactactactattttcacaagaactcc

SEQ ID NO: 2926 - DNA, 1446 bp, Zea mays
  Clone ID: TF_ZmC13262_1
gtcgttgtagtatagtcgccagtacttcggggcccgcggcccaggggggcggggcaccacaggtactcttctcctgcttggcctcttgtgccgcaaccgcgagtgcggcctacggtagcctccaaagcagcacatccaaagcagggaccgaatggacatggaccggccggaggaggaggggcagcagcggagggagacgatgacgccggtgctcctcaggctgttcggcgtggacgtccaccggggtggcggcagcggggagccggaggagtcgccgatggacctgaggaagagctccagcatgcccgacctcaccatcaacccgctgctgtcgccggaggagaaagagggctgcaaggggtacgcctccgacgacgcggagctggcgtccggccagcagaagcgccgccgtcgcaaggcacaggacaggaagaaaggaattccatggaccgaggaggagcacaggaagttcctggacgggctaaggcagctgggcaagggggactggaggggcatctccaagggcttcgtcaccaccaggacggcgacgcaggtggccagccacgcccagaagtacttcctccggcagaccaaccccggtatgaagaagcgccgggcgagcctcttcgacgtcggtatcgcggactacaaggacaaccaggtgccaggccctcagagcatcgtcgctgccaaaccggcgcctacgcaggagataatccacaccgaccgcggcgacgtccccataccaagatatagaggcctcggagagattttaggcagtaacatgcaggttaatcaactgactgactactactatttcaacaagaactcccatgttcccgcggggacttcgctctccatggcctccggcctggaaacggcctcgaccgtcgacagcctggagctcagcatcgccgtcaacggcctggagctcagcatcgcgcccccttcccggtgcgtctgcggcggcgcggcgggggccatcaaggttctgtgactcggccgggacgccgagggagctactcgcatttggcttcccctgcgagcatgcgtttcatcaagtattatcagcctcgtcaggctgccgcgcgcagccgggtttcggtcttgctggttgtgttggtgtgttctgttctgttttgttgtgcgcaaggaatgtttgtgaagtgcattgcgttgtaatacactaatactagcagtgttgtggaatggaattaggggagagggatcagctgggatttgggggttgatgggtccctgtctcgacttcgagtgggttcgtttcgtgttccaatccgaggaggcggcgacgggcgcaaggcgtcgtgtgggtgtggctctgagctccccgatcccgcccaataattggaccgtgccgtccaaaacgcatacgccaactaatcttcggaagaaagtcgcagctttacgttcaggggagagggatcc

SEQ ID NO: 2927 - DNA, 1912 bp, Zea mays
  Clone ID: TF_ZmC16180_1
tgtctctccctcagctccctccagccgccgattaatcgatcgatcacctattcacctagctagccggccagttgctggttctcttcttcgcatgctgccgattaatttattccacgctcgattgcggtggcggctttagttaatagttatagggagcttcaagatagcaagcaagaaacggtgcaggattattggaggaatagagcttcaattcagatagcagctgcaggctgctgttgattcggcgatcggtcgatcgaggatgtgcacgaggggccactggaggccgtcggaggacgagaagctgaaagagctcgttgcgctgtacgggccgcacaactggaacgccatcgccgagaagcttcaagggagatcaggtacgggtgctgtgtgctgatgctactatgtctgtatgattatcaaaactaaaaatcgtatattattaagcatgtatatacatgtctgagtttttttttcgggttggatttggtgagctatatatatccaccaagagctaatttccttccttctcgttgatccaccaatattgttcgcgttggggtttgactttgcaattggggcatgcatgcatatgggtttagttagttaaaggaagtttagatctgttagggtgtcatatcagagagaggtgccattttttagctccactatatactctcgccttgatgtgcatgtcatatccgtgtcacttgtagagcaattttgtctagaaatataccctctctatatatctaccgagttcagcttttcttgctttctaatttacctgagtacgtggccgtgttccttctcgcacgagctactggccatggagtagctaagctagctagcttgcgcatgcacgccccaagagagaacagctagctagctagcgtgattgaggagctgtataataacctaattaaaatgaaaaattgaatcttttcagggaaaagctgcaggctgcggtggttcaaccagctggacccgaggatcaaccggagccccttctcggaggaggaggaggagctgctcctcgcctcccaccgcgtccacggcaaccgctgggccgtcatcgccaggctgttcccggggcgcaccgacaacgccgtcaagaaccactggcatgtgatcatggcgcggcggtgcagggagcggatgcggctgtcgaacaggcgtgccggcggcgctgcttccggtgctggtgctggtgccgtcgtcgccaccggtgctgctgccgaagatggcagtaaccctaggagcgccaataagaagccgaggcctgacgcgagcggcatggcctccttgctagacaagtaccgaagagaattttccgccgccgtcccgtttgccattaaccatgatagcaatcagcagcagggctattgttcaaatactaacgaaggtgaatactgctactactacgtactgcatgtatgctagctactaccatatatacaagacaaatttttcatcaactttactaattacatgccatttcgaatctgatctgcagacgcaaacaaatcagtcgaattctacgatttcctccaagtgaacgcgaactcgagcgacaccaagtgtggttcgagcattgaggagcaagaggcggagagccgggatgacgatcaagccgaagggcaggtgcagttcatagatttcctggaggttggggcttcccatcgccgccggtgatttttatctatatatttaactagggatgcatccaaagcaggttgtaatgctttgtgaaagaggcaggcatgctgcaaatagcaatcgtcgtctaacaccaaacgtacttgtagaggaagcaaaatgcaccgtgcatatgacatattgtaatttattgttgtatacatatatctgtccatatatatccaccgttggggggacatgtgcaaaattaaac

SEQ ID NO: 2928 - DNA, 1088 bp, Zea mays
  Clone ID: TF_ZmC14028_1
aaaaccacccgcgctccgccaatccagagagccagccagcccgaggtcacacagcagcgagctcggtcttctcgccaggacacgaacacgaccccagcaggcggcaggcaagccacgctctctcgacggacggacgttaatcgagacatggggcgctctccgtgctgcgagaagatggggctgaagaggggtccgtggacggccgaggaggacaggattctggtggcgcacgtcgagcgccacggccacagcaactggcgcgcgctgcccaagctaagcaggcgggcctgctccgctgcggcaagagctgccgcctccgctggatcaactacctgcgccccgacatcaagcgcggcaacttcagccgggaggaggaggacgccatcatacagctccaccaaatgctcggcaacagatggtcgacaatcgctgccaggctgccggggaggacggacaacgagatcaagaacgtctggcacacccacctcaagaagcgcctggagccaaagccagccagccagcaggcgcccaagcgcaagcccacgaagaagcagcagccgcagccggagcccgagcccgtaacgacgctcgaggggccggccggagccgtgccgccggtgtcgccggagcggtcactctccacgacgacgtcgaccaccaccagcaccgcggactactcggccgcctcgtcgctggagaacgcgggcgacagcttcacgtcggaggaggactactaccagatcgacgacagcttctggtccgagacgctggcgatgacgacgacggtggacagcttcgagtccggggtgcagcaggcggagggcagcttcggcaagtcggcggcggcgccgtcgtcgaccaacgacgacatggacttctggctcaagctgttcatgcaggccagcgacatgcagaatttgccccagattatttaggcgggaaacggacctagacggtttgttatctctcggctgatgatgatattctttggcgcgcgctcacgattctttgaatctttgttctgctccgttttcggtggatgtatatatcccactgaaaccttgtgaagcggaaagcaattgcttcgt

SEQ ID NO: 2929 - DNA, 945 bp, Zea mays
  Clone ID: TF_UC-ZMFLB73085C02_FLI
ccacggcaatcgatcgatcggtgctttgatctctgagcctgagcaagcggtcgagctcaccaaccgccacgctcaagacaggtcgagtagctagctagctgccggagtggaaaaggaggcggtgcagtggcatggggaggccgccgtgctgcgacaagatgggggtgaagaaaggcccgtggacccccgaggaggacctcatgctcgtctcctatgtccaggagcacggccccgggaactggcgcgccgtgccgaccaacaccgggctgatgcggtgcagcaagagctgccgattgcggtggacaaactacctccggccgggaatcaagcgcggcaactttaccgagcaggaggagaagctcatcgtccacctccaggctctccttggcaacaggtgatggtcactcgcctgtcgtcgtcttaaagcttttgttcccgttttgttttttccgctgtaacaaatggatcggacaaaccaaatcatccacggcacgaggtgatcgtgtgctgagcttgttgatctgcatgccgtgcacttgttgatgtgtcgtgcaggtgggcggccatagcatcctacttgccgaagaggacggacaacgatatcaagaactactggaacacgcatcttaagaagaagctgaagaacatgcagggcggcgaagggggcgcgggagggaagcgcccggccgttcccaaggggcagtgggagcggcggctgcagactgacatccacacggcgcggcaggctctgcgcgacgcgctctcgctggagccttcggcgacgccgctggccaaggtggagcctctgccgacggctccggggtgcgcgacgtacgcgtctagcgccgacaacatcgcgcggctgctggaggggtggctgcgcccgggcagcggcaaggggccggaggcgtcgggttcgacgtcgacgacggccacgacgcgcca

SEQ ID NO: 2930 - DNA, 1414 bp, Zea mays
  unsure (1)..(1414): unsure at all n locations
  Clone ID: TF_ZmC13187_2
cattgggtacctcgagggccggccgggaaaaaaattttcnnnnaaaaaaaaaaaaaaaaaaaaaaaaaaaaaaaaaaaaaaaaaaaaaaaaaaaaaaaaaaaggcaaaaccagtaggcccgggaggcaactaagacaaagtggcgtactcttctctgtactagctttcttcttcctcctcctcttcctcctcccaaacagactggatttcatcaagataatcctgaaactggagccaacaagcagacagagaaagaagagcaagaagaccggctcccagccgatacaaggtaggagtgagcagcgttagatcagttttcatcacaggatcgatatggtgacagtgagagaggagactcgcaaggggccatggacagagcaggaggacctgcaactggtatgcactgtccgtctgttcggtgaacgtcgttgggatttcattgccaaagtatcaggtttgaggggtggggatccacaaattaggtagctaaattgaagtcacccgcgctaagtcgcaaaagcagctatcagcctctctgaccgactctattcttgcttcccctctccccttctgtatcttcatgcagggctcaaccggacaggcaagagctgccggctgcgctgggtcaactacctccaccctggcctcaagcgtgggcgcatgtctccccatgaagagcgactcatcctagagctgcacgctcggtggggaaacaggtggtccaggatagcacgccgcttgccagggcgcactgacaatgagatcaagaactactggaggacacacatgagaaagaaggcacaggagaggaagaggaacatgtctccatcgtcgtcctcgtcttcgctgacttaccagtcaggctacccagatactccatcaaccattggagttgagggacaggagcttcatggtggcagtggctgcatcacaagcatcctgaagggcacccctccggacatggatggctatcccatggaccagatatggatggaaattgaggcgccacagatgccctcggaggagagctttgttggggggaaccataatgtgtgcagcagccttgccaccccgctgccaccaccaactgtctgggaatactacccagatgcctgctggaaggttgacgatgagatcaagatggcaacacaatttcaatttggttatagtgaaggagttgggccctgcttctgatgccataaatattgggtcagattactaagttatacacctacctagcagaagtgaagtgcttttgtagaaacaagctttagcatggatctgaatatttatctccgcgcttagaattgcaggtctatggatctatgcatggttgctatgtatctatctagtgtgcaagacaagattatcttaatttgtccttgatgctatggaatacaagggcaaaggtact

SEQ ID NO: 2931 - DNA, 1601 bp, Zea mays
  Clone ID: TF_1491932
agccagcacagcacacacactggaaagtgcaagctgtagtgagacctgcgcgactgccagcgtgtatccgcgcggcaaggagcgtagcgccggtcgtcggcccgcacggccaccaactcccttggacgcacgcgcgaccagctgctaaccgtgcgcaagtagtagtgcgacttcgccgccggccgggatcgctagctcgatcgatcggcgggaccacatacgactccggtgtggccagtggcggccggcccggggaacgcacgtcctgcgagcgagcgagggcagacgctagctgttgccgggagctagccggcgcgcgatggggagggcgccgtgctgcgagaaggtggggctcaagcgagggaggtggacggcggaagaggaccagttacttgccaactacattgcggagcacggcgaggggtcctggaggtcgctgcccaagaatgcaggcctgctccggtgcggcaagagctgccggctccggtggatcaactaccttcgggcggacgtcaagagggggaacatctccaaggaggaagaagacatcatcatcaagctccacgccaccctcggcaacaggtggtccctgatcgccagccacctccccggccgaacagacaacgagatcaagaactactggaactcgcacctcagccggcagatccacacgtaccgccggaaatacaccgccgggcctgacgacaccgccatcgccatcgacatgagcaagctgcagagcgccgacaggcggcgcggcggcaggaccccgggccggccgccgaaggctagcgccagcaggaccaagcaggcggacgccgatcagcccggcggcgaggcgaaaggcccggccgcggcggcgtcgagcccgcggcacagcgacgtggtgaacccgggcccgaaccagcccaacagcagcagcggcagcacgggcacggccgaggaggaggggcccagcagcgaggacgcgagcgggccgtgggtgctggagccgatagagctcggggacctagtctggggggaggccgacagcgagatggacgccctgatgcctatcgggcccggcggcacgactcggctgccctcgaagggcttggcgcggtcggctgagaggcccaggtggacgacctgttcgacatggactgggatggcttcgcggcccatctgtggggcgggccggagcaggacgagcacagcgcgcagctgcggcaggccgccgagccgctggaagttgctgctgctgctgctgctgcgacggcggcccgcaccccggacgatcgcgagctggaggcgttcgagacttggctcctgtccgactcgttctgacggctccggtcaccggaccgatcagacagaccaaccaaggtggcccggccatatggtcgacgccgctagtaggcgttgctcgtgtgtacagtttttttttcttttttgtagattttgttcttagctcttgctgtttcgtgtatggcatgtagaatagagagcagagagtcgtatggcattgtaaaggtagttctcccgccggtgaagtgaagaccaataaaaaaaagcagcgcagcagtaggcgctgctgcagcctgcacggcggcgttttggca

SEQ ID NO: 2932 - DNA, 661 bp, Zea mays
  Clone ID: TF_ZmC1193_8
gctctcgaccgatcggcgccacgagtgctttgctttctggctgctgggagcgcgccatggggaggtcgccgtgctgcgagaaggcgcacaccaacaagggcgcgtggaccaaggaggaggacgagcggctggtggcgtacgtccgggcgcacggcgaggggtgctggcgctcgctgcccaaggcggcggggctgctgcgctgcggcaagagctgcaggctgcgctggatgaactacctccgcccggacctcaagcgcggcaacttcaccgacgacgaggacgagctcatcatccgcctgcacagcctcctgggcaacaagtggtccctcatcgccgggcagctgcctggccggacggacaacgagatcaagaactactggaacacgcacatcaagcgcaagctcctcgcccgcggcatcgacccgaagacgcaccgcccgctcggcgccggcgccgacgccgccgcgccacccggcgtggtcgcgcaccgggcgctgctgcaccgcgcagccctcgtcgagctcgccgtgaagccggcgccggcggagtcatccgacgacggcggccggagcagcggcaccagcagcggcggcggcggcggcgccagcgtggaggagccgcggtgccccgacctcaacctcgacctgtccgtgggcccgcc

SEQ ID NO: 2933 - DNA, 1808 bp, Zea mays
  Clone ID: TF_ZmC29713_1
cgccagcacggcacacacactggaaagtgcaggctgtggtgcgacctccgcgactgccagcgtggctcccgggggcatcgagcgtcgcgccggtcgtcggtacgcagggccaccaactcgctacgacggagccgctaccagctgcgaaccgtgcgcaagtagtagtgcgacttcgccgccggccgggatcgctagctcgatcgatcggcgggaccacatacgactccggtgtggccagcggcggccgggccggggaacgcacgtgctgcgagcgagcgagggcagacgctagctgttgccgggagctagccggcgcgcgatggggagggcgccgtgctgcgagaaggtggggctcaagcgagggaggtggacggcggaagaggaccagttacttgccaactacattgcggagcacggcgaggggtcctggaggtcgctgcccaagaatgcaggcctgctccggtgcggcaagagctgccggctccggtggatcaactaccttcgggcggacgtcaagagggggaacatctccaaggaggaagaagacatcatcatcaagctccacgccaccctcggcaacaggtggtccctgatcgccagccacctccccggccgaacagacaacgagatcaagaactactggaactcgcacctcagccggcagatccacacgtaccgccggaaatacaccgccgggcctgacgacaccgccatcgccatcgacatgagcaagctgcagagcgccgacaggcggcgcggcggcaggaccccgggccggccgccgaaggctagcgccagcaggaccaagcaggcggacgccgatcagcccggcggcgaggcgaaaggcccggccgcggcggcgtcgagcccgcggcacagcgacgtggtgaacccgggcccgaaccagcccaacagcagcagcggcagcacgggcacggccgaggaggaggggcccagcagcgaggacgcgagcgggccgtgggtgctggagccgatagagctcggggacctagtctggggggaggccgacagcgagatggacgccctgatgcctatcgggcccggcggccacgactcggctgccctcgaagggcttggcgcggtcggctgcgaggcccaggtggacgacctgttcgacatggactgggatggcttcgcggcccatctgtggggcgggccggagcaggacgagcacagcgcgcagctgcggcaggccgccgagccgctggaagttgctgctgctgctgctgctgcgacggcggcccgcaccccggacgatcgcgagctggaggcgttcgagacttggctcctgtccgactcgttctgacggctccggtcaccggaccgatcagacagaccaaataattgggtcacgtgtgctcgctcgctcgctcgctgccgtcgcgtgggtcttggttcagatggccaaataattgggaaaaaaattctacgcgccagggccgtaaagccaccaccgtgcgctcctgatgtcgatgcctgccgcgtggagctcttgcgtatctaacgctcccacgacaatcacccttccagacggctcgaattacatacgacaggatcggctccgctctactccgttctgttcgcttctgctttaggtgcgtgcctagcagatggtgaggcggcgtcgcgcggccctcccgacggctcgccggccgcgctacggggcctgctgcagcagcccctcctccacgcctgtaaaagagctttgtatttacctgtttgtttgtgcttttgtgcaatggaataaacaatgatattatactgaataaacatgaatgttctgagac

SEQ ID NO: 2934 - DNA, 897 bp, Zea mays
  Clone ID: TF_ZmC234163_1
atcgtctccggtctccctcttcaacttccccgaaacgaaagcttacttttttatactaacttctagggtttcaggactaacctccctcccttcgcgccatctcccgcggtgctgcctcctctggcgccgattcgccgctgggagccccaattctataacccctctgttcgatctgggatccgctagattcgttggggcggtgatgagggcgatggcggaggtgatgcaggaggggtgcgtggagaatcggcagccactggcggcttcgagctcgtccgtgtcggatggcagcagctgtggcggcggagagcgggcggggacgtcgccgccggtgtcaagctccgggaattccatctccgttctgagacgaacaagtggaccgataagaagaactaagggtggctggacactgaaagaggatgaaacactgcggaaggcagttgaagctttcaagggtagaaattggaaaaaaatagctgaattttttcaggacagaactgaggttcaatgtttgcatcgttggcagaaggttcttaatccggaacttatcaaaggcccttggactcaagaggaagatgaaaaaatcattgaccttgtgcgcaagtatggaccaacaaaatggtctatcatcgcaaaatcattgcctggccgcataggcaagcaatgccgagagaggtggcataatcacctgaatccagaaataaggaaagatgcttggactcctgaggaggaaagggcccttattgatgctcatcaagtgtttgggaataaatgggcagaaatagcaaaagttcttccgggaaggactgataattccataaagaatcattggaacagttctttggaaaagaagtagaaagctatagtaacagcagtgttctttcagttttcaagctg

SEQ ID NO: 2935 - DNA, 626 bp, Zea mays
  Clone ID: TF_LIB4761-014-R1-K1-G7
accctcgaggctggccgggcagaaataaaaaggaaaaatccgggagaggataacaaaaaagaaaaaaacccaaagagattcctctcaccaccaccaaccctagacgatcctcccccgccatgatgcgggacggcgtgcctccgtcggtggccggctccggcggcgcggcgggcggcgacgggcccaggcgatgctcgcagtgcgggcaccacgggcacaacgcgcgaacctgcacggggcggcccgtcaagctcttcggcgtgcgcatcgggggcaagcccatccggaagagcgccagcatggggaacatcgcgcacctcgccgcggagggcagcggcggcagggaggaagggtacggctccgacggggagcgcccgcacaagaagcgaggtgaggcatggactgaagaggagcacaagaagtttctgcttgggttgaataagctagggaaaggcgattggcgtggtatatcccgtaaatatgttgtttcaaggacacctactcaagtggctagccatgcgcaaaagtatttcaatcgccaaacaaatgtgcctggaagaaagagaagatcaagcctattcggtttggtgattgttgacccgtctgctcaacttccgctctcgcgt

SEQ ID NO: 2936 - DNA, 1497 bp, Zea mays
  Clone ID: TF_ZmC2821_1
cattgggtacctcgaggcaggcgggggggcttcgaacccctagcgtccggaaaaaagaaaaaaaccacaaagagattcctctcaccaccaccaaccctagacgatcctcctccgccatgatgcgggacggcgtgcctccgtcggtggccggctccggcggcgcggcgggcggcgacgggcccaggcgatgctcgcagtgcgggcaccacgggcacaacgcgcgaacctgcacggcgcggcccgtcaagctcttcggcgtgcgcatcggggacaagcccatccggaagagcgccagcatggggaacatcgcgcacctcgccgcggagggcagcggcggcagggaggaagggtacggctccgacggggagcgcccgcacaagaagcgaggtgaggcatggactgaagaggagcacaagaagtttctgcttgggttgaataagctagggaaaggcgattggcgtggtatatcccgtaaatatgttgtttcaaggacacctactcaagtggctagccatgcgcaaaagtatttcaatcgccaaacaaatgtgcatagaagaaagagaagatcaagcctattcgatatggtgattgatgacccgtctgatcaacttccgctctcgcgttcatcttcacaagaaatggagcagcaacatttagatgatccacagcctgttgcagccctgcctgcacctgtggtctctccagctactgtggtacctcctgtgcctgtggaagtgtctgcttcagttccatcgccagttcaggtcccagttccagtttcagccccagtgatgacatctcagcctatggaacaggactcagataccacaagttcaattgctggagaggcaggaacggtgatgccaggagccatgcccccctatctttatccaatgatgattcctcctccatactaccatactgcttttgtaccaatgccctgctacggttatgttcctttttactgtgagccacaaggtgctgcacaggctccgcatgaggttgtcaagccagtggctgttcattcaacgcctccactgaatgccaaagacctttacaacatgtctgaattgagcctgaagggcgactcgaatgcaaacggtggtgtgcctgcttcccccttgcctccgaagccgatcggtagaccagagaggcaatctgctttccatggcaaaggacctacacctaccggtggctcgtcaggtggactgattcctgcagtcaagtgaattcgattatgctcctaaacatgccttcatgtgtatgtaatactagaaatagccaaatcgtaatagccgcctgtgctgctaaaatggtggtgtgttttctagcaaaatatctatactgctcattttagccttcaccagtttggaagtcatgatccgagggtaaatatattgttagcttgttgtttttgcaatagtcttctttttttccccatcaatttgccccaattttcttcatcaatccttaaagttatcaattattatttgtttt

SEQ ID NO: 2937 - DNA, 868 bp, Zea mays
  unsure (1)..(868): unsure at all n locations
  Clone ID: TF_ZmC2204_2
ctcgaggccggccgggacaaagataagactagtggcttcttctccctaatagctaccttcttcctatcaggctggagttcatcaaggatttgaacctggaactggagcccacaagcacacagaggaggaagaacaccaagactggttcccaacctatccaaggtagaagcgagcaacgttagtgtggtagtaacatggtgactgtgagagaggagatgcgtaaggggccatggacagagcaggaggacattcagctggtatgcactgtccgcctgtttggtgaccatcgttgggacttcattgctcaagtctcaggtttgaggggttggagaactacaacttaggcctcaacaggacaggaaagagctgccgcctgcgctgggtgaactatcttcaccctggcctcaagcatggccgcatgtcaccacaagaagagcgcattatcattgagctccatgctcggtgggggaacaggtggtctaggatagcaaggaggctgccagggcgcacagacaatgagatcaagaactactggagaacacacatgagaaagaaggcacaggagaggaagatgggcatgccatcaccttcatcctcatcctcctcactgacataccaaacctgccttcttgacaccattccagtcattgggatgggcagtggtgacactcacaatggtagctgtgtcaccagcaccctcgagaacacacagagtgtcatggatggatatcccatggatcagatatggaaggagattgaggcaccacatgcacctaacttgctgagtattgctgaagggaaagagaagacgtgcagcagtagcccctgtcatctaccatcaccctgtatgtgngactacaatgccctg

SEQ ID NO: 2938 - DNA, 778 bp, Zea mays
  Clone ID: TF_LIB4739-022-Q2-K1-A2
aactgatcatcttctctagatcttctcatcataccgataccggcctcaacgccctctttttcccagcctcacaaccaattcctgtttcagtcgatcgcagttagcatggccacgacacagagctgtcagagcaggagcagcgcctgcagcaaggctgctgcttgcttcccggccgccgtagcggtcgacgaggagcacggccaccacagccaccagctgaagggaggagcgcaggaggaggctgagaacgacaataataagccggagctccggcgtggcccctggacggtagacgaggacctcaccctcgtcaactacatcgccgacaacggcgagggtcgctggaacaacctcgcccgcgccgccgggctgaagcggacgggcaagagctgccggctgcggtggctcaactacctccggcccgacgtgaagcgtggcaacttcagcgccgacgagcagctgctcatcctcgacctccacacccgctggggcaaccggtaattagtcaacttttccctcccaagtccgagatcgatcaccgacacgtcgtcttagcttgcacgtgccggagttcttggactggaaatcgtgtggacggccgcacggtagccctgttaaaaacggcagcttgctctccagtccagtagtaatagaagctagtgcccacgtacatgatgcacctgtcactgcaccgagatcgtatggtatttgtacgtacgtgcacaggtatatacaactatcccccggcccgtaccgtatagacgtggagccgtacgta

SEQ ID NO: 2939 - DNA, 1055 bp, Zea mays
  Clone ID: TF_UC-ZMFLMO17291G03_FLI
gagcagactgcaatgaatcatatcctcaagaggataaaaaaactattacctcctgtgcagggcatcagcgacaggaaaagagagatgaatgaacgaacctaatccatccatcagcagcgtaaccaaatcaggcacaggtttgagtattaaaccagtggaagtgatgagctgggagcaggcctaacccttttccaccaactctacaagagctcccgcgatccagtcaagtgccctataaaatccagccccgcttggcttcacccacccttgggctcgcaatcgcagcaacgatggggagatcgccgtgctgcgagaaggcgcacacgaacaagggcgcgtggaccaaggaggaggacgaccgtctggtggcgtacatcaaggcgcacggcgaggggtgctggcgctcccttcccaaggccgccggacttgtgcgctgcggcaagagctgccgcctccggtggatcaactacctgcggcccgacctcaagcgcggcaacttcacggaggaggaggacgagctcatcatcaagctccacagcctactcggcaacaagtaggcagcccgaccgacctcaagcactaaggcacccactaaggcactaactgtgttgtctgtgtatgatctgtttgttgggtcacagatggtccctgatcgctggaaggctgccgggcaggaccgacaacgagatcaagaactactggaacacgcacatccggcggaagctgctgagcagggggatcgacccggtgacacaccgccccatcaacgagcacacgtccaacataaccatatcgttcgaggactggggccaggggaaggcgctcaagtgccccgacctgaacctggacctctgcatcagcccgccgtgccaggaggaggaggaggccatgctgctgaggccggtgaagcgggaggaggccgggctctgcttcagctgcagcctggggctccccaagagcgcggactgcaagtgcagcaacttcctcgggctcaggaccgccatgctcgacttcagaagactcgagatgaaatgagagcttccatccatctctgc

SEQ ID NO: 2940 - DNA, 1403 bp, Zea mays
  Clone ID: TF_ZmC2941_1
attgctctccaaccaacaggcaaccaaacctcgtctcgtcttctctccgctaccaccaccactgctcgttttacagaaaccggaaggaaccaaacgcctttccgccccgggccgccgctacccaagcccagcaaccaccactcgttgtcgtcgactactaggcggcaagcaggcgtcctgtttttttttttttggtcctcgtcgtcgtccggactccggacaggacaggacatgggcgcggaggcggcggagcgcgacagaatcaggggcccgtggagccccgaggaggacgaggcgctgcggcggctggtggagcggcacggcgcgcgcaactggacggcgatcgggcgcggcgtcccgggccggtcgggcaagtcgtgccgcctgcggtggtgcaaccagctgtcgccaagggtggcgcgccgccccttcacggccgacgaggacgcggccatcgcccgcgcccacgcccgcctcggcaaccgctgggccgccatcgcgcgcctgctccccggccgcaccgacaacgccgtcaagaaccactggaactgctccctcaagcgcaagctcggcgccgccgccgccgcgtccggttcggcggtttccgctgacgactccgccgccgccgccgagaccgaggcgcgccggggcaagatgatgatgatgagcatctcgccgcccgacagcccctcggggtcggggtcggggtccgaccgtagcgacctcagcagccacggcgccgggtccgggtccgggtccgggtccggccagatttaccgccccgtggccgcgcgctccggcgggttcgagccggcggactgcgccatgagccgtccgcaggaggaggacccgctcaccgccctcagcctctcgcttcccggcacggaccagcggtttcaccaccacagcgccgccgccgacagccacttccaggagctcccgccgtcgccctcctcacccgcgccctcggcctacccgttcagccccgagttcgcggcggcgatgcagcagctgatccgcaccgaggtgcagcggtacatggcgagcgcgggcctgcgcgccggctgcggcgccgttggcgcgaccgacctctgcatgccgcagctggtggacggcgtcatgcgcgctgccgccgaacaggtcggccggatgcagtagccccgcgcccccggcgggggcatcaaaccgtcagtgctcccaaatcgtcgtctagctagggcgaccgcaacgcaacggttgttggagtagcaaacttggttttaaggtggagggaaaaattggctgggctgaaagcagaaagccttgtaatgtacatgaaagaaacggaacggatggcgcgctacaatctgagctcgccattgccgcatatatctgctttaagagagcattgcgctgccttgcct

SEQ ID NO: 2941 - DNA, 957 bp, Zea mays
  Clone ID: TF_ZmC28328_1
ggcagcgacgatgagccggcggtgcgcaaggggccgtggacgctggaggaggacctcatcctcgtcagctacatctcccagcacggggagggctcctgggacaacctcgcgcgcgcagctggactgaaccgcaacggcaagagctgcaggctgcggtggctcaactacctgcggccgggggtgaggcggggcagcatcacggcgggggaggacacggtgatccgggagctccacgcgaggtgggggaacaagtggtccaagatctccaagcacctccccggccgaaccgacaacgagatcaagaactactggaggaccaggatccagcagaagaagcagcagggagccaagacgacgcagcagcgggaaccgtcgacgaccgccagctccggcgccggggacgactactggtgcaccaagcccgaccccaaccagcaagcgcactactgcctgcagaaagccgccatggcagctgcgactgcgacgacgagcgcggtcgtcgtcagcagcgaggacgacgcgccgtcggcggcgctgacgagccaggacagctccgcggcggccggcggagactggtacatgcaccagcagcagcagatgtgctacccgtactgctccgagctgagctttgtcgccgccggccacgatgaaacggtcggcctggacgctgtgacgatgcagttcttgtcgtcgcacttcactgccagcttttggacgaacggcgtggatgatttctgggagtcaaaaccgatcgattactgatgcgttctgaacactcatacaaacgtacttacttctgatactagctacaacttaacgggcaacaaaagggaagagtatatatatttgtcgatatagaactgtagaagcgttatatatatataccttgtactagagcactttattactctttttgtgatgcgtggtatgatgatctcacttaatttttcattattg

SEQ ID NO: 2942 - DNA, 1117 bp, Zea mays
  Clone ID: TF_ZmC13262_2
tctcgccgccaccaacagcgcctcgccgtcggcctcctcctcctcgtcgctcgtctcggtggaggaggcacgcacccgagaagatggcccacgggtacctctccgacgggctcatgggcagggcggcgcaggagaggaagaagggcgttccatggacggaggacgagcacaggcgattcctggcgggcctggagaagctcgggaagggcgactggcgaggcatctcccggcacttcgtgacgacgcggaccccgacgcaggtggccagccacgcccagaagtacttcctccggcagagcagcctgacgcacaagaagcgcaggtccagcctcttcgacgtggtggagaacgccgagagggcggcgacgagctccatcaagggcatggagcgcctgcggctcaaggacgccatcacgaccgcgaccgcgactggctccgcagaacccggaaccggaacgacggcacagctcccgccggccctgtcgctcggcgtcggcaggccaccagcgaggcccgaccacgccgcgctgcctccgagcagcctgctgtccctgcagctgccgcggtgctcggcgggaattggccgcacggcgccgagcctggccctggcgccgccgaaacacagccacccttcttcgccgctgacggcggcaaaggctggtggcctggcgccggacctggagctgaagatctcgaccgcccggcagagcgagcaccagcagcaggtccagatggggccatcgctgccgccgccgccgccgccgccgcagaggacgccctttctggggaccatcagggtcacatgacatgaccggcaaagacggcggcggttagtagggaatatcctgctggtaggagaagagcttttgcccatctgaagctggagaaggttgcttcaaaagataggacggggtgggaaaactggaaagaaggaagcttttggcagcgtgtgcgtgtgtgtgtgttgctggcacctggcagtggcagccgagacgacgatggcgtcgtgtatcatgtgggtgttgtgtatatcatatcatcatcatccgaaagatggaaactttactggcctaaaaaaaaaaaaaaaaaaaaaaaaaaaaaaaaactcgaggagggg

SEQ ID NO: 2943 - DNA, 890 bp, Zea mays
  Clone ID: TF_ZmC42_22
ttgggtacctcgaggccggccgggtccagcacggcccatcgccggctgacactcacaagaacctgcctccctcggtctggatcgctatctcttttctagcggctccagagggagggaaagctagcgcacagccgagagaagaaagcagagagggagggagaacaaagagagagaaaaaaaaaccagagaggttgagcaagaaccgaggcggatccgccttttgtccctcctgcccgagggctagcctgcccccgcgagagatcgagaggaggcgccgttcagttcaggggggtgagaagtcgggggggaagaaatgatgcgggagacgtacatggacgtgctgccgccggtggaccacatagccgcctcacggagcggcggttggttcccgggcgcggttcgtctctggacggcggcggagaacaagcagttcgagcgggcgctggccgggctcgacctctgccgcccggactgggagaaggtggcgcgggccatcccgggccggacggtgcgcgaggtcgtcagccacttcaagagcctccaggtcgacgtccagcagatcgagagcggcctggtgcccatgccggtctacggcgccggggccggctcgttcaccctgcagtgggacggctgctacggccccgcggactcgaggcacaacggctaccgcttcggaaacggaggctgcgggaggcggcaccacggccgcaccccggagcaggagcggaagaagggcgtgccgtggacggaggaggagcacaggctgttcctcttaggcctgaagaaatacggcaagggggactggaggaacatatcgcgcaactacgtccagacgcggacgcccacgcaggtggccagccacgcgcagaagtacttcatcaggctcaact

SEQ ID NO: 2944 - DNA, 1364 bp, Zea mays
  Clone ID: TF_ZmC1597_2
cgtctgcaccgaatcgatcgatcggtgcttttaatctctgagcaagcgatcgagctcaccaacaaccaccgcgctcaagagtagcagccggccggagccgaaaacgacgaggcggtggcatggggaggccgccgtgctgcgacaaggtgggagtgaagaaagggccgtggacccccgaggaggacctcatgctcgtctcctatgtccaggagcacggccccgggaactggcgcgccgtgccgaccaacaccgggctgatgcgctgcagcaagagctgcaggttgcggtggacaaactacctccggccgggaatcaagcgcggcaactttaccgaccaggaggagaagctcatcatccacctccaggctctccttggcaaccggtgggcggcgatagcgtcctacttgccggagaggacggacaacgatatcaagaactactggaacacgcacctcaagaagaagctgaagaagatgcaggccggcgaagggggcgggggagacggcgacggcgcagcaggtgcctcggaaggcggcgccgtcgccaccgcaggcgcgggagggaagcgcccggccgtgcccaaggggcagtgggagcggcggctgcagaccgacatccacacggcgcggcaggctctgcgcgacgcgctctcgctggaaccttcgccttcggcgccgccgccggctaaggtggagcctctgccggcgaccgccccggggtacaagacgtacgcgtctagcgccgagaacatcgcgcggctgctggagggctggctgcgccccggcagcggagggggcaaggggcccgaggcgtcgggctcgacgtcgacgacggccacgacgcagcagcggccgcagtgctccggtgagggcgcggcgtccgcgtcggcgagccacagtggcggagcgcccgcgaacgcggcggcgcagacgcccgagtgctcgacggagaccagcaaggtggccggcgcgggctccgcgccgccggcgttctcgatgctggagagctggctgctcgacgacggcatggggcacggcgaggacgggctcatgaccgacgtggtgccactaggggaccccagtgagttcttttaatcaaggccgctgtacaagtaccactaaaagcaaattaatcaagtagagatgcaagaacaaaagggaaaaaataatcgccgagttattaggtaataactagttaagcagaaatccaacgaaccaaatttctttgaattctcggtgatatggatcgagttgagtgtcgatctagtttgttttaatcccctcttttatcttttttacgctgttgtttctctgatgttagggattggaactgatcgtgtaagcttatactaatgacaggttcct

SEQ ID NO: 2945 - DNA, 1991 bp, Zea mays
  Clone ID: TF_ZmC21354_1
gccaactccggcgacgggacgcctccgtcgccgcgcgagctctacaccatcccggcatcatccggttggttccggtgggacgggatccacgagacggagcggcgggcgctgccggagttcttcggaggggcaggcggcgctgggttcgggacggcgacgcggaacccgcggatctaccgcgagtaccgcgacttcatcatcgccaaataccgggaggacccggcgcgccgcctcactttcaccgaggtccgcagggcgcttgtcggggacgtcacgctcctccggaagctctttgccttcctcgactcctccggcctcatcaacttctcggcctcctcgtcctcggtccccgcgtcgcggcagcaggaggtgggggtcgtcgtggaggcgcccgtgggtctgcaggtgacgccgcgtcctccagcgtcctacttcgccgaagagaagcgtgtagcggcgggcggggagaaggagaacgaattccggttgccgccgctgacctcctacagtgatgtgttcggggaatgggcacctgggaaggcgcctatatgcggtttttgcggtgaggagtgcaatggtgcggatgttgagacgctgcaggatggttttaaagtatgttcaaaatgttccaaaagcaataatgataatatcaaggaagaggcgaataaatgtcctggtgacaaaaaagagaatatggaaaatcatgcttccagtgcatggacagacactgagacgttactccttttagaaggagtcctaaaacatggagatgattgggatcttatcgctcagcatgtccgcacaaagaataaatcagaatgcatagcaatgcttattcaattaccttttggcgaacatatgctgggcacaataaatggtaaattcgttagcaggctccacataaaccagacagatgatggaaaaacgaaccagcacattatggagtcttcaagtcactcaaccgaaatggctgatggcatgcagattgatggaagtgaagatagtgctgataaatcagttgaagaatatcctacaaaacgcagacgattgtttttttcaatggatgctaccacttcattgatggagcagttagctatcctgaccacagcagctagcccagatgttgctgctgctgctgctgatgccgcaattaaagcatttggcaatgaaaacccgcaagcaaggaaagcctttcgcctcaacgagcaagaatataagactaaggcttttgcttctaatcatgtccaacagattgaccacaaagttagcaataaggatacggcgatgcatggccagagtggttctgataagcaggaaaagaagttcattgctagcgcatatcaattgagggcagctgttgctactgctgttggtgtagctgctgcccgtgctaaaatgcttgcagaccaggaggagcgagaaatggagctcctaatggcgtctgtaattgaaactcagctaagaaagatgcaatacaagatcaaacactttgaggagctagattcactcatggatcaagagtacaccgctatacagcaaatgaagggatccctcatgaatgaatggataaaggtccttgagcatgcattccgggctggagtgtctctaccgagagatgaattgctcaccaaactgttgctgaactagccgcccatcccatgaggacctggctgtagtcgagtagttctctgatatgcgtcacccccttgactgttgctggtagatagcttcctgcgtgggtgcgtctgtaaaggtgccgattgtgctttcgatttctcagaattttggggatcagaacaacccttcgtaactctttgccctgttgtaccaaactaggttagatggcaaaattgctgaaattttcttgtagctgttgacatgtatggtttcgttcgtatggatgtgaaaatggtacctcagttttggagtttcagaaaaaaaaaaaaaaaaaaagaacccacgcgtccgcccacgcgtccgcccaccgtccg

SEQ ID NO: 2946 - DNA, 852 bp, Zea mays
  unsure (1)..(852): unsure at all n locations
  Clone ID: TF_LIB4766-044-R1-K1-H8
cattgggtacctcgaggccggccgggcattcatttcttaggagtaggtgttcccttcttcatctcttctcctcacaaggcttcctcccaccacctccagtcctccaccggaccaccacctccagtcctccaccggaccaccacctccaccactcctctctcagaacacgcgcaaaccgctcgaaccctagctggtggcgggaggcggaggtggctccgggatgacgcggcggtgctcgcactgcagccacaacgggcacaactcgcggacgtgccccaaccgcggggtcaagatcttcggggtgcacctcaccgatggctcggccatccgcaagagcgcgagcatggggaacctctccctcctctccgcgggatccaccagcggcggcgcgtcccccgccgacgggcccgacctcgccgacggcggcgggggctacgcctccgacgacttcgtccaggggtcgtcctccgccagccgcgatcgaaagaaaggtgttccttggactgaagaagaacaccggaggtttttgctgggattacaaaagctcgggaaaggggattggcgaggaatttctcgtaattttgtggtctcaagaacacctactcaagtagcaagtcatgctcaaaagtattttatacgccaatcaaatatgagcagaaggaagagaaggtctagccttttcgacatggttcctgatgagtccatggaccttccgccccttcctggaagtcaagaaccagagacctcaatgttaaatcaaccgccactgcctcctgctgtgngaggagaggtgggatcgatggagtcagatacttctgctgtcgcagagaagtctggagcttctgctctcat

SEQ ID NO: 2947 - DNA, 1877 bp, Zea mays
  Clone ID: TF_ZmC152_2
catggcatacctcgagaccggccgggggaagcgccggaacgaacgaacgcgcggcgccaccacccacatcactgccctgccgtcgtagcccagccccacccacccagcgccgcccgcccacgccaccacgcggaccgcagccgcgccgcagctgctcacacacacagggcaacagacgcctcctccatccccacgcgagcggacgacacgacgcggccatcgccgcacgttgagatcccctccgctcctcctctcgatggtctccgccagcgcgccgccgccgccgccgcaggcccagtccgacgcggccgggtcgggggaggaagccagcaagaaggtgcggaagccgtacaccatcaccaagtcgcgggagagctggacggagcaggagcacgacaagttcctcgaggccctgcagctctttgaccgtgactggaagaagatagaggcttttgttggctccaagaccgtcatccagattaggagtcacgcacaaaagtactttttgaaggttcagaaaaatggaaccagtgaacatgtcccacctccacgaccaaagcgaaaagctgcccatccatatcctcagaaagcttccaagaatgaaccaaactatggtctcaagacagattcatcttccatacataggaactctggcatgaatgtgtctgtttcttcatggcctcataggtctatcccgcaagctgttgcttcatcgatggtgaaagatttaggtgctggaacaccaggtccaaacaatttttgctcaagcagtactgaaggccctccaagaacttggcaacctggtgaaacaaatggtccaataaatcaaattccgtcactccgccttatgccggattttgcgggagtgtacagcttcttaggtagtgttttcgatccaagcacaagtgatcatctgcagaaactgaaggagatgaatccaattgatgttgagacggcgctgttgttgatgaggaatctctccatcaatttgaccagtcctgattttgaagatcaaaggaaattgttgtctttatatagcgcttctgatggacctgagctagggagctccaggagttcagctctagcaactagtgcacctttcatgtaaggattaagggtggatagtgtggccaggtctgtccgcatataatttcagttggacagacctcaggatggtgccctggcgtagcaccgatgagtgacgaaggaggcgcctggaccttttcgcttctcgctagcttcaggactgctgattgtgtaagggtgcggccatgaaaggtgagattggtctgcggtcatgaaaggtgagattggtctgcggcctgatgtgtatataaaatttttgccacgaaggaggcgcctgcacctatcccaaaagctcggccatctagggcattggatgctgcttcagttcagataatcaaggctgtccttggaaatgggacgagaggaaagatcccttccccattcgttgagttcagttctctgattggtttcttgctgccctcttgatacggggacctgtgcgccatgtggccgtctcgctgtttatgtgggcaagtttcacttgaggagttgagagggcttgaggcgatcgtggttttgtagagcaacgagtgcaccttccgaatattccttgttcctgtgtgaatcgtctatattgcatcaggcgtcgttgccattgtgtaaaagggaaataaaatcacaatgtaaaggatacactaccatttgaattgtattcagtatcgaagccctgtagtgcatcaggtgttgttgcccacgtgtaaaaggaaaataaattcacaatgtaaaggagacttgtgcgttagcactaccatttgaatttatgaaatgtcaaagcaaaaaaaaaaaaaaaa

SEQ ID NO: 2948 - DNA, 1932 bp, Zea mays
  Clone ID: TF_ZmC34_1
ctcgagccggcgggtgttctttttctagcattttgatggggaagtaggtcagaagtgatttagagtgattctggtggggattaaatgaagtggtggagaggaattttctgtagccatattggctgtccaggagtgattctcacaagaatctggagctgggagcaattactagtgctttgcatataatttgaactgagctgtgctctgtttgttttacattggtacctcgaagtccgcggggggcacttcttcatctcttctcctgtcggcatctcttctccttcctggcttcctcccaccacctccagtcctccaccggaccaccacctccaccactccctctctcacgacacgcgcaaaccgctcgaaccctagctggcggcgggaggcggaggtggctccgggatgacgcggcggtgctcgcactgcagccacaacgggcacaactcgcggacgtgccccaaccgcggggtcaagatcttcggggtgcacctcaccgatggctcggccatccgcaagagcgcgagcatggggaacctctccctcctctccgcgggatccaccagcggcggcgcgtcccccgccgacgggcccgacctcgccgacggcggcgggggctacgcctccgacgacttcgtccaggggtcgtcctccgccagccgcgatcgaaagaaaggtgttccttggactgaagaagaacaccggaggtttttgctgggattacaaaagcttgggaaaggggattggcgaggaatttctcgtaattttgtggtctcaagaacacctactcaagtagcaagtcatgctcaaaagtattttatacgccaatcaaatatgagcagaaggaagagaaggtctagccttttcgacatggttcctgatgagtccatggaccttccgccccttcctggaagtcaagaaccagagacctcaatgttaaatcaaccgccactgcctcctcctgtggaggaggaggtggaatcgatggagtcagatacttctgctgtcgcagagagttctggagcttctgctctcatgcccgagagtttacagcctacctatccgatgattgttccagcttatttctcgccgttcttgcaattctcagttcctttctggccaaatcaggaagatggaggcgatcttccccaagaaacacacgagattgtcaagcctgttgcagttcattcccagaatccaattaatgttgatgaactcgtgggcatgtcaaagctaagcatatgggagcatggtcaggagacagtgtctacttctctgtcgctaaatctgctagggggtcaaaataggcagtcggctttccatgcaaaccctcaaacaagagctcaagcctgatcatcccctaccagcacagaaactgtattttagatggaatcctgggcaaaataagctttgctctttttttcttcttctaaatttaagatcaccgagtcacaaggtcactggttggaagtagcttctccgtatttgcggggaaagcctgccctggtttctctccatcatcagagccttcaatattgtcttttttatatatttaagattgaccgtgctctgtagcttgtatcatgtgctgtaagttatgctatgtatgaatgtacctgtagtttgtatggcacgcatggtatgacactcttatgttagcaaagtcattaatgttagtgctgatctttatggttgtaatgttataaacttctaaaaaaaacgtataagccagttgttttcaacaaaaaaaaaaaaaaaaaaaaaaaaaaaaaaaaaaaaaaaaaaaaaaatcattaaaattagtgctgaaatttatagttgtaattttataaacttctaaaaaaaaagtataagccagttcttttcaaaagcactcaaaaaaaaaaaaaaaacacaataccaaacccttccgaataataaattgccccgcct

SEQ ID NO: 2949 - DNA, 1389 bp, Zea mays
  Clone ID: TF_ZmC34_2
cattgggtacctcgaggccggccgggattctcacctcctctcctccacggcttcctcgcaccggctccggtcctcctcccatcaccatcaccaccgtcgttcctctcacgagtcccgacacacgcaaaccgcacgaaccctggctggcggcgggatgacgcggcggtgctcgcactgcagccacaacgggcacaactcgcggacgtgccccaaccgcggggtcaagatcttcggggtgcgcctcaccgatggctcggccatccgcaagagcgcaagcatggggaacctctccctcctctccgcggggtcaaccagcggcggcgcgtcgcccgccgacgggcccgacctcgccgacggcggcgggggctacgcctccgacgacttcgtccaggggtcgtcctccgccagccgcgagcgtaagaaaggtgttccttggactgaagaagaacaccggaggtttttgctgggattacaaaagcttgggaaaggtgattggcgagggatttctcgtaatttcgtggtctcaagaacacctactcaagtagcaagtcatgctcaaaaatattttatacgtcaatcaaatatgagcagaaggaagagaaggtctagcctttttgacatggtgcctgatgagtccatggaccttccaccccttcctggaagtcaagagccagagacctcagtgttaaatcaaccaccactgcctccccctgtggaggaggaggaggaggtggaatcgatggagtcagatacttctgctgttgcggagagttctgcagcttcagctcttatgcccgagagtttacagcctacctatccgatgattgttccagcttatttctcaccgttcttgcaattctcagttcctttctggccaaatcaggaagatggaggtgatctgcctcaagaaacgcacgagattgtcaagcctgttgcagttcattccaagaatccaattaatgttgatgaacttgtgagcatgtcaaagctaagcataggggagcctggtcaggaaacggtgtctacttctctgtcgttaaatctgctggtgggtcaaaataggcagtcggccttccatgcaaatcctcaaacgagggctcaagcttgatcccgcttccgcacagaaactgcattaagaaggattccctctctttttttttctatatgtaagattgaccgtgctctgtagcttgtatcatgttgtaagttatgctatgtatgaatgtacctgttgtttgtctggcacgcatgacatgccactcatgataacaaactcataatgttagtgctgatctttatggttgtaatgttgtaaacttttctgagagaaaaaaacgtactagccagttgttttcacatgctgtgttgctttttgggttaaggaggaaa

SEQ ID NO: 2950 - DNA, 872 bp, Zea mays
  unsure (1)..(872): unsure at all n locations
  Clone ID: TF_ZmC34_3
cattgggtacctcgaggccggcggggctcttctcctccaaaggcttcctcccaccacctccagtcctctccaccggaccaccacctccaccactccctctctcacgacacgcgcaaaccgctcgaaccctagctggcggcgggaggcggaggtggctccgggatgacgcggcggtgctcgcactgcagccacaacgggcacaactcgcggacgtgccccaaccgcggggtcaagatcttcggggtgcacctcaccgatggctcggccatccgcgagagcgcgagcatggggaacctctccctcctctccgcgggatccaccagcggcggcgcttcccccgccgacgggcccgacctcgccgacggcggcgggggctacgcctccgacgacttcgtccaggggtcgtcctccgccagccgcgatcgcaagaaaggtgttccttggactgaagaagaacaccggaggtttttgctgggattacaaaagctcgggaaaggggattggcgaggaatttctcgtaattttgtggtctcaagaacacctactcaagtagcaagtcatgctcaaaagtattttatacgccaatcaaatatgagcagaaggaagagaaggtctagcctgaaaccaagcaacccaatccaaaccagacaagcaaggaatcccccgatggctcatcgcgttctcctcctcctctctctcgcgtcggncgccgcggttgccgccgccgtcgacgcggaggacccgctgatccggcaggtggttcccggtggagatgacaacgatctggagctgaacgcggagtccactttctgagcttcgtgcagcggttcggcaagtctacaagacgcgacgagcacgcgtaccggctgtcg

SEQ ID NO: 2951 - DNA, 1471 bp, Zea mays
  Clone ID: TF_ZmC34_4
ttcgcttctcctcccagcccacctctcctctccccttccggcgcgcgcggccgcctggttcctacaccggcgggtgcgctggcggccccggggatgacgaggcggtgctcgcactgcagccacaacggccacaactcgcggacgtgccccaaccgcggggtcaagatcttcggggtgcgcctcaccgatggatccatccgcaagagcgccagcatggggaacctctccctgctcgggggatccaccagcggcggcggcggcgcatcccccgctgacgtcggccacgacgccgccgcagagggctacgcctccgacgacttcgtgcagggatcatcatccgccaaccgcgagcgcgagaaaggggttccttggactgaagaagaacatcggaggtttttgcttggattgcagaagcttggaaagggtgattggcgagggatctctcgtaattttgtggtctcaagaacacctactcaagtagcaagccatgctcagaaatattttatacgccaagccaatatgagcagaaggaagagaaggtctagcctctttgacttggtgcctgatgagtcggacctgccaccccttcctggtaatcaagaacctgaggcccagatattgaatcacccaccattacctccacccatggagggaggaggaggtagaatctatggagtcagatacttctgtcattgcagagagttcttcagcttctgctatcatgcccgagagtttgcagcctagctatccgatgatagttccagcttatttctcgccgttcttgcaattctcagttcctttctggccaaatcaggaagatggaggcgatcttccccaagaaacacacgagattgtcaagcctgttgcagttcattcccagaatccaattaatgttgatgaactcgtgggcatgtcaaagctaagcatatgggagcatggtcaggagacagtgtctacttctctgtcgctaaatctgctagggggtcaaaataggcagtcggctttccatgcaaaccctcaaacaagagctcaagcctgatcatcccctaccagcacagaaactgcattttagatggaatcctgggcaaaataagctttgctcttttttcttcttctaaatttaagatcactgagtcataaggtcactggttcgaagtagcttctccgtatttgcggggaaagcctgccctggtttctctccttcatcagaccccactcatatgggagccttcaatattgtcttttttatatatttaagattgaccgtgctcggtagcttgtatcatgtgctgtaagttatgctatgtatgaatgtacctgtagtttgtatggcacgcatggtatgccactcttatgttagcaaagtcattaatgttagtgctgatctttatggttgtaattttataaacttctaaaaaaaaagtataagccagttcttttcaactgcaaaaaaaaaaaaaaaaaagcggcc

SEQ ID NO: 2952 - DNA, 579 bp, Zea mays
  Clone ID: TF_LIB3592-047-Q1-N6-E1
ccacgctaacaagacaaaaatgcaaacgagggttccaattagatggctctcggccttaacagcacacaggctgaactaactgacgtctcctaggcttgaccagcatacggcacgatctgtctttactcttgcgcccgagtcttcatatcttgctgatggaagagaagagcaatcatcttgatggtctctgcatcttgaagaacctgcttctccagctccgacttatgtagctctgttgccaagcgtggcgtgaagcttgacgatcacgtcctcctcctcctccgtgatgttccccctcttgagacccgccctcaggtagttgatccaccgcagcctgcagctcttcccgcaccgcagcaacccagcattcttgggcagtgatctccatgagccttccccgtgctcctcgatgtacctcgccaggatctcgtcctcctccctggtccacctccccttcttcaaccccaccttcccgcagcacggcgccctccccatctgtttgcgaggtgcaactgcaagaaatgcggcagcttgcgtgtgcctgcctcgcctgcgctgtggagtggaggggaaaagtga

SEQ ID NO: 2953 - DNA, 786 bp, Zea mays
  unsure (1)..(786): unsure at all n locations
  Clone ID: TF_LIB4969-013-A1-XP1-F1
gccggccgggtcgggatcaaccaaccccgcacaccgccgcgggaagcagaagagactggaagagcctacaaaagcttagaggagtgccccccacaaacctttccttgcattccactgaaatcttcctatctgcaaccatgcagttgctcaattctggcctcagctgaagcccaaccatccattgttatataagtcgctgcagcctttgcaatttcccactccttcagccaccatcggtcattgaaggagcttcgtgccaccagagaaggtgttcgccgtgcataatcacaggctatatacattccacaggcctgtaaagctctgtgaatttggagctcccacaggttctgcattggcgttgagatggggaggcattcttgctgctacaagcaaaagttgagaaaggggctctggtcccccgaggaggatgagaaactcatgaaccacataacaaagcatggccatggctgctggagttctattcccaaactcgctgggctccaaaggtgcggaaagagttgtaggctgaggtggataaactatctgaggccagacctcaagagaggggcattctcccaagacgaagaagacctcatcattgagctgcacgctgtccttggaaacaggtggtctcaattgcagctcagctgccagggaggactgantatgagatcaagaatctatggaactcgtgcatcaagaaagagctcaggcagaaaggcattgatcccaacacccacnagccccttactgangctgatcgcagcggagcagctccaccatcag

SEQ ID NO: 2954 - DNA, 845 bp, Zea mays
  Clone ID: TF_LIB4742-042-R1-K1-A11
ccggccgggacctcctgcaccccgacatccatcgatcgatcgatcgagctctagcaacaagaagaagaaggagaaggaggagatggggaggtccccgtgctgctgccacgacgccggcgtcaagaaaggcccgtggacggaggaggaggaccgcgccctggtggaccacatccagaggcacggcggccacgtcagcagctggcgcaacctgcccaaggccgccgggctcaaccgctgcggcaagagctgtcgcctccgctggaccaactacctccgccccgacatcaagcgcggcaacttcaccgacgacgaggagcgcctcatcatcggcctccatgcccagctcggcaacaggtggtcgacgatcgcgacgcacctggacgggcggacggacaacgagatcaagaactactggaacacgcacatccgcaagaagctgctgcgcatgggcgtcgaccccgtcacgcaccagcgcctgccccccgacgacctgctgctcgccgtctccgcctcccccacgacgacgatcctctcggcggcggcgagccagctgcggggcctcaacaccgctctcatgcaggtgcaagcgctgcagtttctgctgcaggccgtcagtggagttggaaacgacgttaacgccgccgccgctgctgctaatggtggtggtggtctcgtccctagcctcagcgcagccgcagataataacgccgttctgaacgcgagccgtagcgtcgttccaggcttccaggacctgcagctgacgacgatgaccagggcctcttctcgtgtctcacgcgaatcacgggtcagctgatcatcatcccagctacatcgcaactgatgat

SEQ ID NO: 2955 - DNA, 833 bp, Zea mays
  Clone ID: TF_ZmC10786_1
ccgacaccacagtaacccccaatcctcttgccaagctagctagtgctccttccttcctccttcgtcctgctcggagctctccgctcccgcgtcctctgccgcgacattatttctcctctggctggcaacaagcagatactaatggggtgcaaggcgtgccagaagcccaaggtgcagtaccgcaagggcctgtggtcgccggaggaggacgagaagctccgcgactacatcctccgctacggccacggctgctggagcgctctgcccctcaaggctgggctgcagcgcaacggcaagagctgcaggctgcgatggatcaactacctgaggccggggctgaagcacggcgtgttctcccgggaggaagaggagaccgtcatgagccttcacgccaagctgggcaacaagtggtctcagatcgcacggcatctgccgggccggacggacaacgaggtgaagaactactggaactcgtacctcaagaagcgcgtcgagggcggcgcgcagggcaagcacggcgcggcggacccggcgacacccggccgttccgacgtccacgggagcccggacgaccccagcgagaacaacggccaggggtccgtcgtcagccggccggcgaactctgactcgtccgagccggcggtggagtcgtcgtcggccgacgactccagctgcctcaccgtcaccgagcctgcgggcgcgcgcgcaagcgcaaccgccgcggtgcgaccgcacgcgccggtgctcccgaaggtcatgttcgcggactggctggacatggactacgggaccagcctggtggcgctgggtccggacgccggtgtcttcgacgt

SEQ ID NO: 2956 - DNA, 927 bp, Zea mays
  unsure (1)..(927): unsure at all n locations
  Clone ID: TF_21215256
ccacgcgtccggtgccctataaaatccagccccgcttggcttcacccacccttgggctcgcagtcgcagcaacgatggggaggtcgccgtgctgcgagaaggcgcacacgaacaagggcgcgtggaccaaggaggaggacgaccgtctggtggcgtacatcaaggcgcacggcgaggggtgctggcgctcccttcccaaggccgccggacttgtgcgctgcggcaagagctgccgcctccggtggatcaactacctgcgccccgacctcaagcgcggcaacttcacggaggaggaggacgagctcatcatcaagctccacagcctcctcggcaacaagtggtccctgatcgccggaaggctgccgggcaggacggacaacgagatcaagaactactggaacacgcacatccggcggaagctgctgagcannnnnatcgacccggtgacacaccgccccatcaacgagcacacgtccaacataaccatatcgttcgaggactggggccaggggaaggcgctcaagtgccccgacctgaacctggacctctgcatcagcccgccgtgccaggaggaggaggaggccatgctgctgaggccggtgaagcgggaggaggccgggctctgcttcagctgcagcctggggctccccnnnnnnnnnnnnnnnnnnnnnnnnnnnnnnnnnnnnnnnnnnaccgccatgctcgacttcagaagactcgagatgaaatgagagcttccatccatctctgtctgtctctctctgtaacttcacccctgataacacgcagtagtagtagtcaccaactgatttgtcgcaacnnnnnnnnnnnnnnnnnnnnnnnnnnnnnnnnnnnnnnnnnnnnnnnnnntgtaaattagcatcaccatgggcaattaataatacttgttgctgctgcaaattgccc

SEQ ID NO: 2957 - DNA, 1221 bp, Zea mays
  Clone ID: TF_ZmC1193_3
gtgcggacgctcgaggccggccgggttgcgaggcctaacccttttccaccaactctacaagagctcccgcgatccagtcaagtgccctataaaatccagccccgcttggcttcacccacccttgggctcgcaatcgcagcaacgatggggagatcgccgtgctgcgagaaggcgcacacgaacaagggcgcgtggaccaaggaggaggacgaccgtctggtggcgtacatcaaggcgcacggcgaggggtgctggcgctcccttcccaaggccgccggacttgtgcgctgcggcaagagctgccgcctccggtggatcaactacctgcggcccgacctcaagcgcggcaacttcacggaggaggaggacgagctcatcatcaagctccacagcctactcggcaacaaatggtccctgatcgctggaaggctgccgggcaggaccgacaacgagatcaagaactactggaacacgcacatccggcggaagctgctgagcagggggatcgacccggtgacacaccgccccatcaacgagcacacgtccaacataaccatatcgttcgaggactggggccaggggaaggcgctcaagtgccccgacctgaacctggacctctgcatcagcccgccgtgccaggaggaggaggaggccatgctgctgaggccggtgaagcgggaggaggccgggctctgcttcagctgcagcctggggctccccaagagcgcggactgcaagtgcagcaacttcctcgggctcaggaccgccatgctcgacttcagaagactcgagatgaaatgagagcttccatccatctctgtctgtctctctctgtaacttcacccctgataacacgcagtagtagtagtcaccaactgatttgtcgctccattaattctgtctctctctctctctctctcgctatgtaaattagcatcaccaactgattgattgatcatgggcaattaataatacttgttgctgctgcaaattgatgatgactttatgacacatggttggttagttttttcgtaggtaacaaatacgcgatggtgagcgagtgaaagagagattttgtgccctgggtcatcctccctgctctctcttgatgctccatattgcctcctatgtcccccctctctctctctgtatctctgtaattaccatcgccaaatgatcatggggggcaatataatataatacatgctgctaatgctagaa

SEQ ID NO: 2958 - DNA, 1329 bp, Zea mays
  Clone ID: TF_ZmC3305_2
atccagtctcccttcttgccccacgcagccgagcgtgcctacccctcctcgacccttctctggggccgccgttggacgctcatggagaggagtcgtccgggcgccgcgccgaaaccatcgccagaggaggaggtggcggcggagggccatgcgcatggtgacgatgtgacggggcaggaggaggaggaggaggcgacgccagtggtgctcaagaagggcccgtggacggcctcggaggatgccatgctcatggaccacgtccggcaccacggcgaggggaactggaacgcagtacagaggatgaccggcctgctgcgctgcggcaagagctgccgcctgcgctggaccaaccacctccgccccaacctcaagaagggctccttctcccccgacgaggagctcctcatcgcccagctccacgcgcagctcggcaacaagtgggcgcgcatggccgcgcactggttggcttggtgcgcgcccgcagctgcccgggaggacggacaacgagatcaagaactactggaacacgaggaccaagcgccgccagcgcgccggcctgcccgtgtacccgccggaggtgcagctccaccttgccctctccaagcgctgccactacgacgactacgacttcccgccgctcgcgtcgtccccgcagctgtcggcgacgacgacgaccgatgtccaggcgctgggcgccgggcccgggtacgccagctcgcgcccggcgccgctcgacctggctcgcagccagctcgccgcgacgacgacccagcagacggcgcagttcctctcgccgccgcccttctcggcgccgtcgtccccgtgggccaagccgttcgcgcggaacgcgcagtacttccagctcgcgcactcgtcgcccgtgtccccgtcgacgccgaccgggccggtgcacccggccatgccggacctgtctctcggcggccacggcgcgcgcgccgccgccgctgccgaccagagcaggctcccaccgctctcgccgtcccccggccccagagtggagctcccttcaaaccaatacggccagccggcgccgccgacctcggccgccgccgtcgccgccggacttgcgctgccggatcatcagaacgcggcgagcctcgaacagatgctgcaggagctgcacgacgtcatcaaggtcgaaccgcaggcgctggtcccggccagcggcggcggcgctgcactggagcggcatgattgcggagtttcagtcccagagagcagaatcagcggcctgcagcgtcggggtgacgacatggacacgctgttcggcctggtgcacccagcgctcggcgcgccggagacggcgcc

SEQ ID NO: 2959 - DNA, 722 bp, Zea mays
  Clone ID: TF_ZmC3305_1
gcctcaaaagggcagacagccaaatgccccaccacagcgtagcccctcctcactgactcgcctgcaaaaaccacttgcaaaccacacaaaccgaaaacgccagctcccctgcctccatttttagcaacttttcccttctgtcttcccatcacagtcacccttcttgcccccacgcagccgagcgtgcctacccctcctcgacccttctctggggccgccgttggacgctcatggagaggagtcgtccgggcgccgcgccgaaaccatcgccagaggaggaggtggcggcggagggccatgcgcatggtgacgatgtgacggggcaggaggaggaggaggaggcgacgccagtggtgctcaagaagggcccgtggacggcctcggaggatgccatgctcatggaccacgtccggcaccacggcgaggggaactggaacgcagtacagaggatgaccggcctgctgcgctgcggcaagagctgccgcctgcgctggaccaaccacctccgccccaacctcaagaagggctccttctcccccgacgaggagctcctcatcgcccagctccacgcgcagctcggcaacaagtgggcgcgcatggccgcgcacgtaagcaccctatcctttgccctggataacaaatttatttatggcgagtggcggcgacctgctgatgtgactgacgtttgcgagttcgttcctcgagcgaattccgagcttact

SEQ ID NO: 2960 - DNA, 730 bp, Zea mays
  Clone ID: TF_ZmC659_5
attactccgcggcatcaggcaggctagccgtgctccctcccatctcttctcttctcttgtcttctcttctctcccccaaggaggtcaaagacacagcgcatctgcatccggcctcctccgcgcgcgcgaattcgggagggagaggggcggtaatggggagggctccgtgctgcgagaagatgggcctcaagaggggcccctggacgccggaggaggacaagatcctggccgcccacatccacagccacggccacggcaactggcgcgcgctgcccaagcaagccggcctgctgcggtgcggcaagagctgccggctccggtggatcaactacctgcggccggacatcaagcgcggcaacttcaccgacgaggaggagcagtcaatcatccagctgcaccagctgctcggcaacagatggtccgcgattgccgcccggctgccggggaggacggacaacgagatcaagaacgtgtggcacacccacctcaagaagcggctcgaccccggcgcgcaggagcagctcgaggaggccagcgccgccaagaagcgcaagaagccggcggcggcggcgcggaagcgcgagggcaagatcaagatgaggaagctcgacgcgctgaccgccaaggcggcgcccgtgctgtcctcgccccgacgctccgtctcgtccacgctcaccgagtcacgtcaccggcctcgggcgggggaggagcagcacggcaactcgggcag

SEQ ID NO: 2961 - DNA, 1241 bp, Zea mays
  Clone ID: TF_ZmC17037_1
ggctcgcactcgcgccggtcgttcgctgcagcacacaacgcaatcgccactgtcgtcgctcgtcagtccaccgactccaccgccaccggcagaaccagaacacatcgagcggcatcggagcgcgaatctgtgcggcggcgtcgcctctgccgggcgggtgggcggcatggggaggtccccgtgctgcgagcaggcgcacaccaacaagggcgcgtggaccaaggaggaggaccagcgcctcatcgcctacatcaaggcccacggcgagggctgctggaggtcgctaccaaaagccgcagggctgctgcggtgcgggaagagctgccggctgcggtggatcaactacctgcgcccggacctcaagcgcggcaacttcagcgaggaggaggacgagctgatcatcaagttccacgagctgttcggcaacaagtggtcgctcatcgccgggaggctgccgggcaggacggacaacgagataaaaaactactggaacacgcacatcaagcggaagctgctcgcccgcggcatggacccgcagacccaccgcccgctggccgcagcgccagcaggagggccgcagcagcagcattgccattaccagatggagccacagaagcgggcggcggcggcggaccattccgaggccgccgttgccaccaactcgccggaaggccagcagccgcagcagcgacgacgacgaggcgccggcgctggcgccaccgccgcggcggcggcagcgccacctcgacatcgacctgaacctgtccatcagcctcgcggcctaccagccgccggagggaaccggcagcgccatcgagccactgacggcgacgacgaagcgggaggagggaacggcggcggcggtgtgcctctgcctcaacagcctcgggtaccgggcaggcgtcgagtgcgcctgtggcagcggcggctcgccgtcgtcccgttcgcagtgggctcgggattttttacaggcggcgccctgctacagaggctagcattgatcagtgagacagtgacatgatcgggagggcttttactgaggggaggggcagagcagatatagttaactagtagtactattagtaaaaaggcaagcgtgcttagtaggctttagcagctcatgcattgcatgcatcatgggttatttacgaggagatgtgctctttgtcttttgtcgattctggctctggcctcggacacagactgatcgatcatgccttggcgaaaaaccccccacaccc

SEQ ID NO: 2962 - DNA, 1059 bp, Zea mays
  Clone ID: TF_ZmC30034_1
ggccgggacatccaaacactgtaacaacttgtgtagtacttaatccctcgcacctcatgaatcccaacttcaacagtgtgtggagcgctcccgagatcaatatgatgaactcactcatcactagtcacatcgccaacaacacctacacaaacaacaaccagcatgttgtggcaagtcgtagtgccattgtgaaccacaataactttgggatgccaacggaggtcgttccacccgtggacaacatggacatgatgcaaggctatctaatggatgatacggatgccatgaggcttgttcagggacaacaacatatgccaaatgttgttcctaatcaaaggaggcatgcagtgaagttttggactacagatgagcacaggaatttccttcgtggtctagaagtgtttggccgtggtaaatggaagaacatctccaagtacttcgtccccacaaggacaccagtgcagatctctagccatgcacagaagtatttccgcaggcaggagtgcaccacagagaaacaacgctttagcatcaacgatgttggcctctacgacacacagccatgggtgcggcagaacaactcttctagcagctgggaggcgctcaccttcactgctggccgtgcgtacaatagtacaaactactgtgcctttaacagcctcccgtatgccagcagccaggcaagtaacaaccaggtagctacatggattacagatcagcaggcaactgcaagttcttctatagctcctccagcgacggaggagagccagatatataaccgataatatatataatggtcatcagcagctgggagaggctttcttcatatataatcaataggtagatagatatggacaacgtccattgactagtttaatttctatctatatgttttgtatccaatgatgcatgtaaaacctagttggttgttaaaggtcattagtaccatactatatatgggctagaaacagtttcattgaaatttgcccctgagcaatacaatgaaattttaccaatgtgttatttatatattaatgtgtctaaaaaaaaaaaaaaaaa

SEQ ID NO: 2963 - DNA, 1568 bp, Zea mays
  Clone ID: TF_ZmC337_1
aggacctaccgtcgtttgagtcaccataaaaaagcaatgtttagtattcaaattcaacgcgcgctggcgcgcgccattgactagtatttatatagtgggctctccgtaagtttctttgagccgggtagctacacagtacgcacacctatcccggctgcagcgcggttccagccactggtgccacgtggtttgtgctcttgtgggcacactggcctccacccatctctctcacgtctccccatccgcagcaaaggcacacagtacagattcggcccatcgttttatagccacaccatggctaggaagtgctcacactgtggcaactgcggccacaactccaggacctgcgggagagaaaccatgctctgcgaagctggcgacgccaggaacggcggcggcggcctaaggctcttcggagtgcaggtccgtatcggcggcggcgtcggcgcaggctcggcgtccatgaagaagagctacagcatggactgcctgcagctcgcggctcctatcggttgttccgcctcgtcatgccagtcgccgtcgacgtccctcctcgtcgtcgtcgctgctgctgatgtcgattgaggagggatcggagaggggggcgccaaatgggtacctttctgacggacctcatggcagagctgtgcaggagaggaaaaaaggagttccatggagcgaggaggagcacaggcagttcctttccggcctggagaagctgggcaagggcgactggcgaggcatctccaggagctacgtgccgacgaggaccccgacgcaggtcgccagccatgcacagaagttcttcctcaggcagagcagcttggggaagaagaagcgccgctccagcctctttgacatggtgccgatttgcgagaacagtgcgagcatctccgatccgctgagcagcgaaggggcctcaacctctctgtcgctgaacgtgccacgccacggcgtcacctccgtctccgagagggcggccttggacctgaattcgacggaggaagacgacagcggggcggacgcgtcgtcggcatcggcatcaggtgcagggaccagaccaccgttcccggcagcgcagacggagccgctgcagccttcgtcgcttggccgtggacgcggtcaccactgctctccgttggacctggagctgggcatgtcgctgcctgccccatccatcggaacatgacgcgccgccgccgccgtacttatcgccatggaatcccacgcaggtcgcgccagaattcgtcagcgcaggttgccaaggccgaggccgtgcgtgcctgctgtctcgcacaaacgtcccacgtgtaatcagaatcgggtctgctcctgtatgagtatgactatgccatgttccccgcgcaggattgaaaccgtaaggttacgctagttgctagctttttttttgaacccttgtgaatgatattgttacgaaaaatagctcctaacataggttcactgtgatatatgttatgtacactgtgatatatgttacgtagaccatatgttcgttttgatattaaatttattttttatggttattaaatatgactatgtgtcatctc

SEQ ID NO: 2964 - DNA, 1067 bp, Zea mays
  Clone ID: TF_ZmC337_5
ggtaccctcgtatgctcggccgggtaggagaagccgatgaaggagctagaataatcggttggttggtaacgtagcagctggtgtgtttctaagcataagcaatactgcaggagttccatggagcgaggaggagcacaggcagttcctttccggcctggagaagctgggcaagggcgactggcgaggcatctccaggagctacgtgccgacgaggaccccgacgcaggtcgccagccatgcacagaagttcttcctcaggcagagcagcttggggaagaagaagcgccgctccagcctctttgacatggtgccgatttgcgagaacagtgcgagcatctccgatccgctgagcagcgaaggggcctcaacctctctgtcgctgaacgtgccacgccacggcgtcacctccgtctccgagagggcggccttggacctgaattcgacggaggaagacgacagcggggcggacgcgtcgtcggcatcggcatcaggtgcagggaccagaccaccgttcccggcagcgcagacggagccgctgcagccttcgtcgcttggccgtgggcgcggtcaccactgctctccgttggacctggagctgggcatgtccctgcctgccccatccatcggaacatgacgcgccggcgccgccgtacttatcaagatggaatcccacgcaggtcgcgccagaatcgtcagcgcaaggccgtggccgtgcgtgactactgtctccctcagctgtgtcagccagatggagatgatgcgctagccaatacagtactgttcgtgatcgtgaaaacggtgtgcaaacactagcacagcggcactaaactaggatgtcgctcctcgcaccattgggtactgtaaccgcgttgatccacgtcatctctatctcttcagcaccgttggatcataggctgtcagtttcatctatccgtccatgtgtcatactcattcgcaatacggtgacttagcgagtgtttgggatgggatggctccagattccagcttcagtgtggagctgtagtttataatcccaatttaaatagttttcaacctactttcaatcg

SEQ ID NO: 2965 - DNA, 1241 bp, Zea mays
  Clone ID: TF_ZmC42_49
ttgggtccctcgaggccggccggggcggaatttgcgtacggttccgttcacctcaccggcccacactacccgaatctttataaattcgcggagaaaaccagcggcacacggcgccgccgacccatcatccgtccacagccgcaacgaacgagagacagccagccagcaacgccgcgcacgcaaacgcaacgcagcgaccgtgtcgatcgaccagcggagcggaggtttgtttgagtcgacgggcatggacttccaccacagcagcagcagcagcgtccacgcgcacgcggcagcggcgcggccgtggatcaaggcggaggacttcaaccccagcagcagcgtccacgcggcggggccaccggcggtaccggctgcggcgcggccgtggaacagggcggaggacaaggtgttcgagagcgcgctggttgcgtggcccgagcacacgcccgaccgctgggcgctcgtcgcggcgcagctccccgggcgcacgccgcgggacgcctgggagcactacgaggcgctcgtcgccgacgtcgacctcatcgagcgcggcgcggtcgacgcgcccagctgctgggacgacgacgacggcgaccaccaagtccgcggcgccggcgctgaccgggcgcgccgcgaggcccggcgccccgggataccctggagcgaggaggagcacaggctgtttcttcaaggtctggagaagtacgggcgcggggactggcgtaacatctcgcgcttctcggtgcggacgcggacgccgacgcaggtggccagccacgcgcagaagtacttcaaccggcagttcaaccccgccagccggaactccaagcgcaagagcatccacgacatcaccaccccttgaccctgcccgccgacggcgaaacaagcagtagccagccaagtagggagctttgctgtggacgatctgagaaacagaggcagggagttccagtcagcagctagcacatggtctaggctcactcgtactagtcattaaaatagagttaggattgttgaaacatctaatggagtctgacgtggcaccgtcgtgtcgagtctaggcggatgcagatcgtcaatggagtgagtcactgttaggatggatggtgcctttatagttttgtatgtatgccggcgtggcggtgtcgaagctgcagtggatagacttgcacagttgttgtctccgggcgttccttccaaagcaaacaggcaaatgcatactccgatccacgcaggtggcc

SEQ ID NO: 2966 - DNA, 945 bp, Zea mays
  Clone ID: TF_168591
agccagcacagcacacacactggaaagtgcaagctgtagtgagacctgcgcgactgccagcgtgtatccgcgcggcaaggagcgtagcgccggtcgtcggcccgcacggccaccaactcccttggacgcacgcgcgaccagctgctaaccgtgcgcaagtagtagtgcgacttcgccgccggccgggatcgctagctcgatcgatcggcgggaccacatacgactccggtgtggccagcggcggccgggccggggaacgcacgtgctgcgagcgagcgagggcagacgctagctgttgccgggagctagccggcgcgcgatggggaggacgccgtgctgcgagaaggtggggctcaagcgagggaggtggacggcggaagaggaccagttacttgccaactacattgcggagcacggcgaggggtcctggaggtcgctgcccaagaatgcaggcctgctccggtgcggcaagagctgccggctccggtggatcaactaccttcgggcggacgtcaagagggggaacatctccaaggaggaagaagacatcatcatcaagctccacgccaccctcggcaacaggcgccacctgatgatcgaagcggattactcaccgccctcgactgttcgatgcctgccgcgtggagctcttgcgtatctaacgctcccacgacaatcacccttccagacggctcgaattacatacgacaggatcggctccgctctactccgttctgttcgcttctgctttaggtgcgtgcctagcagatggtgaggcggcgtcgcgcggccctcccgacggctcgccggccgcgctacggggcctgctgcagcagcccctcctccacgcctgtaaaagagctttgtatttacctgtttgtttgtgcttttgtgcaatggaataaacaatgatattatactgaataaacatgaatgttctgagac

SEQ ID NO: 2967 - DNA, 1421 bp, Zea mays
  Clone ID: TF_ZmC20189_1
gattgagctcgtggccggccggggagaccccagagcgaagaagccccggccctcctgtagagctggtctccctctgaccctctctcctctgcgcttccgctgcgtcggccctgctcgtagcttggaggcggcggcattctccggcaatggggtgcaaggcgtgcgataagcccaagcccaactaccgcaagggcctgtggtcgccggaggaggaccagaagctccgcgactacattctcctccacggccacggctgctggagcgcgctccccgcgaaagccgggctccagcggaacggcaagagctgcaggctgcggtggatcaactaccttcggccggggctgaagcacggcatgttctccccggaggaggaggagacggtgatgagcctccacgccacgctcggcaacaagtggtccaggatcgcacggcacttgcctggcaggaccgacaacgaggtcaagaactactggaactcgtacctcaagaagagggtcgaggccaaggaccaggggcccagcacgcccgcgccggcggcgtccaattcggacgacgactcgcactgcgtcaagcagcgcagggacgacggcgacacggcggcgggagccaacggcccggcggactccggcgcgtcggagccgcgcgagtcgtcgtcggccgacgactcgagctgcctgacggacccgcacgcctgcaggccccacgcgcccgtgccgcccaaggtcatgttcgcggactggctggacatggacatggactacgtgggcggtgccctgccgtcgacagcaccagcagcacctggtctgctcggcgctgcgggcgtggccacggccagcacgggcgaccgcgaccgcgatcagcatcaggtgatgagcatgagccaggggtccgtgcaggtggatgggccatccggtgccgatgtgtccctgcacggcttcggtgacagcggcgccggctgttgggagttccaggagcacttcgatgccatcgatcacatgcaggcggccggcttctgcgacctgctctccatgaccgactacttcggcctcgactagactccaaccctggttggtgatccatcgttggtgaaaggatttgcgtttttttttaattacactttgttagaagtctcggtgaaaggcttgcttgtggctgtaaattactgtcgtgtacgtatagatagaggaattttaaaagcagataaaagtcaaggacctacattgtaaaaatgttgtcgtgtttcttgtggttcgctttgtagagtagagcaccgacggaaggaaaaggaacagatgtagtagttatactagcaagtacacatacgttgctacctttacatttatacttgagtgtcaaatataaatataaagacatgtgtgttttattgtctaggtagaaatgattgtgggtttagagtcaac

SEQ ID NO: 2968 - DNA, 1111 bp, Zea mays
  unsure (1)..(1111): unsure at all n locations
  Clone ID: TF_ZmC20189_3
cattgggtacctcgaggccggccctgctcgtagcttggaggcggcggcattctccggcaatggggtgcaaggcgtgcgacaagcccaagcccaactaccgcaagggcctgtggtcgccggaggaggaccagaagctccgcgactacattctcctccacggccacggctgctggagcgcgctccccgcgaaagccgggctccagcggaacggcaagagctgcaggctgcggtggatcaactaccttcggccggggctgaagcacggcatgttctccccggaggaggaggagacggtgatgagcctccacgccacgctcggcaacaagtggtccaggatcgcacggcacttgcctggcaggaccgacaacgaggtcaagaactactggaactcgtacctcaagaagagggtcgagggcaaggaccaggggcccagcacgcccgcgccggcggcgtccaattcggacgacgactcgcactgcgtcaagcagcgcagggacgacgacggcacggcggactccggcgcgtcggagccgcgcgagtcgtcgtcggccgacgactcgagctgcctgacggacccgcacgcctgcaggccccacgcgcccgtgccgcccaaggtcatgttcgcggactggctggacatggactacgtgggcggtgccctgccggcgacagcaccagcagcacctggtctgctcggcgctgcgggcgtggccacggccagcacgggcgaccgcgatcagcatcaggtgatgagcatgagccaggggtccgttcaggtggatgggccatccggtgccgatgtgtccctgcacggcttcgatgacagcggcgccggctgctgggagttccaggagcacttcgatgccatcgatcacatgcagggcggccggcttctgcgacctgctctccatgagcgactacttcggcctcgactagactccaaccctggttggtcatccatcgttggtgagaggatttgcgtttttttttatttacactttgttagaagtctcggtgaaaggcttgcttgtgttgtanattactgtcgtgtacgtatagatagaggaattttaaaaagcagataaaaatcaaggacctacattgtaaaaat

SEQ ID NO: 2969 - DNA, 332 bp, Zea mays
  Clone ID: TF_LIB3061-045-Q1-K1-A8-R2B
aacgatcggtgcttttaatttgtgagcaagcgatcgagctcaccaagaaccaccgttgctcactagttgcagccggtcggagcctagaacgacgaggcggtggatggtgatgccgccgtgctgcgacaaggtgggagagaagattggtccgtggaccctctaggaggacctgatgctcgtctgctatgaccaggagctcggacccgagaactggcgcgccgcgccgaccaacagcgggctgatgcgctgcagctagagctgcaagctgcggtggacaatctaccttcggccgggaatgaagcgcgtaaactttaccgacctggaggagaagc

SEQ ID NO: 2970 - DNA, 689 bp, Zea mays
  Clone ID: TF_ZmC42_23
cccacgcgtccggtcgacgtacagcagatggagaactgcgaggtactcttcccgggaggcagcagcggggccaacgcgttcaccaggccagagcaggagaggaagcgcgggcagccatggacggaggaggagcacaagttgtttctcttgggcctgaagaaatatggccggggggattggaggaacatatcgcgcaattttgttcagaccaggacgcctactcaggtggtcagccatgcgcagaagtacttcatgaggcacaactccggcggcaaggacaagagaagatccagcatccacgacatcaccacagttaagctgagcgacgaccaggaccagcctccgtcctcgccatcccagtcctctctgatcactgaccagttcaacgcattagctctgacatccggcgctgcgtattcgccctccaattaacctttgcggctttgccggactactgggatatgtatatgccaatctttggaacggggtttgcaagatcaacgcctgcagtgtggcccgttcaattggatggaagctagaacattctgttttttttgggtgcaattcagtctgcagcaccatgaatctatcagatttctatctacttgtatagtacagactggagagaccgggagtgttaacaagtttgttgtatcatcttgtgtggtgtaataaacctggaatttgat

SEQ ID NO: 2971 - DNA, 2477 bp, Zea mays
  Clone ID: TF_ZmC42_54
atcgccggctgacactcacaagaacctgcctccctcggtctggatcgctatctcttttctagcggctccagagggagggaaagctagcgcacagccgagagaagaaagcagagagggagggagaacaaagagagagagaaaaaaaaaaccagagaggttgagcaagaaccgaggcggatccgccttttgtccctcctgcccgagggctagcctgccgccgcccccgcgagagatcgagaggaggcgctgttcagttcaggtgaaattttgccttgttctgggtggggtctctcgggctctctgtggtgtttggtggtgtaaattggagtgggatttagaggtagttaggtctcgtctgctaggataggtgcggtggtctcgttaatttgtgggctccggaggtcaatttgttcacgatcccggtcctgttcgcggttcagttcaggagcgagtgttcctgagcccaatctaattcgtccataaagtcgatcccttaggtcgaggataataacctgtttgcagctggttccaggtttcacttgcaaaagatgcgccttgatatctcctccaatcccatgttcatcttatatgatttgatttctagcgacgacaagaatttgtgttcagagagagagagggggcgggggagagagagagaaatcctttaataattgttacagtgctctcggaatctttatcttgttctgagtgagatgcccaaaaaggcaaagggaaatctaacctttcttccagtcctgtgattccttcctacaggggggtgagaagccgtgggggaagagatgatgcgggagacgtacatggacgtgctgccgccggtggaccacatagccgcctcacggagcggcggctggttcccgggcgcggcgcgtctctggacggcggcggagaacaagcagttcgagcgggcgctggccgggctcgacctctgccgcccggactgggagaaggtggcgcgggccatcccgggccggacggtgcgcgaggtcgtcagccacttcaagagcctccaggtcgacgtccagcagatcgagagcggcctggtgcccatgccggtctacggcgccggggccggctcgttcaccctgcagtgggacggctgctacggccccgcggactcgaggcacaacggctaccgcttcggaagcggaggctgcgggaggcggcaccacggccgcaccccggagcaggaccggaagaagggcgtgccgtggacggaggaggagcacaggctgttcctcttaggcctgaagaaatacggcaagggggactggaggaacatatcgcgcaactacgtccagacgcggacgcccacgcaggtggccagccacgcgcagaagtacttcatcaggctcaactccggcggcaaggacaagaggaggtccagcatccacgacatcaccacggtgaacctgacggacgacgagcgggcgccctcgccgtcgcggtcctctctgatcaccaccaccagccagccaaacgcgccggctccggccgcagcggtgataggcgggcccttctcgtcggcggcggcggccgaggccaagcagcaccagcacggcgctgggaacctgccaccgaaccggacctccgtggtgccggctgtttacaggatggacgattcgcaggaccacggcctgcagtgtggccctctgcgtcatcaactggtcgccagccaccacagcgttctgttttaggcgcaagcgcaatcccactttgaggcgcgccatggtcatggatccatccatcaggtgttgtctagtgtgtgtgtgtacgatgcgtgtgttctttgctgtagcttcagcgcctgtatcgaagtgattagccttttggggagggggggcgtaacggaaaggggatcttcggttccacggtggtccaggtccacaatttgttgttggtgatgccgagaacgtaacaaaaaaaaggacgccaagaattctgagtggacttggcattcaatcatggaccctgcttttgctcgccacggcccgcggatgatgatcagcagaacctaattctggatccttcttggtcggctgatgtatcccttgagtgaccttggtggccatctcatcctgctgctgtctctgaagacggcgacgcgcttgtattggagggtttcagagttcagatcacattgctgtagtgtagtctagacatgtttacccatagtacgtaatcagttctttttttttttttgctaaaaaaaaaaaaaaaaaaaaaaaaaaaaaaaaaaaaaaaaaaaaaaaaaaaaaaaaaaaaaaaaaaaaaaaaaaaaaaaaaaaaaaaaaaaaaaaaaaaaaaaaaaaaaaaaaaaaaaaaaaaaaaaaaaaaaaaaaaaaaaaaaaaaaaaaggggggcccttttaaaaagaaccaaattttactacccggggattgaaaggaaaaattttttttatggggcccccaaaataaaataaatgggccggtttttaa

SEQ ID NO: 2972 - DNA, 1667 bp, Zea mays
  Clone ID: TF_ZmC24814_1
cgacgacagaccccaaaatccagtctttgaaaatgaactcttttcaatcttacaacactgactacttttatgctcatggtgctcaaacccaaaacttttgtgccgaagacctactcaacttcgacagcaccgtctttcttgatgactctgaaagtgaatccatctccactctccaaagtggatccaagaaaatcaccaaaacctctcctgctgtccaagccaagcaagccagctacaaaaagagcaagagagcaagaaacccatggactcctaaagaagatgccaaattaatggagctcatgaagaagtatggccaaagctgggctatgatctcctctcaattagaaggaagaaccggcaaacaagtcagagatcgttacctcaacaagcttagaccaaatattaaacttggtgactggagtgttcaagaagatgaacttgtcgtcaaactcttgaaggaagtaggcaacagatggagtttaatcgccaaccatctccccggcagaactgaaggacaggtcaaaaacagattctattctttcatcaaaaagagattacaacctgacggtaccctttgtcaaatctccgacagcagaactagttctgaagaatacactagcttctccaactctccccaacccgaaaccggatttgactttggctatgaatttgatgtcaatgctgctaatggatccgccatcaactttgctccccaaaccttcaactgtgctatcacgaagggcgcttatgttaccgaggaagaaatctattctgaaggaagcaccactcaaggccccacctcccaagttggaaacagccctttcagaggagaagtcgaccctactgatgtcatttcctatgacctccctgaagctttcttctataagcaaccctcccaacacagacatttcaacctcgcccctattgaacatgatagccaagttgatgctattcttaccaatgttaccaactactttgctgaaaacaacaagttctacatgccttctgaggttgattcctttttcactcaagctgaaacccaaggacaagctcctcaggatgatagacttaaccaattgagcatgagaaaggcttatctcgaattagctcttgccaaaaccctcaacgaaatgaaaagcctttaaatgagcggccagtccatttagcaccatgctaaactgaaaaaactatcttgtcttttgtctctcaattttttctttttagtctttcgaatctcagtccagcccttcaaataaattatctttttctgtcttgtttgagcaaaccaatgtcttactttatatgtctagtctagtctcgtctcgtttcatatttgtcttgtctcagttttatcttttgtctcgtctttatttgtcttgttttaacttatgtctctaatcatctttataagtctatacttgcaaaaacctaaatacgaaataaataagtaatccattcattgtcatttatgcataatttgtaatattataattatgcataagactttgaatttaaaatctttctttcttctattcataactttatattggtattacatattttttgtaaagataaattgattaaattcaattcatttgcaaaataaaaaaaaaaaaaaaaaaaaaaaggcgccgtctaaggaccaagcttacgacgcggcaggacgt

SEQ ID NO: 2973 - DNA, 1126 bp, Zea mays
  Clone ID: TF_ZmC13187_3
cattgggtacctcgaggccggccggaggcaactaagacaaagtggcgtactcttctctgtactagctttcttcttcctcctcctcttcctcctcccaaacagactggatttcatcaagataatcctgaaactggagccaacaagcagacagagaaagaagagcaagaagaccggctcccagccgatacaaggtaggagtgagcagcgttagatcagttttcatcacaggatcgatatggtgacagtgagagaggagactcgcaaggggccatggacagagcaggaggacctgcaactgggctcaaccggacaggcaagagctgccggctgcgctgggtcaactacctccaccctggcctcaagcgtgggcgcatgtctccccatgaagagcgactcatcctagagctgcacgctcggtggggaaacaggtggtccaggatagcacgccgcttgccagggcgcactgacaatgagatcaagaactactggaggacacacatgagaaagaaggcacaagagaggaagaggaacatgtctccatcgtcgtcttcgtcttcgctgacttaccagtcaggctacccagatactccatcaaccattggagttgagggacaggagcttcatggtggcagtggctgcatcacaagcatcctgaagggcacccctccggacatggatggctatcccatggaccagatatggatggaaattgaggcgccacagatgccctcggaggagagctttgttggggggaaccataatgtgtgcagcagccttgccaccccgctgccaccaccaactgtctgggaatactacccagaggcctgctggaaggttgacgatgagatcaagatggcaccacaatttcaatttggttatagtgaaggagttgggccctgcttctgatgccataaatattgggtcagattactaagttatacacctacctagcagaagtgaagtgcttttgtagaaacaagctttagcatggatctgaatatttatctccgcgcttagaattgcaggtctatggatctatgcatggttgctatgtatctatctagtgtgcaagacaagatcatcttaatttgtccttgatgctatggaatacaagggcaaaggtact

SEQ ID NO: 2974 - DNA, 1011 bp, Zea mays
  Clone ID: TF_ZmC13187_4
ctcgaggccggccgggaggcaactaagacaaagtggcgtactcttctctgtactagctttcttcttcctcctcctcttctcctcccaaacagactggatttcatcaagataatcctgaaactggagccaacaagcagacagagaaagaagagcaagaagaccggctcccagccgatacaagggctcaaccggacaggcaagagctgccggctgcgctgggtcaactacctccaccctggcctcaagcgtgggcgcatgtctccccatgaagagcgactcatcctagagctgcacgctcggtggggaaacaggtggtccaggatagcacgccgcttgccagggcgcactgacaatgagatcaagaactactggaggacacacatgagaaagaaggcacaggagaggaagaggaacatgtctccatcgtcgtcctcgtcttcgctgacttaccagtcaggctacccagatactccatcaaccattggagttgagggacaggagcttcatggtggcagtggctgcatcacaagcatcctgaagggcacccctccggacatggatggctatcccatggaccagatatggatggaaattgaggcgccacagatgccctcggaggagagctttgttggggggaaccataatgtgtgcagcagccttgccaccccgctgccaccaccaactgtctgggaatactacccagatgcctgctggaaggttgacgatgagatcaagatggcaacacaatatcaatttggttatagtgaaggagttgggccctgcttctgatgccataaatattgggtcagattactaagttatacacctacctagcagaagtgaagtgcttttgtagaaacaagctttagcatggatctgaatatttatctccgcgcttagaattgcaggtctatggatctatgcatggttgctatgtatctatctagtgtgcaagacaagattatcttaatttgtccttgatgctatggaatacaagggcaaaggtactac

SEQ ID NO: 2975 - DNA, 890 bp, Zea mays
  unsure (1)..(890): unsure at all n locations
  Clone ID: TF_ZmC13187_5
cattgggtacctcgaggccggccgggaccgcacaggctcgcagcaacttgagctcggtggcctccacatcggtgctcgtcttcgcctcgtctttgaaaattgacaagggctcaaattcggctcgagcccttctgtatcttcatgcagggctcaaccggacaggcaagagctgccggctgcgctgggtcaactacctccaccctggcctcaagcgtgggcgcatgtctccccatgaagagcgactcatcctagagctgcacgctcggtggggaaacaggtggtccaggatagcacgccgcttgccagggcgcactgacaatgagatcaagaactactggaggacacacatgagaaagaaggcacaagagaggaagaggaacatgtctccatcgtcgtcttcgtcttcgctgacttaccagtcaggctacccagatactccatcaaccattggagttgagggacaggagcttcatggtggcagtggctgcatcacaagcatcctgaagggcacccatccggacatggatggctatcccatggaccagatatggatggaaattgaggcgccagaggtgccctcggaggagagctttgttggagggaacgaaaatgtgtgcagcagccttgccacccctctgccaccacctaccgtctgggaatactacccagaggtctgctggaagcttgacgatgagatcaagatggcaccacaatttggttatatagtgaaggagctgacccctgcttctgataccatatatattgggtctgattactaagttatacccatcctagcagaagtgaagtgcttttgttgaccnagctttagcatggatctggatatttatctcccgctttagaatngnangnctatggctctatgcatgatt

SEQ ID NO: 2976 - DNA, 737 bp, Zea mays
  unsure (1)..(737): unsure at all n locations
  Clone ID: TF_LIB4729-111-A1-K1-E11
aagctgacagagagagctagcaacgctctgcaagatccgccatctaaactttgcagcactctactccaccactctcctccgtctgcgactgcgactaggtcccaaatggccgctccaccggtggccgccgctctgtctgcgctccatgaggcacaagagacccacggccatgacgacagccgcgctgggcacgcgagaggccactggcggccagccgaggatgccaagctcaaggacctcgtggcgctgtacggccccaagaactggaacctcatcgccagcaaactccacggcagatcagggaaaagctgccggctgcggtggttcaaccagctggacccgcgggtcaaccgccgcccgttctcggcggcggaggagcagcggctggtggcggcgcaccgcgcccacggcaacaagtgggcgctcatcgcgcgcctcttcccaggccgcaccgacaacgccgtcaagaaccactggcacgtcctcacggcgcgcaggcagcgggagcggaccggcgcgccgccgcgccgacgcaagccctcctcgtcgtcacccgccgcccaccaccaccgtgcaccatctcctctgccgttctgcgccggcaaggccacccgaccccgctcggtgcggcgacggcgacggcgacggnggcgggtccgacgagtccgcgtcgtccacctcctccggnaccgacctctcctccctaggctccgtgtgcgcccccgccgtcccctgct

SEQ ID NO: 2977 - DNA, 1409 bp, Zea mays
  Clone ID: TF_ZmC2941_2
aattcggcacgagggacgtcccaatcgagctaatctcacaccgccagtgccagtgccagcggcagctgctaatccgtgccgtgttccagcagcgatgggagtggagtcggagtgcgacaggataaagggcccctggagccccgaggaggacgaggcgctgcggcgtctcgtggagcgccacggcgcgcggaactggacggcgatcgggcgcggcatcccggggcggtcggggaagtcgtgccggctgcggtggtgcaaccagctgtcgccgcaggtggagcgccgccccttcacgcccgaggaggacgccgcgatcctggccgcgcacgcccggctgggcaaccggtgggccgccatcgcgcgccttctcccggggcgcaccgacaacgccgttaagaaccactggaactcgtcgctcaagcggaagctcgccaccgccacggcgacctccagcggcagcgatgctgagcgggcgtgcaagcgcgcaagccctggcccggggagcccgacggcgtcggaccgcagcgacctcagccacggctgcggcgccgcgcaggtgttccgtcccgtcccgcgcgccggaggcttcgacgccatcagcgccgcagacgtgcgccctccgcccccgccagcagtcgcagacgaggacccgctcacctcgctctccctctcgctgccggggctggaccagtcgccgtcgggcttccaccacgacagcgcccggagccacttccaggagctctccccctcgtcgtccccgtcgccgcagtctactccacccgccttccctccgcaggcggctccgtctcagtcgtcgtacgcgttcagcggcgagctggttgccgcgatgcaggagatgatccgcgccgaggtgcgcaagtacatgtccggcgcggggctccgcgccggatgcgggcccggggccgtgggcgaggtgtgcatgccgcagctggtggagggtgtgatgcgcgccgccgcggagcgcgtcggcgtcgtcacacggccgtagaaacccggaaacggaccaaatcagatctgatcaatgcgaagcattgtgttaattaagatcccgtccgtcctgtgtagcagcgctacgtagactactactactactagtcgttctctggccgttgtatttagcagaggagctcgcgtttgtttattcttcggcggctgtcgctctgaatccagaaaggaacagagcggcggtgtaaagccgggagcggaagcggaggttggcaataatcgagatcgagcctgccatttctataaccggatgtgaccgcaacttgatccaaaaaaaaaaaaagcaaaaaaaaaaaaaaaaaaaaaaaaaaaagcctcctctcggccgctctgtacgggaattaatcggattggaccggaatgcaccgaaaagagggggcccg

SEQ ID NO: 2978 - DNA, 1069 bp, Zea mays
  Clone ID: TF_ZmC42_34
gacggcggaggaggtgcggcggcactacgaggcgctggtggaggacgtggccgctatcgaggccggccgcatcccgctcccgcgctacgctggggaggagtcgtccgcggcgacgcccgagggctccggtgccgccggcccgtccacgcccaaggacggaggaggagggagcgggcaccgacgcgaagaacggaagggcggcgtcggcgctgacgcggggaagagttgctctaaggccgagcaggagcggcgcaagggcgtgccgtggacggaagaggagcacaggttgttcttgttgggtctggacaagttcggcaagggcgactggcggagcatctcgcgcaacttcgtcatctcgcggacgccgacgcaggtggcgagccacgcgcagaaatacttcatccgcctcaactcgatgaaccgggacaggcgccgctccagcatccacgacatcaccagcgtgaccgccggcgaggtggccacggccggcgcgcccatcacgggcggcggcccgaccgcggcgggggcgatgccgatggggccgggcggcatgaagcaccaccacccggttccgccgatgggcatgtacgggcatgcgcccatgggccacccggtcgctgggcacatggtggcgccggcggccgtcggcacgccggtcatgttcccgccgggccatcactcgccctatgtcctgccggtgggatacccggcgccaccgaccaagatgcaccagtgatcgtctacgaccggcatttgcgcatctgcacaactgcattcctttgctcgttctttcttgatttcgttgatgatcttgtgtagccaaagctatctatatccatcctttcctcatctcccgggtctttgatttttgacgtaacatatagatgacttgagcgagtgcagggcaggcaggcgaataatgagtatcgctacttacaggaaggctcaaggaatgtgtaattagtagcagccttcctgggtgcaaatattcatcatttgtgcaactggggactgacagaatctcatttcccggatgtaaatcgattgtctataatatctcatctgtgcg

SEQ ID NO: 2979 - DNA, 231 bp, Zea mays
  Clone ID: TF_ZmC177016_1
gacgaggagaagctcatcatccacctccactccctcctcggcaacaagtggtccgccatcgccaccaagctgcccggccggaccgacaacgagatcaagaactactggaacacgcacctccgcaagaagctgctcgccatggggatcgaccccgtcacgcaccagcgccgcaccgacctcaacctcctcgcggccggcggcttcaccaacctcctcgccgccgccaacctc

SEQ ID NO: 2980 - DNA, 466 bp, Zea mays
  unsure (1)..(466): unsure at all n locations
  Clone ID: TF_LIB3600-012-P1-K6-D11
aggtggaccaaccacctgcgccccgacctcaanaanagcgtgtggactgaagaagacgacatggcgctgatcaaggcgcacaagcggtgcggcaaccactggtcgaccatcgccacgttcctgcccgggcgttccgagaacgccgtgaagaaccactggaacgccaccaagcggagcctcaaagccaagcgccggctgaagaagaagagcaacgcgcagcaggtgccggccgggcagtggtccgtcctggaggagtacatccgcagcctgtaccctgacctcgccgacggcgccggcgccgaccagaccccgccggcggccgaggactcccccccgtcgtcctacaacctcgggtcgtactcgtacggcgaggtgatcagcagcccagcgtccgccgccgcgccgcccggcagctttgaccagatgaccgccatggggctgtacctgggcgcgtcgtcgtcgtcgc

SEQ ID NO: 2981 - DNA, 1652 bp, Zea mays
  Clone ID: TF_ZmC17058_1
ctgcagggccagcgaaagcttcgttgttccggcgggcagttgcaagcaaacaactgccgcgcgcataacgccattgaggtaactggctagtgctagtcccaccctttgcacggcagcttgctagctagctacctacctcgggcgcgcgcggcatggcgaggcggacgagcggccccaagaagaagctgaggaggggcctctggtcgccggaggaggacgataagctcgtcaaccacattgccaagtatggccacggctgctggagttccgtccccaagctagcaggtctagagaggtgtgggaagagctgcaggctgaggtggatcaactacctcaggccggacctcaagaggggagcgttctcgcaggaagaggaggacctcatcatccatctccattccatgatgggcaacaagtggtctcagattgcttcgcagctgccggggcggacggacaacgaggtgaagaacttctggaactcgtacgtcaagaagaagctccggcagcgcgggatcgacccggccacgcacaagccgctcccgctggccgccgagggcatcagcagccgcacggcggtgttcagcgacgccgagctcatcctgtcgtcgccggcggcggcggcggggcggcacatgccgccgccgccagtggcggcatcggcggcggagagctacgtgtacagctacagccacagcagtggcggcgcgagcgacggctctctgcagtcgctgtcggggtacaacagcaacagcaagcaaacagctgcggatcacttgggtgccgcagccgcagcggggtacctgcagcaggagcaggacccagcagcagcagcagcagcagccgacgcgctgcactgcggaccctccggtgccccggcggtcgttctcccgtcagtgtccagctccagcacgctgaactcgatggctggcctaagccccgcggccaccaccaccgacgaacagtgcaccaacaactgtagcagctgcagcttccacagcgggttggagccgtggctggagctgggcagcacgagcggctactacggcgcctccgccgccgtggaccactacggcgcggcgctggacgagctcaagtggtccgactacgtgttcgacggcggctacggtggccagccgggacagggcatctacggcgacagcaaggacgccgtgcagttcgtggacgccaacgcgctcagcagcagcagttggtgcttgaattgatccccgtcggtcgatcccaacgcgctcggcggcgagcaattaactaatcggccggccgccaattccaactccatctccagcacagcagagacacacactgatacacgtgtgcatgtgttcctacgtgcctacctacgaggctacgactacgattgattggttgattggtgatacataaagtagctcatacatgtttgcattggtgagcttcttgtttgtaaattcaattttcgtcttctttcggattggattacagggtttgttaattttccggcgcggtcggtcgacatgtagagagtgcatatggtgacggtgattggggagtgacgagacatacatgtaatggaacatatatatagagagagagattacatatataataataatacatatttattatattatatttaaacaaaaaaaaccccaaaa

SEQ ID NO: 2982 - DNA, 836 bp, Zea mays
  unsure (1)..(836): unsure at all n locations
  Clone ID: TF_LIB4969-008-A1-XP1-D12
gccggccgggcttcgagaaactaagacaaagtggcgtacttttctctgtactagctttcttcttcctcctcctcttcctcctcccaaacagactggatttcatcaagataatcctgaaactggagccaacaagcagacagagaaagaagagcaagaagaccggctcccagccgatacacggtaggagtgagcagcgttagatcagttttcatcacaggatcgatatggtgacagtgagagaggagactcgcaaggggccatggacagagcaggaggacctgcaactggtatgcactgtccgtctgttcggtgaacgtcgttgggatttcattgccaaagtatcttgtttgaggggtggggatccacaaattaggtagctaaattgaagtcacccgcgctaagtcgcaaaagcagctatcaacctctctgaccgactctattcttgcttcccctctccccttctgtatcttcatgcagggctcaaccggacaggcaagagctgccggctgcgctgggtcaactacctccaccctggcctcaagcgtgggcgcatgtctccccatgaagagcgactcatcctagagctgcacgctcggtggggaaacaggtctgattaccaaaagataataaaaaaggacggtttttctctctctctctaaaatttgttgacatgttcaataacttgtcctanacaggtggtccaggatagcacgccgcttgccagggcgcactttgacatgagatcagaactactggaggacacacatgagaaagaaggcacaggagaggaaagagaacatgtctccatcgtcgtcctcgtcttcgctgacttacag

SEQ ID NO: 2983 - DNA, 797 bp, Zea mays
  unsure (1)..(797): unsure at all n locations
  Clone ID: TF_LIB4764-078-R1-K1-F4
gggtacctcgaggccggccgggagcagcacagaccacactggaaagtgcaagctgtagtgagacctgcgcgactgccagcgtgtatccgcgcggcaaggagcgtagcgcgcggtcgtcggcccgcacggccaccaactcccttggacgcacgcgcgcgcgcgaccagctgctaaccgtgcgcaagtagtagtgcgacttcgccgccggccgggatcgctagctcgatcgatcggcgggaccacatacgactccggtgtggccagcggcggccgggccggggaacgcacgtgctgcgagcgagcgagggcagacgctagctgttgccgggagctagccggcgcgcgatggggagggcgccgtgctgcgagaaggtggggctcaagcgagggaggtggacggcggaagaggaccagttacttgccaactacattgcggagcacggcgaggggtcctggaggtcgctgcccaagaatgcaggcctgctccggtgcggcaagagctgccggctccggtggatcaactaccttcgggcggacgtcaagagggggaacatctccaaggaggaagaagacatcatcatcaagctccacgccaccctcggcaacagcttgcactctagtgcggggccgtggccgagtggaggcaggaagacgagcagcaagctagcgacagtgtcctgacagctggcgatgacggttgggtgggcgggcacgatgatgaactgacggttggacgtcaattggacagcgngcacaacgctaggacgagcgctaaagcggggttggatgctacaaac

SEQ ID NO: 2984 - DNA, 766 bp, Zea mays
  Clone ID: TF_LIB4767-023-A1-K1-E7
ggccggccgggagcacagtacacacactgggaaagtgcaagctgtagtgagacctgcgcgactgccagcgtgtatccgcgcggcaaggagcgtagcgcgcggtcgtcggcccgcacggccaccaactcccttggacgcacgcgcgcgcgcgaccagctgctaaccgtgcgcaagtagtagtgcgacttcgccgccggccgggatcgctagctcgatcgatcggcgggaccacatacgactccggtgtggccagcggcggccgggccggggaacgcacgtgctgcgagcgagcgagggcagacgctagctgttgccgggagctagccggcgcgcgatggggagggcgccgtgctgcgagaaggtggggctcaagcgagggaggtggacggcggaggaggaccagttacttgccaactacattgcggagcacggcgaggggtcctggaggtcgctgcccaagaatgcaggcctgctccggtgcggcaagagctgccggctccgttggatcaactaccttcgggcggacgtcaagagggggaacatctccaaggaggaagaagacatcatcatcaagctccacgccaccctcgggaacagggatacagcagcgcaccagtcttgatgggaaatggtgttccggcagcggttcgaggtactggacaggtctacctgaagttaacttcaggaaagacgctcgtgctgaaggacgtactctatgtgccatcgatgagccggaacctcatatcagtgtcgctgctatgtcgac

SEQ ID NO: 2985 - DNA, 824 bp, Zea mays
  unsure (1)..(824): unsure at all n locations
  Clone ID: TF_LIB5117-052-A1-PF1-E5
atgcttcgctcgctgggcgacagcatcnggaggaaagaaaggttgcctctcccccgccttggatttgatagccgctagctgattaagcgtaacacgctctgtccctaccagcagctagcacaaaaaaatatctccaagaaaagagctgaaatcgcagcagcagcggcaacgtgctcagcttagttagcagtagcagtgctatctctttcagctaagtgggagagctcgctcgctagctgaggagtgcgcgccattaatggcggaagcggaagggcagctcgcggcctgctgggggaagcaggacgacgagtggaggaaaggcccgtggacaacccaggaggacaagctgctcctcgaccatgtcgcccagcacggcgaagggaggtggaactccgtctccaagctcacaggtctcaagagaagtggcaagagttgcaggctgcggtgggttaactacctcagacctgatctaaagagaggcaagatgacaccccaagaggagagcaccatagtccagctccactccttgtgggggaacaggtggtcgacgattgcacgcagcctcccggggaggacggacaacgagatcaagaactactggaggacgcactacaagaagggcaagccgtccaagaacatcgagcgcgccagggctcggttcctgatgcagcggcgtgagatgcagcagcagcagcagcagcagcaacagaagctgctacttgggcagggcaaggacgccgagctcgccagcgccactgccgaggacgacgtcgacgagaagatgaccggcaacgtaggcccggcagcgacggcgctggctgaca

SEQ ID NO: 2986 - DNA, 713 bp, Zea mays
  unsure (1)..(713): unsure at all n locations
  Clone ID: TF_LIB4744-081-Q1-K1-A2
ccggccgggacacccactgcgccccggcctgctgcccggctcccatatgtatgccctccgttgcacttgcactgcaccccctgtctgtccccacccttctgccctggcttatctctttccgcttccccctgttataatagcaaccaaaccaaaccaaaccagagctcaggaggagcttccacgcaaactcaggggaggcgcgcgcaagcaagcacacgagggagaaccaggcatggggaggtctccgtgctgcgagaaggcgcacacgaacaagggcgcctggaccaaggaggaggaccagcgcctgatcgcctacatcagggcgcacggcgaagggagctggcgctcgctgcccaaggccgcgggactcctccgctgcggcaagagctgcaggctccgctggatgaactacctccgcccggacctcaagcgcggcaacttcaccggcgacgacgacgagctcatcatcaagctccacgccctgctcggcaacaagtggtcgctcatcgcggggcagctgcccggccggacggacaacgagatcaagaactactggaacacgcacatcaagcgcaagctgctcagccgcggcatcgacccgcagacgcaccgcccgctcagcggcggcgcgggcagcgcgctcaccaccacgtncagcaccgccggcttcccgtcccccggcccgcgtccaggtccaggcccacgcccacgcc

SEQ ID NO: 2987 - DNA, 683 bp, Zea mays
  unsure (1)..(683): unsure at all n locations
  Clone ID: TF_ZmC1193_14
ccggccgggagcatccaaccaaaccaagcagagctcaggaggagcttccgcgcaaactcaggggaggcgcgcgcaagcaagaccacgagggagcagcgggcaggcaggcaggcagccatggggaggtctccgtgctgcgagaaggcgcacacgaacaagggcgcctggaccaaggaggaggaccagcgcctgatcgcctacatcagggcgcacggcgaggggagctggcgctcgctgcccaaggccgcgggactcctccgctgcggcaagagctgcaggctccgctggatgaactacctccgcccggacctcaagcgcggcaacttcaccggcgacgacgacgagctcatcatcaagctccacgccctgctcggcaacaagtggtcgctcatcgcggggcagctgcccggccggacggacaacgagatcaagaactactggaacacgcacatcaagcgcaagctgctcagccgcggcatcgacccgcagacgcaccgcccgctcagcggcggcgcgggcagcgcgctcaccaccacgtncagcaccgccggcttcccgtcccccgcgccggcgttcaggcccacgcccacgcccccgcccgccgtcgncgtcgtcccgcccaatgcgatcttcgcgcgcncggcgcccgtcgtagacggccacagcagcagcggcgcgagcac

SEQ ID NO: 2988 - DNA, 1556 bp, Zea mays
  Clone ID: TF_ZmC192589_1
ggccgcttttttttttttttttttgacataataattcacatttttatttaaccgcatggcccactcatcatatctctgtccctctctctctctctgcagtatttatactaattaacaacagcgtatgtattactttacatgtgtgttaaacacttcaaatgtactcatcacatgaacttttatccgctgctaatcaacacagcaacatgagaatagaaagggggaggggtaacaccagatgaaatgcccgtaagaatttgcatctgcagactatatatagacagtaattaattcacactgatggactgtttcttgttccgtggtttctttgcattgagtacgtgatggattactggactagcaccagttgcttagcccgccatggacactcgaagtgcaccggggacgtcatccttgccgccgtagacacactgccccggctgcagggcgccttgctggctctcggcggcctggaaggcactgtcgaagtactccgaccacctgagctcgtccagcgcgccggcgtagcagctgccgacgacgtggccgccggcgtcagccaccgcgtttgccccgagctccagccatgggaggttgccgccggcggcgacgttgttggtgctgcagtgttccgcttccgccatcgaggtcagcgtgctggagctggcgctggcggaggccgacgggacgaccggcgccggcgggatggggccgcagtgctgctgcagcgcgtccatgtcgaagcagcccccctgcaggtagcatggccttgacgttaccccgtcgccagcgacgggccagtccagctccaccgctagcttcacgctctccagcattgggccgccctcgaacgacggcggcggcacctggattgtagtagtagtagtagtcgggatgaggtcgacgtccccaaacaccgcgcggcgggagaccgtggtggtggtggtggcagtggctgcggcggcaggctcggcgagcggctggtgggtggcggggtcgatgccgcgctccctgagcctcttcttgatgtacgagttccagaagttcttgacctcgttgtccgtccggccaggcagctgggccgcaatctgagaccacttgtttcccagcaaggagtggaggtgtatgatgaggtcctcctcctcttgcgagaatgtgcccctcttgaggtctggcctcaggtagtttatccacctcagcctgcagctcttgccacacctgtcgaggcctgcaagcttgggtacggagctccagcagccgtggccgtacttggcaatgtggttcatgagcttctcgtcctcctcgggggaccagagccctctcctaagcttcttcttgtggcagcacgactgcttcgccatgccgggatagcctggcgccaggagctagcaagctaaaaccccagccggccgttggcctcgcgcgcgcgccgaccgatccttgacgatgatcgctcgttatatggaaggcgagatgtgatggcggcaggctactaggagccgaattgaagagaggccaggagaaagagaaagagagagagagataaaaggatgcca

SEQ ID NO: 2989 - DNA, 3387 bp, Zea mays
  Clone ID: TF_ZmC335_2
ggccggccgggaacagaacccaaacctcgccgattcgctccccttcctcaccgcgcgcgtacgccgccgctgcgctcaccttaacgaaccctaaacctgagccaccgccctcccccggaggtccgccgctccgtgtgggactctaggcgtcgccggagccccctccaggggctagcggcggaggaagtcggaaaccgattacccctcccctccccttaccgggggagggagaaactagcggaggaggcgaatcaggtcagagtggggcacgatgaggatcatgatcaagggaggcgtgtggaagaacacggaggacgagatcctcaaggcggccgtgatgaagtacggcaagaaccagtgggcgcgcatctcgtcgctgctcgtccgcaagtccgccaagcagtgcaaggcccgctggtacgagtggctcgatccgtccatcaagaagaccgagtggacaagggaggaggatgagaaattacttcatcttgctaaactcatgcctactcagtggaggacaattgcacctattgtaggtcgaacaccatctcagtgtcttgaacgttatgaaaagctgcttgacgccgcatgtgcaaaggatgaaaattatgaggctaatgatgatcctaggaagctgcggcctggcgagattgacccaaaccctgagtcaaagcccgcacgtcctgatcctgttgatatggatgaagatgaaaaagaaatgctttctgaggctagggcccgcttagctaacactaggggtaaaaaggccaaacggaaggcaagggagaaacaacttgaagaagcaagaaggcttgcttcactacaaaaaaggagagaattgaaggcagctggtattgatacacgccacagaaaaagaaagagaaaggggattgactacaatgctgagattccatttgaaaagagaccaccttcaggtttttatgatactgttggtgaggacagaccacctgaacatgtacagtttccaacaaccattgaggggcttgaagggaagagaagagcagatatagaggcacaattaagaaaacaggatattgccaggaacaagatcctgcagcgacaggatgcccctgctgctataatgcaagcgaataaactaaatgatccagaagctgtcacaaagaggtcaaagctaatgctgccgcctcctcaaatttctgaccacgagctagaggagatagcaaagatgggcagtgctggtgatcctgctttagctgatgagcttggtgaaggaagcactgccacaagaaccttgcttgccagctattctcagactccaaggcttggtatgacaccattgcgaactccgcagcgaactccagctgggaagggtgatgcaatcatgatggaggcagaaaatcttgcacgtctcagagaatcacaaacgcctttattaggaggtgataacccagagcttcatccatcagatttctctggtgttacaccacgcaagaaggagatacagactccaaatccaatggcaacacctttagcaagccctggccctggtatcactccaaggattagtatgacaccatccagagaggggcacagctttggtttaacaccgaaagcaactcctcttcgtgatgaacttaacataaatgaagtggaaatgcaggacaacactaaacttgagcttcgtaggcaagccgaactgaggaaaagcctgcgatctggttttgcttctattccacaaccaaagaatgagtaccagatagtcatgccacctattacggaagatgagaaagaagaagctgaagagaaaattgaagaggacatgtcagacagactggcacgagaaagggctgaggaacaagctaggcatgaggcattgctcagaaagagatccaaagtgttgcagaggagtctgcctaggccaccggctgtttcagtagagattatccggcaatctcttattagaagtggagaaagcagaagcagaagcacctttatgcctcctacatcacttgaacaagctgatgaactaataaatgaggaactccttaggcttcttgagcatgataatgcaaaatatcctcttgatgaaaaaactcaaaaagagaaaaagaaaggaagcaagcgtcagcaaaatggaggacctcttgtccctgaaattgatgattttgatgaagatgaactaaaagaggctagctctatggttgaagaggagattcaataccttcgagtggccatgggtcatgaaaatgaatcttttgaggacttcgtgaaagcacatgatgcatgccaagacgaccttatgttttttcctaccagcaatagctatggtttagctagtgtggctggaaatgctgataagatttctgctttgcaaaatgagtttgaaactgtgaagaagcgaatggatgatgaagctaagaaggcttctcggcttgagcagaagattaagcttctgacacaaggatatcagatacgggctggaaaactgtggtcacaggtccaagatacattcaagcagatggacactgccgcaacagagctcgaatgcttccaagagctgcagaaacaggaacatctcgctgcttcatatcgaatccaaaatttgtctgaagaagtgagtaaacagaaggcactagaaaggaccctccagagccgctacggcgagctggtttctggtttccagaggatccaagaacaggtcgaggagcacaagaggcaactcaaggtacaagaggcggtagaagccgaaagtcacgctcaggaagaggaagctgcggcatcaaatcatgctgctgctgaggaagaggatgaaaggaaggaagatgatgaaaggaaggaagaggatggaagcaagtctctcagctctgaagagaaaccacagcagacaagtacggctaccgatgaagaacctgcaggaagcaaaggaaccaccgaggatcagatggacgtggacagcgggaatggagagggtggagttgtaggccctgtcccaccagcaccagacactgaagggggtaatgatgaagtatcagttcaagagatcagtgaagcccagcccttgccttgaagacggcgctcctttcccttcaagctccgctttcttctcccgcacctggcgatcttcacgatgttgttgttgcacagcaggtccggactgagtatttcctatttggttatatttttagtgcactataatatcgcaagcgaagctacaattggttgtgagctaaatttgcatatccttccctttgttgtattcccttgaacaatgaatcagaacaactgtttaccatttttctaaaggatcgacggcttatgtactcaaaaaaaaaaaaaaaaaaaaaaaaagaaatctgcgttgttaccactgctggctgaataccagccaagtaagcatgacatgct

SEQ ID NO: 2990 - DNA, 838 bp, Zea mays
  Clone ID: TF_ZmC3484_2
cattgggtacctcgaggccggccgggagctagccaagcagacccgatcgaccgccgtcgttgcaatgcaagtggccgcccgcggtcggtcaccggcgttgcattgccccgtctcttagtttgtcgccgtcgtcggccgtcgatcggggcagagaatgggacggctctcctgcggcggcgtgcagcccaagctccgcaaggggctgtggtcgcccgaggaggacgagaggctgtacggtcacatcattcgacacggcgtcggctgctggagctctgtccctaagctggcagggctgcagcgttgcggcaagagctgccgcctgcggtggatcaactacctccgccccgacctcaagcgcggcggcttctcgcagcaggaggaggacctcatcgtggcgctccacgagatcctggggaacaggtggtcgcagatcgcgtcgcacttgccggggcggacggacaacgagatcaagaacctgtggaacagctgcctcaagaagaagctccggcagcgcggcatcgacccggccacgcacaagccgatcgccgcggaggcgggctcggcgctgctgcaccacgacgaccagagcaagccgcagcagcagcctgcggcggcggccgtgttcgacccgttcccggtgaccgacttcggcttcgacctgggcgcagcggcattgtacggcgaacgtccgacgcgtcgtcggacgccgggttcgtggccgactacagcagcgtgctggacgtgtcggagaacctgggctacggggagagctccagcaacagcagcggctggactgcgcggagatgggcatgccgtgctcgacagcgaggcgctgcac

SEQ ID NO: 2991 - DNA, 691 bp, Zea mays
  Clone ID: TF_LIB4741-010-Q1-K1-H11
aagtgtcttcccagttaactccgttgtacgtctctctccctttactagctccgatcttctgctagctcctccgaaccacttgtcgacacgatcgatcgtcgtcgtacgcctgcttggcgtacatactgctactaatggagacggcgctgcagcagagtgctgctactactgctggcggcggcatgaggcccggcgcggcgacgacggtgaagaaggcgaggcaagagctggagcaggagttgcggtttccgcaggcggcgcccgcggatcagggcggccttgacgaggagctccggcgcgggccgtggacggtggacgaggacctcacgctcatcaactacatcgccgactacggcgagggccgctggaacgcgctcgctcgcgccgccgggctgaagcggacggggaagagctgccgcctgcggtggctcaactacctgcggccggacgtgaagcgcggcgacttcaccgccgacgagcagctcctcatcctcgacctccactcccgctggggcaaccggtggtccaagatcgcggcgcacctgccaggccggacggacaacgagatcaagaactactggcggacgcgggtgcagaagcacgccaagcagctcaactgcgacgtgaacagcaagcgcttcaaggacgccatgcgcttcctctggatgccgcgcctggccgagcgcgccgc

SEQ ID NO: 2992 - DNA, 914 bp, Zea mays
  Clone ID: TF_ZmC29713_11
ccacgcgtccggcaagctgtagtgagacctgcgcgactgccagcgtgtatccgcgcggcaaggagcgtagcgcgcggtcgtcggcccgcacggccaccaactcccttggacgcacgcgcgcgcgcgaccagctgctaaccgtgcgcaagtagtagtgcgacttcgccgccggccgggatcgctagctcgatcgatcggcgggaccacatacgactccggtgtggccagcggcggccgggccggggaacgcacgtgctgcgagcgagcgagggcagacgctagctgttgccgggagctagccggcgcgcgatggggagggccgccgtgcttgcaagaaggtggggctcaagcgagggaggtggacggcggaagaggaccagttacttgccaactacattgcggagcacggcgaggggtcctggaggtcgctgcccaagaatgcaggcctgctccggtgcggcaagagctgccggctccggtggatcaactaccttcgggcggacgtcaagagggggaacatctccaaggaggaagaagacatcatcatcaagctccacgccaccctcggcaacaggcgccccctgatcgccggccccctccccgccccgccctcggctgttcgatgccatcatgataatttgtcacttgcatgcacggatcgcgacgcgatgcgatcgagtagcggcaaactcatcaacgtgctgttccaggggcttcggttggtgttgctatactctgagatactgtgcattgtatgtcaaaaacctcgctgttagatactgactactgtgtgacccgttgaatgaatagtacttcaataatatatatatgcttgtttaagttaactggcacgtatatatgcatgtacttgtatcttttatgggaaaagacaacacatatttaattaaaaaaaa

SEQ ID NO: 2993 - DNA, 3901 bp, Zea mays
  unsure (1)..(3901): unsure at all n locations
  Clone ID: TF_ZmC2165_1
gatcaatggtcatattgattctatagagagtgaatgcttatcgagaaataagannaaagaaagggtatgtgctactctttgaaagaaaaaagaataggagttcccgaagtaatgtctaaacccaaggatttcacaaatcaaagataaaggattccggaacaagtaaacacgattttcaaccgtctcaacaatagaattagatctgaataaggaataaaagtcaatttgttcgagatgagataaagaaaagagtttagagacgactcaaaaaatttcgaagggtttttcttttgaagtttgtcagtaaaaattagccaacttgagtcatgagtataaatgaaatttgttttttcttttctttaaggaaattaatgcaagtcataatcgaatttctatctatttgcattatagacagattgcattatagacagaaattcgaatcattttctcgagccgtatgaggagaaaacctcctatacgtttctaggggggggttgtttatctacatctatcccaataagctatctatcgaatcgttgcaattgatgttcgatctcgaagagaaggaagagatcttcgaaaagtaggtttttatgatccgataaagaatcaaacttgtttaaatgttccagctattctctatttccttgaaaagggtgctcaacctacaagaacagtttatgatattttaaggaaggcagaattctttaaagataaagaaagaactttgagttaattgaagaactaaatgaataaaaaagtaggagagggtccttagtaccccttaattatttagacacaatttgcctctttcttagtcctattttttttttgctgcatttatgtcgtgccaatccaacaaaagtccctattttatttcctttttatatctaattacattgtatttgcattgacaaaggtctattgaacaaatagaatttgtagatagatgggtctctttattgtcactccatattaggtatttctgtctacacttcattcaaatgatagggttgcccctcttgcatgtactctcatacacatacaagattattttacttctttaaattgccaaaaaaatcacaattttgccattgtgattggggctgcttttttttttttacccttagccttagtgaaatttaaccggatctgttcatttttgtatttgagtgtttttaatggattagaaaatctttcttttgatgtcttgctaattcaatgtggtataatttcatcgatttttagattttgatcgtatctaagagatcctattttatccgggttgctaactcaatggtagagtactcggcttttaagtgcggctacgggtacctcgaggccggccgcgatctagcggcagagaccaaagtgcccatcgcaccatgtcggccgccgaaaccgctgtttctccgacgacgacgccgcagccgcagctgcaatcggatccgaacgccgccgccgacgcggccagttccaattctctctgggtggccgacgagacgcaaaccctaaccgaggtcctgctccaaccccaaccaaaccacctgtcgcctcctccttctggtgaaggggacgacgggatcactgcctccggtgctcctgttggtggggacgccgcggcatctgcttctgctgcggcggcggctaacgcgacgatagaagagcgggtgagggggccgtggtccccagaggaggacgcggtgctgagcaacctcgtggagaagttcggggcgcggaactggacgctgatcgcgcgtggcatcccgggccgctccggcaagtcctgccgcctgcgctggtgcaatcagctcgacccccaagtcaagcgcaagcctttcactgaagaggaggaccgcattataatggcagctcatgctgtccatgggaacaagtgggcatctatcgcaaagcttttggatgggagaacagacaatgccatcaagaatcactggaattccaccctgaggcgtcgctactgcaatgatggccaatgcaagcatggtggttctgtggagcgaagtatcccaaaggtgtccagggaagtttcagaagaaccttggcctttaaacgatcttaattccttcaccgctatggatgtaaaggatgatcctgtgcaaacagctccagatacttctcctcgggcaaggcacatcacagatcattgttctattactcaagtcgttgatccaccatacctgtcccgaccagcggcaaagattggtgctttcagaccatattatctaggacacacggaacctacccaacaagaaatgccaggtgctgtcgtcatgtttgactcaactcataaagtctcgactcctgaaagcgaggtattcaagtttgttgatcctatatgctttgctgctgaggtgccagacaaatgtgggtatggttgctgcggtgctcatgagcagcatcgtaagaactcattgctgggtcctgagttcagtgagtttgaaggtcatccacctgttttaaatattagctttgcttcattggtatcagaaattagcagcattgcctggatgagaagtggtatgcaaagcagtgattccagcaacttgatgcaatcaattccaccaacctgacaaagtaggaatcttttgtcagtggcggatccagaaacagatcaaatgaggggctaaattatggattggggaggctggagatggctgcaatgcgaatgaatggaaccaccatgtaaataatgtgcgaattacaaacgcgtgtgggttgctgtgtgccgtgcacatgggtgatgaactgatggacctgcattgtgctgttatgcgcctgcatcttgtaatcgtgggccttcttcgtattactatgctgtttctgggtctagtgaataaatggatagagcctggctctaattctggtaaaataaaaaaaaagcaacgagcttaacttcttaattggttaattggaaggattccccgatctaattagacgttaaaaatagattagtgcctaatgtggggaaaggttaggttttcctatgaatggaccctttactttttttttttagaaatcctaattattcttgattatggattgaaaagagatgttatgaattgaatgtgtaaaagaaacagtatattgataaagagactgtattccaaagtcaaaagagcgattggcctgcaaaaataaaagatttgttcttgtttgttttataattagaacaaacataaactaattagatagaaaaggagtggaaaaagttctatggattagactccctttctttcctgggtttgtattatgcaacaccttgttctgaccatattgcactatgtatcaaaaatcactacatggtactaagtgttacttaggcttctggaccggggctgcagccccgccagccctggtcctggatccacccctgcttatgaacttgcatgctggagtattctgtagttgtttgctatattgagaaatgctttttttctctatttcaagtagaaaaaaaaatggaaaaattcgaagggtattcagaaaaacagaaatctcgtcaacactacttcgtctacccacttctctttcaggaatatatttatgcatttgctcatgattatggattaaatggttccgaacccgtggaaatttttggttgtaataacaagaaatttagttcactacttgtgaaacgtttaattattcgaatgtatcagcagaatttttttaattaattcggttaattatcctaaccaagatcgattgttggatcaccgtaattatttttattctgagttttattctcagattctatctgaggggtttgcgatcgttgtagaaatcccactctcgctagggcaactatcttgtccaaaaaaaaaaaaaaaaaaaaaaaaanaaagtnctctgcgttgttaccactgcttaagggcgaaaa

SEQ ID NO: 2994 - DNA, 1036 bp, Zea mays
  Clone ID: TF_ZmC22694_1
ttgggtaccccctcgaggggccgccccgcgtccggaaaaaaaaggccgtgcagagtgcaggtgaagatgatgaagaactaccctggtcctgctagcagcagtagtgttgctgtagaggtgaagaaggggtcatggagccccgaggaggacgccctgctgaccaggctggtggagcagcacgggccccaccgctggagcctcatcagcgccccaatccctggccgctccggcaagtcctgccgactccgctggtgcaaccagctcagccccgacgtgcaccaccgccctttcacgccgcacgaggacgcgctcatcctcgccgctcacgcccgctacggcaacaagtgggccaccatcgcgcgcctccttcccggccgcaccgacaactccatcaagaaccactggaactccaacctccggaggtgcaggcgccgagcggcggcggcggcggtggcctcccgaccgcaggtgcaggacagcgacgacgctcctgctgctgctgctgctcatgatgatcagccggcggctgtggttgctgctggtggtttaggtggtggcaacagcagcagcggtctgccgcctgcagcagcaggggccgcaactgccgaggccgagccgtctctgtccctcagccttggcctcccgctgccagcagcagaaccagctgaagccgcggctgacgacgagagccgcaacagccagggccaggcatcgccgttactggaggaaggagaaggaaacgcgcagctgttggcagtggtgcgccggatggtcagggaggaggtgcaacgccagacgggacagctcgcctactcgctcatggccgcagcagcagccagagccaagggacaccaccgttaatctgtgtgtgatccattgtgcatgctgctgctgctgctgcttcttggatttcccctcctttctccgatatgatcctctctgccaagtgtattttgttttccttcgtttcttgtactaccttcccttgtgttcgtttatgcgattgcgattggacttaaaacaaaaaaaaaaaaaa

SEQ ID NO: 2995 - DNA, 1286 bp, Zea mays
  Clone ID: TF_LIB4732-032-F12_FLI
ccggggacccacacggccacacccaccccaccattcggttgaattgaattggtgctgtatgtactgtgctgtgttagttgcatcggttttgccggccggcaggccagcatggggaggtctccttgctgcgacgagaatggcctgaagaaggggccctggactcaggaggaagatgagaagctgctgcactacatccagaagaacgggcatggcagttggcggaccctgccgaggctggccgggctgaacaggtgcggcaagagctgccggctgcggtggaccaactacctgcggccggacatcaagcggggcaagttctcgcgggaggaggagcagaccatcctccacctgcactccgtcctcggcaacaagtggtccgccatcgccacgcacctcccaggccgcaccgacaacgagatcaagaacttctggaacacgcacctcaggaagcgcctcatccagatgggcttcgaccccatgacgcaccgcccccgcaccgacttcttcgccgcgctgccgcagctcatcgcgctcgcagccctacgcgggcagctgcccgccgaccccgacccgccgcagcaggccgggacgacggcggcggcggcggcggctctcgccggtctcatcggcgccctctgctcgccgccgcaactgacgctcctcgacaccaccaccgctactaccgctgctgctgccccgccggtggtgtcgtcgtcgtccgcggacgacgatgccgcccaccagtactacttaccgcgcaccacgttccccgacgcgcccggcagcggtgaagctgcccaccagcggcaacagcaagcagcaggcctcatcagctatggccgacgacccgacgacgccggcggtgatgttgacgtgttcgcgtgctacggtggtggcggtggaagctcgctgccgcccctgaccgacctctccgacgacgcagccaccctgctgcagctgcaggtggacacggcgtcgtccgaattcggcagtggcggctccagcccgctcctcccttggccggagttcttccccgacgatcccttcatcactgatttcctatgacatcgtcacactgtatatttgctcgtcgactcgtcgtgcaatcgtacatgcggatccatatatgtacgtcgtatctccctctgaactttgtaagctttgcgtactgtactctacacacacaaacacatacgtgcattcctttcagaacagttggaaagtgtgcagagcagggtcgagtgaggcttttccctccctttctgtttctgcttttgttggcgacc

SEQ ID NO: 2996 - DNA, 619 bp, Zea mays
  Clone ID: TF_ZmC344_2
tcgcggagctacctcagctgccgtgtcctgcacagccgccgcttccgcaccggttccgacggagcaaaggcgaaagcgagtagcaacaagcaaaagcccagatcgataatacgatggggcggtcgccgtgctgcgagaaggcgcacaccaacaggggcgcgtggaccaaggaggaggacgagcggctggtggcctacgtccgcgcgcacggcgaagggtgctggcgctcgctgcccagggcggcgggcctgctgcgctgcggcaagagctgccgcctgcgctggatcaactacctccgcccggacctcaagcgcggcaacttcaccgccgacgaggacgacctcatcgtcaagctgcacagcctcctcgggaacaagtggtcgctcatcgccgcgcggctcccggggcggacggacaacgagatcaagaactactggaacacgcacatccggcgcaagctgctgggcagcggcatcgaccccgtcacgcaccgccgcgtcgcggggggcgccgcgaccaccatctcgttccagcccagccccaacaccgccgtcgccgccgccgcagaaacagcagcgcaggcgccgatcaaggccgaggagacggcggccgtcaaggc

SEQ ID NO: 2997 - DNA, 1285 bp, Zea mays
  Clone ID: TF_UC-ZMFLB73162H04_FLI
acccgggagcagacagtgacaggcgaaccaagacacgcagggacagggagacatggggcgagggcgagcgccgtgctgcgccaaggtggggctcaacaggggctcctggacgccgcaggaggacatgcgcctcatcgcctacatccagaagcacggccacaccaactggcgcgcgctgcccaagcaagcaggtttgctgcgctgtgggaagagctgcaggctgcgctggatcaactacctgcggccggacctcaagcgcggcaacttcaccgacgaggaggaggaggccatcataaggctgcacgggttgctcgggaataaatggtctaagatcgctgcctgcctgccggggaggacggacaacgagatcaagaacgtgtggaacacgcacctgaagaagaaggtggcgcagcgggagaagaagaaggccggcgcggggagcggcgacgccggcacgcccgccactgcgcccttgtcctcggcgacctcctcgacgacgacccacaacagctccgggggcagcgactccggcgaccagtgcggcacgagcagggagcctgacgcgaccgacgtgtgccccctccagctagaggacatggacgtctcggacatgctggtggacggcgcgcccccggcggcgcagccaatgccgtcgccgtcctcctcgtcctccctgacgacgtgcgtcggcggcgtggaggagctgatcgagctgccggtgatcgacatcgagccggaaatctggagcatcatcgacggcgagagcgctgtggcgcgccatggtggcgatgcagccgcgccatgtacgggcaccggcaccgccgtcagcaccagcgaagcagaggaagcggcggcgaacgattggtggctggagaatttggagaaggagctgggcctgtggggctacgcggaggaggatactcaggcccaccctgacctactggaccactacacaggtttgagcccactctgcgccctggagggggacccagtctccacctacttccagaccgggcccgccgccgcggaacctgagctcctggtggtcgtcgaaccatctgccgttctgctatgactatgagcaacatgacggacggtcacagcaacgaacatcctggttcttggagatgttcggtggatcaaattcgagtagtttgtttgatgcagtggcagattaatatctctacaggccaattagaatgcacattcagaacagaaccgtccaaagaaagcctgtagagtgaaggctagtactctcttattcttaacagtgtttaacgcagat

SEQ ID NO: 2998 - DNA, 1441 bp, Zea mays
  Clone ID: TF_ZmC372_1
ccacgcgtccggtctcctctccccatcttctctcctggaagccgcctcggtcggacccggacaagatggccgccttcttcggtgctgcaccgccgccggctctcgcttcgttccgccacgaggaggaggaggagcagcatcaggacgccgccgaggaggtgtaccacgtggacgatgtcgacgagggcagcggtgacggccgtggccacggcggcgccggccaggggaagctgtgcgccaggggccactggcgccccgccgaggacgccaagctcaaggagctcgtcgcgcagttcgggccccagaactggaacctcatcgccgagaggctggacggcagatcagggaagagctgccgcctgcggtggttcaaccagctggacccgcggatcaaccggcgcgccttctcggaggaggaggaggagcggctcctggcggcgcaccgcgcgtacggcaacaagtgggctctcatcgcgcgcctcttcccgggccgcaccgacaacgccgtcaagaaccactggcacgtcctcatggcgcgcaggcagcgggagcactcgggcgcgctccgccgccgcaagccctcctcgacctcgccctcgccggcgccggcgccggcgccgcacctggcgcccgtcgtcgtcctccaccaccaccaccactacgccggcggctcccctcccatgccgccgttgcacgccgccgacgcccacacgcagtacacggcagcggcggcggcagcggacacccgcgcgcacagcggcggcgagtccgacgagaccgcctccacgtgcaccaccgacctctccctcgcttccgccgccccctgcttctaccagagtggctacgacgtggccccgcgcgccgcggcgttcgcaccgagcgcgcgctccgccttctccgcgccgccggcgacggcgcgctccgacgacaaggtctcgctgcccttcttcgacttcctcggcgtcggcgcggcgtgatgggggggccggcccgggccggccaggcggcggtgtacaggagggcggaggcggtcaaaggacgagagccccggcggcggtgaacccgtgcccgcgcgtagtttagctttagagcccgagttaaatcatcgagaacagaacatggcctgagcctgagagaggaggagaatggcgatccaccattgaactggtgcccgtggcattgcagactaacagctccgcatccgttcggctgctgatgttgctagtagtaatggtacggtgattactctctgctttgggttgggagagacgaatctgcaagcaccaccagaccaagcaagggcgacgatgggtatgggtggatgtttgcagaagaagaaaaaaccgcttgtaacacaaactgcaggacaaaggcagatcagagatcctctgctaactctctttttacaaaaaaaaaaaccaagggcggccgctctagagga

SEQ ID NO: 2999 - DNA, 367 bp, Zea mays
  Clone ID: TF_LIB3245-422-P1-N1-B11
ggcaagagctgcaggctgcggtgggtcaactacctgagaccagatctgaaacggtgtaagatcacaccccaagaggagagcgtcatagtccagctccatgctttgtgggggaacagtactgtactgtacgtcgtacgacgtgcataagcaggtggtcgacgatcgctcgcagcctccccggcaggacggacaacgagatcaagaactactggcggacgcacttcaagaagggcaagccgtccaagaacgttgagcgcgcgagagcccggttcctcaagcagcgccgggaaatgatgatgcagcagcagtctcttggcggcagcacctgcacctcgacgagggcggtgaccagcgccgcggcgcgtgc

SEQ ID NO: 3000 - DNA, 428 bp, Zea mays
  Clone ID: TF_jC-zmX700203880a1
cgacgaagctagaatttggtcgaggcggcgcactttatcaatggggtgccggtcctgtgacagggcgaatttaactaccgtaaggcgctatggtctcctgaggaggacacagaagctcaagcactacatcctgacggatggacttggatgctgaagtgctggcccggtaaaggctgctgttcagagaaacggcaagagctgacggctgggctgaatcaactacctgcgccctggactgaatcgtggaatgatgtcccaggaggaggagagacgtcttaatctatctccaagccaagttggggaacaagtgggctcaaattgcgatacatctgccggggaggaccgacaacgaggcgaagaactactggaactcgtacctgactaagagggtgacgccagaggcccagagcgccgtcgtccaatttcag

SEQ ID NO: 3001 - DNA, 1028 bp, Zea mays
  Clone ID: TF_ZmC42_31
ataaactccagccacttcggcatgcgccgggaatttgattcttctgcctaaaatagtcacgctaccttccacctccccctactactctgactctccctcgtcttcttcgctaccaagatgatggcggaggcgtggacgccggtgctgttgccggcgacggcgccctgcttctggcagcaggacacgcactcggttttgtggcggagaggagacgcgtggacggcggaggagaacaagctgttcgagaaggcactggcgcagatcgaccggaacgcgcccgacaggtgggagaaggtggcggcggtgctgccctggaagacggtcgacgacgtgaggagccagtaccacgccctcgagaaggacgtgggcgtcatcgaggccggcgggctcgtgccgttcccgcgctacagcggctcggtcccgccgccgtccgggttcgccctcgaggactggggcggcggcgaccgcgggttcaggcgcgcgcgcggctcggaggagatgcaggagcggaagaagggtgtcccctggacggaggaggagcacaagcttttcttgatggggctgaggaagtacgggagaggggactggaggaacatctcgcgcaagtacgtgacgacccggacgccgacgcaggtggccagccacgcgcagaagtacttcatccggctcagctccggcggcaaggacaagcggcggtccagcatccacgacatcaccaccgtcaacctcccaggcgacgccccgcgctcgtcgccgcccgcggccaccaccaacccctccgccggcgccctggtggtggacgtgaagcccttcgtgtgacgaggataaaaagtggcacagcctcgtcgtccagctgccagctcgcggcagctccgagcgactgcgttcatcgagaacaagacgccatgggcggcaatgcggcatccgtttcagttcagtgtacataattcggcaagtacagagcccaacaacttccacgtaaaaggtactgaataataaagcattcgaggaaaaaaaaaaaaaaaaaa

SEQ ID NO: 3002 - DNA, 2722 bp, Zea mays
  Clone ID: TF_ZmC54113_1
acgtggcttcccgaccaaccgccgtggtcccctcactcgcggacactctccgggcgcccaccacctccgcctcttccgccgccgtgtgtgccggcgacgatgccgcgcaaggcctcctccaactcagatgcgcgggccaagtcgcggaagcggaagcgcgccgccgccagcgcctccccgtccaagcagccggacgaccactcagacgactccgacaccgccgcggcggcgaacggcgacgatgagacgtcccgcgcagcatccgttaacgggggcggaggaaccctagccggcgtcggcggcgatgacgaccccgtgctcgaccttcgtgcggcggaggtgctctcctcctccgccgagcccgtttccgccttccccgccgccgtccgccgtgccgtgagccggcctcacccctcggtgctggctgtaatcgccgccgagcgtgcggcggccagttctgacgatgctccggtcaccccagcctcggtacccgttctcgagaatatttcgcacgggcaactccaggtgatctcggcgatgctgcccgaccatccgtccctgtcctacgaccctgacaagccgtccacgtatgtctgcaccccacctccactgatggagggatgcggagtgcacaaacagttctatgacaaacttcacatcgtgcccaggcactcagattggtttgtgccacagacagtgcacaggttggagaggcaggttgtgccacagtacttctctggaaaatctcaggggcaaacaccagagaagtacatcatgttgaggaacaaggtgattgcgaaatatttggagcgacctgggaaaaggcttgtgtttgctgagtgccaggggcttgtcacaagcacacctgaattgtatgatcttagtaggatagttaggttcttggaatcttgggggatcattaattaccttgcaacagggtcagtgtaccgtggcccgaggacggcatcatctctgatcaaggaagagacaacaggggagcttcagctggtctctgcaccaatgaaatcaattgatggtttgattttgtttgatcggcccaaatgcagtatccaggcaaatgatatatcttcgttggtgtcaacttcatctgctccatttgtggttaatcatgacggtgattcagcaaatttggatgagaagatttgggagcgcttatcagagagttcttgtagtttctgctcacaaccttcccacgcgtccgactatgagtcacaaaaggagacagacattgctctttgttcagactgcttccacaatgcaaaatttgttactgggcattcaaacttagattttcagagagtggatgcgatgaaagatggatcagacactgatggggacagatggacagatcaggaaactttgctgttgttggagggcatagaaaagttcaatgataactggaatcatatcgcaggtcatgttgggacaaaatcaaaagcacaatgtattcaccatttcattcgtctcccggtggcagatggtttgttagagaacattgaagtgccagaagcatcccttccatctggaatgcaaagcagtggatttttgcattcagattccaatggcagtacttcaggtagccaacctggaaaccagattccattcattaattctgctaatccagtcatgtcactggttgcatttttagctgctgaagtaggaccaagagttgcagcatcctgtgcaagtgcagcattatcggttttgacaagggaagattccaggatgaatgcagaaggcattgatgctatgggccatggtactcatctcaactatggaccctcatcatccatttcttctgaaactgtgaaaaatgctgcaagctgtggcttgtcagcagcagcaacaaagtccaagctttttgcagaccaggaggagcgtgaaattcagagattatctgccaccatcataaatcatcagttaaagagactggagttgaaactgaagcagtttgcggaggttgagacaatgctcttgaaggaaagtgagcggttagatctgatgaggcagcagctggtaactcagcgtatccggatgttatcaacccggttcacttccacaggtggtacaatacctggaggcagcagcggtatggtttcaaacctgatgaatcaggccagcggccttagaccgccgctgatgatgccaggctcggtgacccagtccagcatgccggcaatgtatgcaaataacatgcaggggcatccccagatggctctgctgcaacagcggcaacagatgctctcgttcggacctcgtttgcctctctcggccatcaaccccggctcatcctcgtcggcacccaacatgatgttcaaccatggcatgcccaactcggcagctcctaatcatcaccctttgctgagatcaccctcaggggacaattcaaatgtaggttagtgagatgagtttttcattttttgggtcttagattcctgagctgtagcccttgactcgtgatcattaaccattgtaattcgattgcacaatcacatatagaggttgttaccagcgataggttctcattttctcttaggctgtggaccgtgtgtgcgtgactgtttgctcggatgagattgatgttgctagtggcttaggcgatgcacagaggatgtagagtttctttcaccctgactaattgttattactgcgccaccttagaatgatgtaaaaaatgaatccgcatgaattcccccttctt

SEQ ID NO: 3003 - DNA, 1410 bp, Zea mays
  Clone ID: TF_ZmC21015_1
ggaaactgctggagagggtgagagcaaggggagcagcggtcgggcagccatggggcaccactgctgcagcaagcagaaggtgaagcgtgggctgtggtcgccggaggaggacgagaagcttgtcaagtacatcaccgcccacggccacagctgctggagcgccgttcccaagcatgccgggctgcagcgctgcggcaagagctgccgcctccggtggatcaactacctccggccggacctgaagcgcggaaccttctccgaccacgaggagcgcaccatcatcgacgtccaccgcatcctcgggaaccgatgggcgcagatcgccaagcacctgcccgggcgcacggataacgaggtcaagaacttctggaactcgtgcatcaagaagaagctcatcgcgcagggcctcgaccccaagacccacaacctcctgccggcctccaggactctcctccacggcaacggggcaaaccctagcagcaacaatcctgcccacttcaactcaaacggctgcgctgctgtcgtctccgtcgccacgacgcccttcaccatcagctccccgaccaaggccgccgcctacggcaccgtcacggccacgccgccgccggagacgatggcgccggcaacgtacgacgtccctaataattaccctgacggcatgctcatgaggcatgatcaggcagccacggcggctgcgattccgggatacccgtaccaccccggaaacggcggcggcgtgctgatgagcttcagggaccagaatgctggtctccagacatctgtggacttcgtgaacggctcctcgtcctcctcctccatggatcacgccgccggcatgcctaacggcaacggctttagccaacaaggcatgggcgcggccttcatggacgtgacggcgggaatgtggagcaccgcagccgtggattctggcatgtgtgcagggatggaagtggctcagccaccgccgccgccgccgcagcagccgctgccaccacaagggctggtgcagggggaggtgctcgtcggccgacaaactgtgatgaacggtggcggtgcagttgctgacaagggcatggacatgatggacgtctcttcagtgtatggcggcgccggtgcaatggcgttcgatctggagctgatggagtcatgcgcgttgttttgcggcagcaccggcaacaccatggagcagctgcaatgggactgctaagctcactatcgtccttacccctaattagtttgttgtcttccatgcttcatccatgtctttatttttcctcttaattttgatgttcgatttactgggttcttgattcagatcgtccttttaaagcaagaaatccatgctgagcttagtgacgaactcgatctaattcagatttcaataaagttatctcaaattttattgattgc

SEQ ID NO: 3004 - DNA, 1293 bp, Zea mays
  Clone ID: TF_ZmC42_29
gcccttctccgccactgccactgaagctatactgtcgcagagagagcgccccaccacccgcggaccagacatctgcgatgaccactctggcgacggacacggcggcgtggacacgggaggaggacaaggcgttcgagaacgcggtggcagcctccgcggcgccgccggccgacgggccgcctgatgatggctggttcacggcgctggtggcgagcgtgccggcgcgaacggcggaggaggtgcggcggcactacgaggcgctggtggaggacgtggccgctatcgaggccggccgcatcccgctcccgcgctacgctggggaggagtcgtccgcggcgacgcccgagggctccggtgccgccggcccctccacgcccaaggacggaggaggagggagcgggcaccgacgcgaagaacggaagggcggcgtcggcgctgacgcggggaagagttgctctaaggccgagcaggagcggcgcaagggcgtgccgtggacggaagaggagcacaggttgttcttgttgggtctggacaagttcggcaagggcgactggcggagcatctcgcgcaacttcgtcatctcgcggacgccgacgcaggtggcgagccacgcgcagaaatacttcatccgcctcaactcgatgaaccgggacaggcgccgctccagcatccacgacatcaccagcgtgaccgccggcgaggtggccacggccggcgcgcccatcacgggcggcggcccgaccgcggcgggggcgatgccgatggggccgggcggcatgaagcaccaccacccggttccgccgatgggcatgtacgggcacgcgcccatgggccacccggtcgccgggcacatggtggcgccggcggccgtcggcacgccggtcatgttcccgccgggccatcactcgccctatgtcctgccggtgggatacccggcgccaccgaccaagatgcaccagtgatcgtctacgaccggcatttgcgcagctgcgcagctgcatccctttgctcgttctttcttgatttcgttgatgatcttgtgtagccaaagctatctatccatcctttcctcatctcccgggtctttgttttttgacgtaacatatagatgacttgagcgagtgcagggcaggcaggcgaataatgagtatcgctacttacaggcttaaggaatgtgtaattagtagcagccttcctgggtgcaaatattcatcatttgtgcaactggggactgacagaatcccatttcccggatgtaaatcgattgtctataatatctcatctgtgcgaaat

SEQ ID NO: 3005 - DNA, 1161 bp, Zea mays
  Clone ID: TF_ZmC603825_1
ccggccggggaccctcgagcaccccccggcccgtcgtctacagtctacagcacacatcgcagcagctcgcgaccatcgtccatccgctcaattgtgatcgatcgagctgcgagcccatcgcctctagctaagctaccatgggtcggcagccgtgctgcgacaaggtggggctgaagaaggggccgtggacggcggaggaggaccagaagctcgtcagcttcatcctcggcaacaggcagtgctgctggcgcgccgtgcccaagcttgccgggctgctgcggtgcgggaagagctgccggctgcgctggaccaactacctgcggccggacctcaagaggggcctgctctccgacgccgaggagaagctcgtcatcgacctgcatgctcagctcggcaacaggtggtcaaagattgcgtcgcacatgccaggacgaacggacaacgagattaagaaccactggaacacccacatcaagaagaagctcaggaagatgggggatcgaccccctcacccacaagcccctcccgccgcctgatccgcatccgccgaaggaccaccagagcccaccgcacaccgccacaggtggctcgccggaagcgccgccatctccgtcgccgaagcctccacaggagaagacggcagtaccggtgatgacgccagctagccagcaagaagcaggtgacgatgacgtgccgctcctcagcaactactacccaggcttctgcaccgacgaggtacccatgatggacccggacgagatcatggtgcctctggacgacgggcggacggcgccgccgacgtcgacgattttctcgaccacgaccacgacgtcctactctgcagcctccgactccgtgtcgtcgtccttgagccgcgacgaggacccgctgttcccgctcatggacttggagttccccgacatcgcgttccagatggggctactagacgacatggtcgcgtcgtgggacgactccttggcgcagcagccgctgtcgccatcccctgtctacgacgacgactatgcaaaccagctgcagatcaggagcggcgttgcgtttgaccaggagccagggaacaagattgtgctcttctctagctattaggcagttaacccctttaataaatgagatatgcacctcctgcaaaaaaaaaaaaaaaaa

SEQ ID NO: 3006 - DNA, 1396 bp, Zea mays
  Clone ID: TF_ZmC10631_1
cgcgcactctcacctgccttccttctgccagctgctgactcatctatcagctcgctcgcacgctgcagaacgaacgaagctgaaggcggcggcggcggctagccatggggagggcgccgtgctgcgacaaggcgagcgtgaagaaagggccgtggtcgcccgaggaggatgccaagctcaaggcctacatcgaggagcatggcaccggcggcaactggatcgcgctgccgcagaagattggggctgaagagatgtggcaaaagctgcaggctgagatggctcaattatctgcgccgaaacattaagcacggtgacttcacagaagaagaggagcatatcatttgcagcctctacattagcattggaagcaggtggtccatcattgcagcgcagttgccggggcgaacggacaacgacatcaagaactactggaacaccaagctgaagaagaagctcctcggcaagcgcgcgccatcccggcgcgcgagggcaaaccaggatccctacctcgctgcgggaggcggcaacagcagcaccagcggtggcaacagcgccgcgacggccacgcaaaccctaagcgcgtcggctctagagcggatccagctccacatgcgcctccaaggcatgtacggcgcgttcggttgcagtggcggcggcggcaacgacgaccgcaacgccgtcgtcggggcggcggcgccgcagtggccaaagcttgaggcgctgctgcaggcgaacaggctgctcccgggatcgctgccgacggacgccatggccacaacagtgagcgtgcaacagcggcaccatcagcatctggtcgaccaccagagcctcgcagtcggcgctggtaacgccgcagcagtcgagggcgagcaacagcagctcagctctgccgatgcggcaaactacatggcgctgccaggagggggctttttcgagcggcccaagctagggttttactctccatccgccgaggctgaagctaccgcggccgccgccagcgtagagatgaactcagtcgccccgatggttggtggcggctacggcggcgccggatttgaacagtatcatcatcacgacgtgctatacgaattcctgtacagcaattacggatcggtgggcgagctggcgcaggacgggcatgtccccacgttgccggagctgcagtgcccgaacggcgctgccgtcgatggagccgatgagaagttctcggtgtggaccgcatccgccgcctgcgattacggcgcggccggcggctatcagattcagctgggaaactccatcggtagcaatctgcacgattacgtgctaggcggctatgatcaatgggagtagggtttcggcgtcatgccgtatttgtgtgtgcaaaattcttaagctcatatatagttcattttcc

SEQ ID NO: 3007 - DNA, 978 bp, Zea mays
  unsure (1)..(978): unsure at all n locations
  Clone ID: TF_ZmC11324_5
gtgcggccacgcgtccgtgcggcaagagctgccgtctccggtgggctaaccacctccgccccaacctccgcaagtncgccttctcccccgaggaggagcgtcagatccttctcctccacggcctcatcggcaacaagtgggcgcgcatctccaagcacctctcagggaggacggacaacgagatcaagaactactggaacacgcgcttcaagcgccggcagcgcgcgggcctgccgccctacccgccggacgtcgagcggcagatcaagctgctgcgcgcgcagaacgtcaacccgttcgcagacgcagacgccgacgccgcccacgccaacgccaacgccaacgccaacgccagcgccggccttccggcgccgccgctcctctacgacgtcggaaacccgttcgcgttgctctccagcataccgtcactgtcgcagacggcctcgcactcgcactcgccactgatcaaccagaactacccgcttctgaaccagatgcaggtgttccaccacctcggcggcagtcagcagccgtcgttccaccaggacggcagcgcggcggctttcggcgacatcgtctcctctcgcctgccgccactgccaaccgccagaacgcaggcggagctacattcgaaccaattcgacacctccagcagcggcgggctgctggatcagtcgatgctgatcggcgacgaacacctgctgcggcccaacccgagtatggtcaaggtctcctccatgcccgcgctctcctaccgtgagccggatgggtccaggatgctgccagcccatggcgccgggagcgacggcgacgtctcctcgctggggcactgccctccgggacaggacctccaccgtggtgcgacatgggacttcaccttcgaataggacgaacacgaacgtgcgtacacgcggcacaaacacgatcatcatcgtctcaccatgtggttgcatgcataaaaaaaccaatgcgttttca

SEQ ID NO: 3008 - DNA, 1307 bp, Zea mays
  Clone ID: TF_ZmC13187_1
tattgtgagcccctcgagggccgggaactaagcgtccggacaaagtggcgtactcttctctgtactagctttcttcttcctcctcctcttcctcctcccaaacagactggatttcatcaagataatcctgaaactggagccaacaagcagacagagaaagaagagcaagaagaccggctcccagccgatacaaggtaggagtgagcagcgttagatcagttttcatcacaggatcgatatggtgacagtgagagaggagactcgcaaggggccatggacagagcaggaggacctgcaactggtatgcactgtccgtctgttcggtgaacgtcgttgggatttcattgccaaagtatcagggctcaaccggacaggcaagagctgccggctgcgctgggtcaactacctccaccctggcctcaagcgtgggcgcatgtctccccatgaagagcgactcatcctagagctgcacgctcggtggggaaacaggtggtccaggatagcacgccgcttgccagggcgcactgacaatgagatcaagaactactggaggacacacatgagaaagaaggcacaggagaggaagaggaacatgtctccatcgtcgtcctcgtcttcgctgacttaccagtcaggctacccagatactccatcaaccattggagttgagggacaggagcttcatggtggcagtggctgcatcacaagcatcctgaagggcacccctccggacatggatggctatcccatggaccagatatggatggaaattgaggcgccacagatgccctcggaggagagctttgttggggggaaccataatgtgtgcagcagccttgccaccccgctgccaccaccaactgtctgggaatactacccagatgcctgctggaaggttgacgatgagatcaagatggcaccacaatttcaatttggttatagtgaaggagttgggccctgcttctgatgccataaatattgggtcagattactaagttatacacctacctagcagaagtgaagtgcttttgtagaaacaagctttagcatggatctgaatatttatctccgcgcttagaattgcaggtctatggatctatgcatggttgctatgtatctatctagtgtgcaagacaagatcatcttaatttgtccttgatgctatggaatacaagggcaaaggtactatgtctgtttactcagaataattagctaccctttgggactctctgttgggcatgaagccaacaataaatgttatattgatataaaaaaaaaaaaaaaaaaaaaaaaaaaaaaaagcggcc

SEQ ID NO: 3009 - DNA, 2238 bp, Zea mays
  Clone ID: TF_ZmC2063_1
ccgccctagagccataataattcgttgaagaggagggggttcttagaaccagagggcggctacctgtgaaggatacccgtgctgctggctgctgctgcttgtcccctcgaggcggccgggaaaacccactctcgattggttatctcgaggccggccgggaccgttctcttctccctaatcctggtaatcagtagtagccactagcgctgctgccgttctcttcccctacccgacacaagctccaccacctctatctaccacacgccaccactgtaggagctcctccacgatcatcccgccctagagccataataattcgttgaagaggagggggttcttagaaccagagggcggctacctgtgaaggatacccgtgctgctggctgctgctgttcctcaagctagagccgtgtgtgggctgtgcagattgcagagcgcagcttccagtctcagcattgctttcaatggggaggcactcctgctgttacaagcagaagctgaggaaggggctctggtctcctgaggaagatgagaagctcatgaaccacataaccaagcacgggcatggctgctggagcactgtccccaagcttgcagggcttcagaggtgtggcaagagctgcaggctgaggtggataaattacctgaggcctgaccttaaaagaggcgcattctctgaggaggaggaagacctcatcgtcgaacttcatgctgtactggggaacaggtggtctcagattgcaacaaggttgcctggaagaactgacaacgagatcaagaatctctggaactcgagcatcaagaagaagctccggcagaaaggcattgaccccaacacccacaagccgctccttgtcgaggttgaacgcagcaaagcagctccaacgaccagtaccgagagaacctctgagtccaatgatgttgacccttcaagtggcgccgcacttggcaactcgagccatcttcttctcagcgagacagcacaatcaccacagctgccagcgctcggtaagcatcgcagagaaactactagcctggcacatctaagggtgccgcccaaggagttgttccttgaccagctggcttctggtcatgagaacctcactggctgccgcacagcaggcccagttccaaatttccctttccaacagctgatgtgctacaacaatgaatttggcaacaagaatggtgctagtaacaattcactctggtttaaccacaatgagacaagtggcagcaccatttccactgtgatgccaccagtttcgccatcaactctctcaacatcaacagggctcaataggtcaccagacaacccacactcgggaggcactgccattcagagcacccagttctactgggacactgctaatcctagcagctgcagcagtagaggaagcagcggaagcaacggcttgggatttgagctgcaaagcacaagctcgcttctggagagtagtgttttcccatggacagaattaacaccagataaaaatagccaagttcaccttggggaagaactcaagtggcccgacttgctccacggaacattcacagacacacctgcaaccatgcagaatcttagccagtcactgtacgaagatgttatcaaagccgagagccaattcaacatagagggcctctgtgcagcctggtctcaaaatctgcagccacagcaacatctgcaggtatcagatttgtatgacaaggatttgcaaaggatgtccttgtcttttgagaatatctagacagcatgtttcagcatgcagggaacagagaaatagcagaaagctgagtcaatgaagccttaaaaaatacaatatttcttcacagattcatttgaaggctatgtggaggtgtgttttacgtaggtacattcttatgatgaaacagagatcaatactgataactgttcaccagtgtaaatgaaaaaagggaaaaaatgaatctatattacagcataatgtatagactagagaaagtacatcctaggagtttacctcctttcatttaaaagttgctgtctttatctgtacatgcatgtagctcggctttttttgtataagtgagtcatggttgatctttctctacaaaataaatgaggcaagaatgtgaaatactgcacttgtcagtaaaaaaaaaaaaaaaaaagaaaaaaaaaaaaaaaaaagcggcccaaaaaaaaaaaaaaaaaaaaaaaaaaaaaaaaaaaaaaaaaaaaactcgagggggggcccg

SEQ ID NO: 3010 - DNA, 701 bp, Zea mays
  Clone ID: TF_ZmC521637_1
ggtacccctccgccctcggggccgggccgggaccccaacaaccattattcagatttcataataccatatatcgtagtacccaacccccatggatcctaattatggagagtggaatttctctgagatcaagatagcgaaagctctcattgctagccacaatgccaagagtagctattctagtgacatgaacaataagcaaactgacattatagacatgctccaagcaaggtttcccacaaaagagaagcataaggtaaccaaactgtatgttgatctcatgttggagaagatgcagatgatattgagtggcaaccaacatgcaacaatgggtaagaagcttgtgaatgacaagtttgggatgtcgatagaggatccagccatagatttcatgggtggtgatttagtggagaaaaggacggccaaaaggaaggcaagggaggatatgaatacccacctagattctcagaaggagaggcggtaccgaaggttttggaccatagacgaacacaggaatttcctctatggtttgcgtgcatatggtcgaagcgactggaagaacatctcaaagcactttgttaccactaggacgccaatgcaaatctctagccatgcccaaaagtatttgcataggatggttttttttgctaggaggcagcggagcagcataaatgacattggtccttcacgatgatgaacccagg

SEQ ID NO: 3011 - DNA, 1718 bp, Zea mays
  unsure (1)..(1718): unsure at all n locations
  Clone ID: TF_ZmC337_3
aattcggcacgaggaactacggccacaactccaggacctgcggactaggactaggactaggacacagagaaataatgctctgcgaaggtggcgacgacaataatggccgcagcggcctaaggctcttcggagtgcaggtccgtatcggcggcggcggtggcgcagggtcggcgtccatgaagaagagctacagcatggactgcctgcagctcgcggctcctcatgcttgttcgtccctcgtctcgtccccgtcgtcgtcgtcgttgtgctcgtcctcgtccccgtcgtcgctgctgctgtcgattgatgatgggttgcagagaggggcggccgatggatacctgtctgatggacctcatggcagagctgtgcaggagaggaagaaaggtacgtcaagaaatttttttcccttcctgatgaaaagacaaaagaggaagatttgttctttggaaattcagaaacttcaccttacacgaatttcttttcttattggtaatacgtactgtccatcagtcgtctgacctaaaaaaaaagttgcattatgctctacttttttttggcctaaaaaaagagagtaatatagctntatcttccactgatgctgcaacccttcaactgcaagtaacaatgaagcagctgagactgagagatactagtgcttccctgcacattattgagtccttgttgggttggtcggtagcagctgatgtttctaaacaaaaacaatactctggatatataccgacgacgccaggagttccatggagcgaggaggagcacaggcagttccttgccggcctggacaagctgggcaagggcgactggcgaggcatcgccaggagctacgtgccgacgaggaccccgacgcaggtcgccagccacgcgcagaagttcttcctccggcagagcagcatggggaagaagaagcgccggtccagcctcttcgacatggtatgcgcatgcaggcaccaacatctctctcttttttttctgtacgtaattgcttgagttttgataaccgggtccagcggcaggtgccgatctgcgagaacagtgcgagcatctccgatccgctggacgtggcacgccatggcgtcgcctcggcagactccgagagggcggccgtggacgtggacctgatgaattcgacgacggagggtgacgacggcaggagcagggacgtcgtgtcgtcggcgtcaggtgcagggaccgcactgcggttcccggcagcggcagctcagacggagccgctgcatccttcgtcatcgcatggccatgggcgcggccaccactgctctccgttggacctggagctgggcatgtccctgcccgccccatccgtcggaacgtgatggagatgaggcgaggccgaggccgtgcgtgactgctgtctccctcagctgtgtgtgtcagccagatggagatgatgcgctagccaatacagtactgttcgtgatcgtgaaaacggtgtgcaaacactagcacagcggcactaaactaggatgtcgctcctcgcaccatattgtgtactgtaaccacgttgatccacatcatctctatctcttcaccaccgttggatcataggctgtcagtttcatctatccgtccatgtgtcatactcattcacgatgcggtggcttaatgatccagcagtaatttttcttctttcgtgacttaagggtatatacggtggtatttaatgtagaggcttttgatgt

SEQ ID NO: 3012 - DNA, 795 bp, Zea mays
  Clone ID: TF_ZmC337_4
gggtacctcgaggccggccgggactgtggtactacggccacactccaggacctgcggactaggactaggactaggacacagagaaataatgctctgcgaaggtggcgacgacaataatggccgcagcggcctaaggctcttcggagtgcaggtccgtatcggcggcggcggtggcgcagggtcggcgtccatgaagaagagctacagcatggactgcctgcagctcgcggctcctcatgcttgttcgtccctcgtctcgtccccgtcgtcgtcgtcgttgtgctcgtcctcgtccccgtcgtcgctgctgctgtcgattgatgatgggttgcagagaggggcggccgatggatacctgtctgatggacctcatggcagagctgtgcaggagaggaagaaaggagttccatggagcgaggaggagcacaggcagttccttgccggcctggacaagctgggcaagggcgactggcgaggcatcgccaggagctacgtgccgacgaggaccccgacgcaggtcgccagccacgcgcagaagttcttcctccggcagagcagcatggggaagaagaagcgccggtccagcctcttcgacatggtgccgatctgcgagaacagtgcgagcatctccgatccgctggacgtggcacgccatggcgtcgcctcggcagactccgagagggcggccgtggacgtggacctgatgaattcgatgacggagggtgacgacggcaggagcagggacgtcgtgtcgtcggggtcaggtgcagggaccgcactgcggttccccgcagc

SEQ ID NO: 3013 - DNA, 2304 bp, Zea mays
  unsure (1)..(2304): unsure at all n locations
  Clone ID: TF_ZmC1108_1
naccgctggccggctcacagtaccagaggagtccaccggaggagctcagctagactcccaccctggtggctcgatcggcaccggccgctgcctgcgagactccgccagcgcgcgatgtaccgggtgaagagcgagggggagggcgagggcgagggcgactgcgaaatgatgctgcaggaacagatggactcgctggtggccgacgacgtcagcagcggaggagggtcgcctcacaggggcgtcggcacgcccctgaagaaggggccatggacgtccgcggaggacgccatcctggtggactacgttaagaagaacggcgagggcaactggaacgcggtgcagaagaacaccgggctgttccgctgcggcaagagctgccgcctccggtgggcgaaccacctcaggcccaacctcaagaagggggccttcacccccgaggaggagcgcctcatcatccagctccacgccaagatggggaacaagtgggcgaggatggctggtcacttgccagggcgtactgacaatgagatcaagaactactggaacactcgaataaagagatgtcaacgagctagccttcctatttatcctgctagtgtatgcaatcaatctacaaatgaagatcagcaactgtctggtaattttaacggtggcgagaatatatccaatgatcttctatctgggaacagcctttatctgccagattttaccagtgacaatttcattgcgaacccagaggctttatcctatgcaccacagttgtcagctgtttcaataagcaatttgctcggccaaagctttgcatcaaaaagttgtagcttcatggatcaggttgaccaagcggggatgctgaaacaatctggctgtgtgcttcctgcattgagcgatgccattgacagtgtgctttcctcagctgatcatttttcaaatgactctgagaagctcaggcaggctttaggttttgattatctgaatgaagccaatgctagcagcaagagtattgcacctttcggggttgcacttactggcagccatgcctttttaaatggcaatttctctgcttctaggcccacaaatggtcctttgaagatggagctcccttcactccaagatactgaatctgatccaaatagctggctcaagtatactgtggctcctgcaatgcagcctactgaattagtagatccttacctgcagtctccatcagcgaccccttcagtgaaatctgagtgtgcatcgccgaggaacagtggtcttttggaagagctgcttcatgaagctcaggcactaagatctgggaagaaccaacaatcatcggtccgaagttcaagttcttctgctggcacaccttatgagactaccacggtggttagcccagagtttgatatgggtcaggaatattgggaagaacagcccagttctttcctcagtgaatatgctcattttagtggaaattctttcactgaatccactcctcctgttagtgctgcgtcacctgatatcttccagctctccaagatttctcctgcacaaagcccttcaatgggctctggcgagcaggcgttagagcctaaacatgagtcggcagcttcacctcgtcctgaaaacttgaggcctgatgcattattctctgggaacacagccgatccatccattttcaataatgccatagccatgctcctgggcaatggcattgatgccgagtacaaacctgttcttggtgatggaattgtgctcgattcttcgtcatggaacaacatgcaacatgcttttcagatggcgggattcaaatgagttccatgcacttgtttgtgatgctgaagggcttcttgttgcttgttttggggtcagtatcagcgaaggccgcattgattgtgacgctgcattcctgacagagggcgtgcaggtgcagcagctaccatatgtgatcttcatgctaatagtccttttgtctaataaagtgcatgaagataaaccggatatttttttttttgctttgtattagagaaccgtttttgtcaaccctgtcaggattctgttggaaatgtgtcatgatttttgtttgaacaatttaatatctgtcattgatactgtgctgtgtgccaaaaagctggctcaagtatactgtggctcctgcaatgcagcctactgaattagtagatccttacctgcagtctccatcagcgaccccttcagtgaaatctgagtgtgcatcgccgaggaacagtggtcttttggaagagctgcttcatgaagctcaggcactaagatctgggaagaaccaacaatatgaaatctcgtgac

SEQ ID NO: 3014 - DNA, 1176 bp, Zea mays
  Clone ID: TF_ZmC1108_2
tagcgagggggagggcgagggcgagggcgactgcgaaatgatgctgcaggaacagatggactcgctggtggccgacgacgtcagcagcggaggagggtcgcctgaagaaggggccatggacgtccgcggaggacgccatcctggtggactacgttaagaagaacggcgagggcaactggaacgcggtgcagaagaacaccgggctgttccgctgcggcaagagctgccgcctccggtgggcgaaccacctcaggcccaacctcaagaagggggccttcacccccgaggaggagcgcctcatcatccagctccacgccaagatggggaacaagtgggcgaggatggctggtcacttgccagggcgtactgacaatgagatcaagaactactggaacactcgaataaagagatgtcaacgagctagccttcctatttatcctgctagtgtatgcaatcaatctacaaatgaagatcagcaactgtctggtaattttaacggtggcgagaatatatccaatgatcttctatctgggaacagcctttatctgccagattttaccagtgacaatttcattgcgaacccagaggctttatcctatgcaccacagttgtcagctgtttcaataagcaatttgctcggccaaagctttgcatcaaaaagttgtagcttcatggatcaggttgaccaagcggggatgctgaaacaatctggctgtgtgcttcctgcattgagcgatgccattgacagtgtgctttcctcagctgatcatttttcaaatgactctgagaagctcaggcaggctttaggttttgattatctgaatgaagccaatgctagcagcaagagtattgcacctttcggggttgcacttactggcagccatgcctttttaaatggcaatttctctgcttctaggcccacaaatggtcctttgaagatggagctcccttcactccaagatactgaatctgatccaaatagctggctcaagtatactgtggctcctgcaatgcagcctactgaattagtagatccttacctgcagtctccatcagcgaccccttcagtgaaatctgagtgtgcatcgccgaggaacagtggtcttttggaagagctgcttcatgaagctcaggcactaagatctgggaagaaccaacaatatgaaatctcgtgac

SEQ ID NO: 3015 - DNA, 1159 bp, Zea mays
  Clone ID: TF_ZmC27160_1
gaccaccatcaccatggggaggactccgtgctgcgacagcaagggcatcaagaaggggccatgggcgccggaggaggacaagctgctcgtcgactacgtccaggccaacggacccggcaactggcgcattctccccaagctcgcggggctgaaccggtgcggcaagagctgccggctgcggtggaccaactacctgcgcccggacatcaagcgcgggcccttcacccccgaggagcacaattccatccttcagctccacgccgtagtcggcaacaagtggtccatgatcgcggcacagatgccgggccggacggacaacgagatcaagaactactggaacacgcacatgaagaagcctcctgccccgccgcccgccacacggcccagtgggagaccgccaggctcgaggccgaggcgcgcctctccctgctctcgtcctcggccgccacgacggtcacctccgccaccgcctcctcctcgtcgtccaccgtcgccgccgagcatgcggcgccacccgacatcttcctgcgcctctggaactccgaggtcggggattctttccgcggcgcagccgcgcagcaggggcacggtccggaggcgagcgcggcgggcgctggcgtgccggcgctgctgcctgagctcggcggtggcggtgacgattcctcggccgcgtcgacctacgaggctgaggccgcggcggacgacggctaccaggcgttcctggacctggcgatggaggagttcgcgctgctgcacggccggctcggcgcgttctcggcgttcccgcaggccgacgtgttcgctgaggcgcactgctgccttttcgctccgtttgaggagtagctttgctcgatctcattgccagtcatcagacatcagagtagtagactagacgtacgtacgtgaccacgtgcatgtaccctgcatgcgtccgtctgcgtacgcgtacgtacatacatacgtacacatgccgcttgtcttggggacgatggcgtatgtacgtgcctgtacgcaacgagcggatgggtggcgcgtgtgacagttcgttattagtctgtgccctagagcaagaggtttttgcgactgctccaaactagccttggcattgctctggtgaacgatgtcaactttcaagtattctgcctctgcgtgtttgtgt

SEQ ID NO: 3016 - DNA, 1649 bp, Zea mays
  unsure (1)..(1649): unsure at all n locations
  Clone ID: TF_ZmC62316_1
gggtacctcgaggccggccgggagaccccaccccagtgcaaatctgcccctacgtgaaacgttcccctcctctcctcgccctccttgcgcaggttgaggcccgaggtgtagtgcaaggtggcgacctctcggcggcttgggtcggattggtttcggaaagtttggtctccagtgacccgagcactggagatgccctgtttggagcaaattccgatggcgaccggcgagaccgccgtggatcgtcgcgaggaccaccgcgacatggatttgtcaggggaggagcacgtgcggcccaaggcgcggaagccgtacacgatcacgaagcggcgggagaggtggacggaggacgagcacggtcagttcctcgaggccctgcagctgcacggtcgcgcctggcgccgcatacaagtgcacatcggcaccaagactgccgtgcaaatccggagccacgcgcagaagttcttcaccaaggtggtccgagaatcgtcgccaggaagcaacgcctccgcgggcgccgcgccggcgatccagatccccccgccgcgccccaagaggaagccggcgcacccttacccgcgcaaagcggacggcgcggccaagaagcccgcgccggagctcaagcggctggagaagacgtccctgcgcgaccgggtccgggacgaagggtcgccgacgtcggtgcttgcctcggcgcgcacggcgtcacgagcggaggtgtcgggcagcctggtcgcgaacagctcgagcgccagcaggtcgccagccctgtctgacgccggttccgacgagcgtggcgacggcggcggctcgctggcctcctcggtggaccgtgaggacggctgcgcgtcgccaaggacgagagcgccatgtaccaaggtgctctgtcatgcacacgaagtgtcgcgtctaggatcgggagctccagtcgtgaagctgttcggaaacaaggtcgtcgtggtgaaagtgaaagacctggaaacggacactccgcctgcgagcgttgccgaggcagccagaaacgggagccctcctaacggtgccgcaggagcgagctcgtggaaaccgtggccggagctcacgtgcctcgttccccggcgggacggcttcgcggcgcaacccgtcgtgagcccgccgtgcgcggtgttctactacccgcaagcttcggcggcttcggctcaggagcaccagcaagcttcagagccgctggatcacagacgcgcgcagagggaagggtcgtcgccgacaggttcgagcgtggcctccagcgccgccgcggagtcccgccacggtcccgtgcaagagaacgccagcgacggctacgcggcgctacgggccgcaatcccgaggccgaccaagcgcgtgagctcggcttccttcggcgggagagggttcgtgccgtacaagcggtgcgcggccgagagcgaggcggcgcggccggtggcactggcactggcacccggagaggaggccgacggcgacctgacgaggctgtgcttgtgacaagagctgaaggctgcaatgcacatgctctctgctgaaacaggtggcaagagctttgtcgggtgggtcgggcacgacactggaaccaccatctaaaggtttgtttgacaaagcgttcctctggacaannnnnnnnnnnnnnnnnnnnn

SEQ ID NO: 3017 - DNA, 1743 bp, Zea mays
  Clone ID: TF_ZmC2044_1
gtgagagaggccgtggaaaggaatctttcagctcacacctccctatccctccttcccttctcctcctactgctactgctcgccaggtcccctcgctcgctcgctcgtcgtcttcaacctcacacaattatttgtgctcccgctccttccgtccgtccttcctccccccttcccctctccctcttccaaccgccgctcctgctgccttgcctctcagcccagggacgccaaggtctctgccaggatggtgtaggccgtgcctctcgcgcattatgaggtgtggtggtgagggatgggcgatggcctttgcagatgaaggagcgacagcgctggcggcctgaggaagacgccgtcctgcgcgcctacgtccggcagtacggcccccgcgagtggcacctggtgtcgcagcgcatgaacgtggccctcgaccgcgacgccaagtcgtgcctggagcgctggaagaactacctccgccccgggatcaagaagggctcgctcaccgaggaggagcagcgcctggtgatccgcctgcaggccaagcacggcaacaagtggaagaagatcgccgccgaggtgcccgggcgcacggccaagcgcctcggcaagtggtgggaggtgttcaaggagaagcagcagcgggagctgagggacagccgccgcccgccgccggagcctagccccgacgagcggggcaggtacgagtggctgctcgagaacttcgcggagaagctcgtcggagagaggccacagcaggctgccgctgcgccgtcgccgctgctcatggccgcgcccgtgctgccgccctggctgtcgtccaacgccgggccggccgtcgccgccgccgccgtcgcgcacccgccgcccagaccgccgtcgccgtccgtgacgctcagcctcgcgtccgccgcggtggcgccgggcccgcccgcgcccgcgccatggatgccggagcgcgccgcggccgacgcggcgccgtacgggttcccgagcccgcctcagcacggcggcgccgcgcccccgggcatgacggtcgtggacgggcaggcgctggcggagctcgccgagtgctgccgcgagctggaggaggggcggcgcgcgtgggcgacgcaccggcgggaggcggcgtggcggctgaagcgcgtggagcagcagctggagatggagcgcgagatgcggcggcgcgaggtgtgggaggagttcgaggccaagatgcgcaccatgcggctggagcaggcggccgccgcggagcgcgtggagcgggaccaccgggagaaggttgccgagctccgccgcgacgcgcaggtcaaggaggagaagatggccgagcagtgggccgccaagcacgcgcgcgtcgccaagttcgtcgagcagatgggggcgtgctcccgttcatggtcctctgccaccgacatgaactgttgaactggacaaacgagccgctgaccacaccgtcgctagctatcgcgtgctacgtgctccggttcacggctttcttgcattctgggacgcgacttgtaaacgccatggattttcttgctcacgttcacttccgctttctttctttctttttttcttttctttttatttacaactgttgttacggtcggttcagtgcttctctctctatctactagtagttgatcagagtcaagaaatgtaatgctgccgttactgtcgtagtttcatcctctctaaacatgcgttctgtctgtttttgatcatgccaagcaaaaaaaaaaatcaa

SEQ ID NO: 3018 - DNA, 1585 bp, Zea mays
  unsure (1)..(1585): unsure at all n locations
  Clone ID: TF_ZmC152_3
ngttgaatctggatccctcctccacctccacgcgagcggacgacacgaagcggccatagccgcacgttgggatcccctccgctacgcctcttgatggtctccgccagcgcgccgccgccgcaggcccagtccgacgcggccgggtcgggggaggaagtgagcaagaaggtgcggaagccgtacacaatcaccaagtcccgggagagctggacggagcaggagcacgacaagttcctcgaggccctgcagctctttgatcgtgactggaagaagatagaggcttttgttggctccaagactgtcatccagattaggagccatgcacagaagtaccttttgaaggttcagaaaaatggaaccagcgaacatgtcccacctccacgaccaaagcgaaaagctgcccatccatatcctcagaaggcttccaagaatgattcatcttccatccataggaactctggcatgaacgtgcctgtttcttcatgggctcatagttccatcccacaagctgttgcttcatcaatggtgaaagaagatttaggtgctggaacaccaggttcaaacaatttttgctcaagtagtactgaaggccttccaagaacttggcaacctggtgaaacaaatgatccaataaatcaaattccgtcactccgccgtctgtacctcatgatatttctgatatcatcttgtagtgcaaaatacttactccgattctgtccatctctactatttatgccagattttgcgggagtgtacagcttcttaggtagtgttttcgatccaagtcggggtacaagtggtcatctgcagaaacttaaggagatgaatccaattgacgttgagacggcactgttgttgatgaggaatctctccatcaatttaaccagtcctgattttgaagatcaagtcttgccaattcgtgatgccagtactcagcagagcaggcctgaagtccgaaccactatcttatagcatagactcttatctcctgacacccacaaagggatgaaagtgaggaagttgttgtccttatacagcgcttctgatggacctgggctagggagctcaagaagttcagctctagcgacgagcgcgcctttcatgtaaggaagcgtgcacccttcctggcctttcctatccccaagctcggccatctaggctcgtgaaatgctgcttcagatcaaggctgtccttggaaatgggaagatgaaaggagaatctgggtaatgccggttgctccctttcccattctttgttgagttcagctttctgattggtttctggtggccctcttgatacggaacttgtgcgctccgtctgagaaagcatgtgtgcaaagtttcatttgaggagttgaggcgatcatggcgctgtaaaatgcggcttatcttcccccttcaggggctggtttggtggaccaaccctcaaacatttgcaattcctatgtacgtctgtagtgcatcaggtgttgttgcccacgtgtaaaaggaaaataaattcacaatgtanagggagacttgtgcgttagcactaccatttgaatttatngaatgtcnaagcagccccagcgagtttgtacttgcng

SEQ ID NO: 3019 - DNA, 1481 bp, Zea mays
  Clone ID: TF_ZmC152_5
cattgggtacctcgaggccggccgggctccacgcgagcggacgacacgaagcggccatagccgcacgttgggatcccctccgctacgcctcttgatggtctccgccagcgcgccgccgccgcaggcccagtccgacgcggccgggtcgggggaggaagtgagcaagaaggtgcggaagccgtacacaatcaccaagtcccgggagagctggacggagcaggagcacgacaagttcctcgaggccctgcagctctttgatcgtgactggaagaagatagaggcttttgttggctccaagactgtcatccagattaggagccatgcacagaagtaccttttgaaggttcagaaaaatggaaccagcgaacatgtcccacctccacgaccaaagcgaaaagctgcccatccatatcctcagaaggcttccaagaatggaactctggcatgaacgtgcctgtttcttcatgggctcatagttccatcccacaagctgttgcttcatcaatggtgaaagaagatttaggtgctggaacaccaggttcaaacaatttttgctcaagtagtactgaaggccttccaagaacttggcaacctggtgaaacaaatgatccaataaatcaaattccgtcactccgccgtctgtacctcatgatatttctgataatcatcttgtagtgcaaaatacttactccgattctgtccatctctactatttctaagaattatgtcttaaccatcctcctgtgcatcttttcttgtgaatttgtaagcttcaatctcaaatccgctggccccttcttttagaatgaaccgaacctccaatattctcttgatgatgcttaacatacagagaaacggtgtaacacaaaacagcacaatccatttctttgtactgtttctttttcaaatattttactgttttcaatattgaatctatgtcttgaatgaattgctagcttatctaattcatatttacattcttgacatttcaattatgtctttccaatgtttgatatagttatgccagattttgcgggagtgtacagcttcttaggtagtgttttcgatccaagtacaagtggtcatctgcagaaacttaaggagatgaatccaattgacgttgagacggcactgttgttgatgaggaatctctccatcaatttaaccagtcctgattttgaagatcaagtgtctggtactctggttcatgtttcagtgttttgctgtttgcatcatttctctatgaggaagttgttgtccttatacagcgcttctgatggacctttagggagctcaagaagttcagctctagcgacgagcgcgcctttcatgtaaggtctctcggcatataatttcagttcgacagacctcagaggtgcctgccctgttcaccgatggatgaaagtttgcttttcttctcgctagcagttcaaacatgtcttcagattatgcctctactaaatcgtttgccactaattgac

SEQ ID NO: 3020 - DNA, 1356 bp, Zea mays
  Clone ID: TF_ZmC152_7
ctcgaggccggccgggacctccttccgagcggacgacacgaagcggccatattcgcacgttgggatcccctccgctacgcctcttgatggtctccgccagcgcgccgccgccgcaggcccagtccgacgcggccgggtcgggggaggaagcgagcaagaaggtgcggaagccgtacacaatcaccaagtcccgggagagctggacggagcaggagcacgacaagttcctcgaggccctgcagctctttgatcgtgactggaagaagatagaggcttttgttggctccaagactgtcatccagattaggagccatgcacagaagtaccttttgaaggttcagaaaaatggaaccagcgaacatgtcccacctccacgaccaaagcgaaaagctgcccatccatatcctcagaaggcttccaagaatgattcatcttccatccataggaactctggcatgaacgtgcctgtttcttcatgggctcatagttccatcccacaagctgttgcttcatcaatggtgaaagaagatttaggtgctggaacaccaggttcaaacaatttttgctcaagtagtactgaaggccttccaagaacttggcaacctggtgaaacaaatgatccaataaatcaaattccgtcactccgccgtctgtacctcatgatatttctgataatcatcttgtagtgcaaaatacttactccgattctgtccatctctactatttctaagaattatgtcttaaccatcctcctgtgcatcttttcttgtgaatttgtaagcttcaatctcaaatccgctggccccttcttttagaatgaaccgaacctccaatattctcttgatgatgcttaacatacagagaaacggtgtaacacaaaacagcacaatccatttctttgtactgtttctttttcaaatattttactgttttcaatattgaatctatgtcttgaatgaattgctagcttatctaattcatatttacattcttgacatttcaattatgtctttccaatgtttgatatagttatgccagattttgcgggagtgtacagcttcttaggtagtgttttcgatccaagtacaagtggtcatctgcagaaacttaaggagatgaatccaattgacgttgagacggcactgttgttgatgaggaatctctccatcaatttaaccagtcctgattttgaagatcaagtcttgccaattcgtgatgccagccctcaccagagcaggcctgaagtccgaaccactatcttatagcatagactcttatctcctgacacccacaaagggatgaaagtggtaatccgaactgttagaacaaatttaatattttaaaatagatatgcat

SEQ ID NO: 3021 - DNA, 891 bp, Zea mays
  Clone ID: TF_ZmC182615_1
gacacacggcgtcgcatttggaacgctcctgctcgtcgcacgtacgaagcccacgcgtccgcgcacgtgccagagccgagcccccgcgccggcgccccgccggagaggatgacgcggcggtgctcgcactgcagcaacaacggccacaactcgcgtacctgccccgtccgctccgccggcggcggcagcggcggcggcggggtgaggctgttcggcgtgcggctcacgacggcgccggcgccggcggtgatgaagaagagcgccagcatgagctgcattgtgtcctcgctcggcggcggcttcggcggctcgtcgccgccggtggaaggagtgggtgctggcagaggaggggaagacagtgggaccggctacgtgtccgatgatcccgcgcacgcatcctgctcgacgaatggccgcgccgagcgcaagaaaggtacaccttggactgaagaagagcatagaatgtttctgatgggtctgcagaagcttggtaagggagactggcgcgggatatccagaaactttgttgtttccaggaccccgactcaagttgcaagccatgctcaaaagtactttgttagacagacaaactcatcgagacggaagaggcggtcaagcttatttgatatggtcccagaaatgccaatggatgagtccccagctgctgtggaacaatttactctccaaaatactcaagatgaggatacaagttcaaatcacgtgccaaccttacatcttggacaacggaaggaaacagagtttgctaagcagctacaaacttttcagccagggcaccatgagaaatctgaatacgcagaaccttcattgctgctaccaaatttggagatgaaccccaatgtaccattcaagaccataactgatccaacaaga

SEQ ID NO: 3022 - DNA, 688 bp, Zea mays
  Clone ID: TF_ZmC8091_3
ccattgggtccctcgaggccggccgggtcctcctcatctcactcactcccttttcctcacgccccctccccgcctcgagcccctcgctggctcgctcccattcccatctcgcactaccaaccttccggatccagtgccgcacgcctcactccccgtccccgacacccatgacacgcaagaggcggaagcacgccgccgccgccgccgccgcctagggttccgatcccttcctcatggattcgctgccgcggaagcgcaagggcgcgcgcgccgcgtgctccctggccggatcccgccacgatgcgcctgccgcccgcaagcgcacctgccgcgagcccaagccgcggcccgagaagaagaagccctcttccgccgatgagggctccgcctccgtccgcggcggcgtggttatgacggcgccacaccatcctccgcgcgcacgccaggttcggcaacaagtgggccaccatcgcgcgcctcctctccggccgcaccgacaacgccatcaagaaccactggaactccacgctaaagcgcaaactacgccgccagcgacgctgttgctgacgctgacgacgagcgccctggaagcggaggaggagcgaggctcacccagctcgtgaaatcactaatctcttcgtagttcggcccagtgctgacgatcatgacggagacaacagccaacgag

SEQ ID NO: 3023 - DNA, 3091 bp, Zea mays
  Clone ID: TF_ZmC11894_1
cctcgaggccggccggggggcctagttgggtccgatgggaagcgatgggagacacggccctcccacaatccggtccaacaccaacacacgctgccatgccatgaaatatccccgcagttaaacagctcagttcagctgatacctcgccggcagatccccctcctgctcatccgccttcctttctcgaagcgcccaatttattaccttcccctaatcccgcagccttgccagaagccaaattggtgctcctcttatctcgccgcgccgccaccgctccatttccgctcccccagcccccccaaaagaacctcgtaaccctactcgcgggattccgcaggccgccgcttgcttagggttcatcactcctgttcacacccgatggccgtggacgaggcgagcagcagtggcggtggggaggaggggtgcggatcgtggaacccaccagcaggaaaaggcgttcgagaacgcggaggcgacgatgggcggggaggaggacggggacgccggccgggtgtatcgtagtggacttagactgctcttggtgagatcttgaggtcgattcctcgaatcgcattgaatttactgcgtttttttaaaaaaaaaaaaaaaaaaaaaaaaaaaaaaaaaaaaaaaaaaaaaaaaaaaaaaaaaaccgtccgatctctcctttccttttgcgattgggtctgtccctcccggccgcgacaaccctttcccttctctgcttgcttgctgctgcagtgctgcctccccctcgcccagcagcagggagcagccatgccaggggaccacggctccaagggcgacatctccttcgccggacgcttcacggccagcgccatcgcagcatgcttcgcagagatatgtaccatcccgctcgacacggccaaggtcaggctccagctgcagaagaacgtcgtcgccgccgccgcctccggggacgccgcgccagcgcttcccaagtaccgcggcctgctcggaactgccgccaccatcgctagggaggaaggggccgcagcgctctggaagggcatcgtcccgggcctccaccgacagtgcatctacggggggctccgcattggcctctacgagcctgtcaaatccttctacgtcggcaaagaccacgttggggatgtccctttgtccaagaagatagccgccggcttcacaactggtgccatcgctatcagcatcgccaaccctactgaccttgtcaaggtcaggctccaggccgagggcaagcttgcgcctggtgtgccacgccgctacactggcgcaatggatgcttattccaagattgctagacaggaaggggttgccgctctgtggactggccttggaccaaatgtagcgcggaatgctatcatcaatgctgctgagttggccagttatgatcaagtcaagcagtcaattttgaaactccctgggttcaaagatgatgtggtcacccacctttttgctggtcttggtgctggcttctttgctgtttgtgttggttccccagttgatgtggttaagtcgagaatgatgggtgactcagcctacaaaagcactctcgattgttttgtgaagacgctaaagaatgatggccctttggcattttacaaaggcttcctgccaaactttgcaagactgggatcttggaatgtgattatgttcttgacattggagcaggttcaaaagctgtttgtgaggaaagcgacaagctgaagatagagtttttgcagtcaggtggcgtacaattgacgcacagggtttttcttctatagacaaaaggggagaaatgacacctcccccctcgagaattggggaacaaggacagatctgacacctcaattgcgagaaataaaaataacagccgacagttgcatgatccctgaacgaataaattcagaactagaaaacagatgtcagtaaacaacatgtggtgaatgttggaacttgaactgctctagttcagtgggcatctgttgttgcatgcttgggatggatttaatgtttcgttttttttcttccttgtactgaagtgctctgatcggtaacgatcactgtgtgtgaagtgcttgattgttatgtggtatcatgagaatgaataaacataataatggagctgtttttttattttttactgaaaaaaaattttttgataagatgcggtctcgagccgaaggaaagtggcggaggagggacccatggggacaaggggtcggcgaagtccgccgagcaggagcgtaggaagggcatcgcctggacagaggacgagcacagattgttcctccttggacttgaaaagtatggcaaaggtgactggcggagcatctcgcggaactttgtgatctcaaggacgccgactcaagtagctagtcatgcacagaagtactttatccgtctgaactcaatgaacagagaaaggcggcgatcaagtatacatgacatcaccagtgtgaacaatggagatccatcaactgcacagggtccaatcacaggccaaacaaatggtcaggctgcaaatcctggaaaaccatctaagcaatccccgcagccagcgaatacacctccaggcgtcgatgcttatggcacaacaattggacagccagttggtggcccccttgtctcagctgttggaactcccgttacactacctgtttccgctccacctcatctggcctatggcatgcgtgccccggttccaggagccgtagtacctggtgctccagtaaacattgctccgatgccctatccaatgccacccccaccatctcatgggtgacagggtgagggacacatttcaaatgctgtgtagcgtctaaacaaacccataatctccccctatgccagcattttgcgggtgtgctgctatgtctcaataaagcaatgccaataaacccttgtacattacaaactgttgtcacatgttgcattgaggacattgcagattgtgtactttgtgttgcatgcaaactttttcatgtacatctccaaaatccaagtgtttctcgttatggcagcttgtacttcagtcagtacctgtgatatgtaaatgtgtaccagctggaacaagagtaagatactgtcgcctgtttctcatgtc

SEQ ID NO: 3024 - DNA, 1258 bp, Zea mays
  Clone ID: TF_ZmC11894_2
tcgtcggcgtccgatctttcctttccttttggcgcttttctcctgcccaccacgcggccacaaccctttcccttctctgcttgcttgctgctgcagtgctgcctccccctcgcccagcagcagggagcagccatgccaggggaccacggctccaagggcgacatctccttcgccggaccggacgcgtgggctcgcccagcagcagggagcagccatgccaggggaccacggctccaagggcgacatctccttcgccggacgcttcacggccagcgccatcgcagcatgcttcgcagagatatgtaccatcccgctcgacacggccaaggtcaggcggcactacgagctgctggtggaggacgtcgacggcatcgagtcgggccgcgtcccgcttccggcgtacgcggctgacggcgctgccgaggaagggggcggtggcgggaagaagggaagtggcggaggagggacccatggggacaaggggtcggcgaagtccgccgagcaggagcgtaggaagggcatcgcctggacagaggacgagcacagattgttcctccttggacttgaaaagtatggcaaaggtgactggcggagcatctcgcggaactttgtgatctcaaggacgccgactcaagtagctagtcatgcacagaagtactttatccgtctgaactcaatgaacagagaaaggcggcgatcaagtatacatgacatcaccagtgtgaacaatggagatccatctactgcacagggtccaatcacaggccaaacaaatggtcaggctgcaaatcctggaaaaccatctaagcaatccccgcagccagcgaatacacctccaggcgtcgatgcttatggcacaacaattggacagccagttggtggcccccttgtctcagctgttggaactcccgttacactacctgtttccgctccacctcatctggcctatggcatgcgtgccccggttccaggagccgtagtacctggtgctccagtaaacattgctccgatgccctatccaatgccacccccaccatctcatgggtgacagggtgagggacacatttcaaatgctgtgtagcgtctaaacaaacccataatctccccctatgccagcattttgcgggtgtgctgctatgtctcaataaagcaatgccaataaacccttgtacattacaaactgttgtcacatgttgcattgaggacattgcagattgtgtactttgtgttgcatgcaaactttttcatgtacatctcc

SEQ ID NO: 3025 - DNA, 613 bp, Zea mays
  Clone ID: TF_LIB5117-068-A1-PF1-E3
gagctctttttctcccccctcccctccctccccgtcgcagcacacgcctcctcattttcctcatctcctctcctctcctctcctctcctgctctgctctcctttggagcgagaagcaacaacaaagattaggagctgctgatttcgcctctgttcttcgtcgtggtcgtcgcagcgagatttggctttgccggcgctttgatcttgaaggatctgcagagagatatggcgcgttttcaggaaaccaagccggatctgctgaattccggcagcgatacgcggatgatggccgaggcccgagcccccaaggcgcggaagccgtacatgataaccaagcagcgcgagaaatggaccgaggaggagcacaagctcttcctggaggccatgcagctccatggccgcgcctggcgccgaattcaagagcacataggcaccaagacggccgtgcagatcaggagccatgcgcagaagttcttctccaaggtcacccgggactcgtccggcgacagcggcggcagcagctccggcggtgctgggccgccgatccagatcccgccgccgcggcccaagaaggaagtcggtgcacccgtacccgtggcaccagaggagcgcgc

SEQ ID NO: 3026 - DNA, 1685 bp, Zea mays
  Clone ID: TF_ZmC8091_2
cattgggtacctcgaggccggccgggagccttcacttgccagttcccactcctaactctctcttcgtctactcttcttcccacccccagcgttcgcttccatccaagctcatatcatcactaggccacgcgccccaatactcagaactagtcttgagtaaagcatggcgtcgtcttctccgtcctgccgtggcagcggcggcaagtcggacgtggaccggatcaagggcccctggagccccgaggaggacgaggccctgcagcgcctggtggcccgccacggcgcccgcaactggtccctcatcagccggtccatcccgggccgctccggcaagtcgtgccgcctccggtggtgcaaccagctgtcgccgcaggtggagcaccggcccttcacggccgaggaggacgacaccatcctccgcgcgcacgccaggttcggcaacaagtgggccaccatcgcgcgcctcctctccggccgcaccgacaacgccatcaagaaccactggaactccacgctgaagcgcaagtactacgccgccagcgacgctgttgttgctgacgctgacgacgagcgcccgctgaagcgcacaagcagcgatggccacccggggctctgcttcagccccggaagcccatccgggtccgacctcagcgactctagcaaccacagccttccctccgtcatgccgtcagccgcttctgctgccgccgtcacctcccaccagcagcagcagcacgtgtaccgccccgtgccgcgcgcgggcggcgtggtcatgctaccggtggcgcctcttgtgccgccgccgccacagcctccggcgacctccttatcactgtccctctccctgcccgggctggacggccagaagcccgaaccatccccagcggttctgacgccggcaccggcaccgcctcaacctcctctgcagatacagcagcagcagcctgctccacctcagatgccgccaccacaagcccaaccgagcttgccgttccagctgcaggcggctgcgacgaacctcacgtcgcagcagccggcagcagcgccgttcagctcggagttcctgttgttgatgcaggagatgatccggatcgaggtacggaactacatgtccgggtcggggctcgatccgcgcaccgacggcgccgccgtgcacgccgtgagcaagcgcatgatgggtatggccaagatcgagtagtttcagcgggcatgcacacagcggcagcagcaggagtggaagatacaaaagaaaacgaagcgccgatcgatccgcggcggccagcgcgtgtatgaagtagtaatgaaccagcaagaacggcgtggccttgaaacatacggaggccgtgtggtgcggcaagtgaacagctccatcattcggctttttagctcatgacaatatcataccctttgttaatctagccgtttctctatcttttattcttcttcttccccctttttttttttttgaatttttgggtctccaagcaagcagagacgaagacgaagagaactttgtctgttgtctgcctgcctgcccctttggaggtaagatgctacctgaataaactgcagagcaaaggatccttctttcattgatgctggtggtaaccagtaatcaaaaaaaaaaaaaaaaaaaaaaaaaaaaaaaaaaaaaaaaaaaaaaactcgaggagggggcccggtac

SEQ ID NO: 3027 - DNA, 2416 bp, Zea mays
  Clone ID: TF_ZmC277_1
gcggcacgagctgacctccgcctgctcgccctctctctctcgatggtcgtcttctccacgagaccacgaccgatcaaccccaatcgtagggaactgggaacccggacccagatctcccctagatcctcaatcccaatctgccctccgccgtatcgatcatacctcccgatgcgaccccaagtctggtcgatgcgagtagcggcggcgatttagcgaactgcgcgttcgctagggttagggtttcgagggtttgcgctagggtttgggcgcacgatggggcggtcgcgaggggtgcagaattccggcgacgacgacaccgtacacaggtcgaagcggaggagggtcgcatcgggcggggatgcgacggactccgtttccgctggcatcgggggagctggagaaggagggggcaagaaagcgctctaccactgcaactactgcaacaaggacatctctgggaagatacggatcaaatgctccaagtgccctgacttcgacctttgcgtggagtgcttctctgttggcgctgaagtcaccccacatcgcagcaaccatccttacaaagtcatggacaacctgtctttcccacttatttgcccagattggaatgcagacgaagaaattctcctccttgagggaattgaaatgtatggtctgggaaactggcttgaagttgcagagcatgttggtaccaagtctaagttacagtgtattgatcattacacaacagcatacatgaactcaccttgttatcccctaccggatatgtctcatgttaatggcaagaacaggaaggagcttctagctatggctaaagtgcagggtgaaagtaaaaaagggacttcactgttgcctggagagctgactcctaaggctgaatctccattttctccctccagggtcaaggtggaagatgcacttggagaaggtctagcaggtcgatcaccttcgcacatagctgttggtgcaaataaaaaagcttcaaatgtgggacatattaaagatgggtctaatgtatcaaaagttgaagatggtcatgtcgatagaagtgttggtgtgaagaagcccagatattctgcagatgaaggcccttcgttgactgaactgagtggatacaatgcaaagagacacgagtttgacccagagtatgataatgatgccgaacaagcgcttgctgagatggaatttaaagaaactgattcagaaactgatcgtgaactgaaactccgtgtgctgcgtatttatctgtccaggcttgatgaaagaaaaaggagaaaagagttcatattggaaaggaatttattgtttcctaatcccttggagaaggatcttacaaatgaagacagggaagtttaccatcggtataaggtcttcatgcgttttctttccaaggaggaacatgaagcccttgttaggagtgtcattgaagagcgaaaaattcggaggagaattcaagaactccaggaatgtcgttctgctggatgccgcacacttgctgaagcaaagatacacatagagcaaaagaggaaaaaagaatacgagctgaatgcccaaaaagctaaggatagcagtcaacttaatgcaaataataaatcagtacagaagatgaatcgacctatgaaaattgagtccgatgggaatttggatccaaagaaaggtggtgctggcttggattctcctaaaactacaggacctacaagtgttaagcagtgggatgactgggatatagttggtcttcctggggcagagctattaagtgctagcgaaaagcttctatgttgccagaacagactgctacccagtcattacctgagaatgcaggaggtgctgatgcaggagatattcaagggtagtgtcctaaagaaggaagacgcacacgtcttgtttaaggttgatcctaccaaagtagatagtgtttatgatatggtaacaaaaaagctgggcaaccatgtggagttgcctacggtctagcttatgcctttgggcttgcctgctgtgacatgccgaagaaaacaaatcttggtttcgccccttgcagcgtgtctgaatcagggctgaaggtgggaactgtactaaatcgaatcggccatagttagctgaaattcatatcagctgtcagtagcacagtaaggcattcccgccaagctgtaaaattattgccccgacgagaatgtgtagcatgaatttgaatttcttttctgctattgctgtgtactgttgcagggtagtgccttattgtagtatatgtataggtgcctgagttttatgtatcatcgtgtatgtaccatttgggcgctctatttatgccattgtaccaaccccaaacatcgattattataattcatctagcagccaaattctaaaaaaaaaaaaaaaaaatggcgtcaaaaaaaaaaaaaaaaaaaaaaaaaaacac

SEQ ID NO: 3028 - DNA, 677 bp, Zea mays
  Clone ID: TF_ZmC2240_2
ggccggccgggccgggaattggtacctcgaggccggccggggcaaattattgcttcagctcgcgcgagacctcagctttcactcgagtgagtgcgagtccatcgccggagagagagagcgagagagcacgcaatcgagttaaacaagctctgtctcttggttctctgtccacggcgggagagtgtgagagatgggcaggcagccgtgctgcgagaagatcggtatcaagaaggggccgtggaccgcggaggaggaccagaagctggtcaccttcctcctgtctcacggccattgctgctggcggctcgtccccaagctcgcggggctgctgaggtgcgggaagagctgccggctgcggtggaccaactacctgaggccggacctcaagcgcggcctcctctcggaggaggaagaggcgctggtcatcgacctccacgcgcagctcggcaaccggtggtccaagatcgcggcgcggctgccggggaggacggacaacgagatcaagaaccactggaacacccacatcaagaagaagctcaagaagatgggcatcgaccccgtcacccacgggccgctcgctccggccactcaacctctggcgctggcgctggcgcatcagcgcgatcctccgcaggtggtgcgagaagaggaacgttgcgacgacgaccccagcaagc

SEQ ID NO: 3029 - DNA, 586 bp, Zea mays
  Clone ID: TF_LIB3732-055-Q1-K6-B2
tccggcattttcagacttggatggaaagatagggagcgtttgtctgagagctcttgcagttattgcttacagcctttgccaagtttacattaccggtcgcaaaagaggcagatatttttctatgttctgattgcttccatgatgcgatgaatatcactggacattcttgcttagatttccagagagttgatggggataatgatgaatcagaaaatgatagtgataaatggactgatgaagaaacattgttgctgttggaaggcattgagaagtacaatgacaactgggatgacattgcaggtcatgttggaacaaaatcaaaggcacaatgtatctaccattttattcggttgccagtggaagattgtttgctagagaatgttgagatacccaatgcacccattccatttcgaccacaaagcaatggttatcaatgtttagattccaatggcagcacatcaggtggtttgcttcactaagtttctcgatcagctaaattcatcttttggtaatttgcgcctgttgtaagttatggattaatattgatgaagtgtgttcttaggagctccagttcaaaatatccaac

SEQ ID NO: 3030 - DNA, 1422 bp, Zea mays
  Clone ID: TF_ZmC13666_1
agagagttgatggggataatgatgaatcagaaaatgatagtgataaatggactgatgaagaaacattgttgctgttggaaggcattgagaagtacaatgacaactgggatgacattgcaggtcatgttggaacaaaatcaaaggcacaatgtatctaccattttattcggttgccagtggaagattgtttgctagagaatgttgagatacccaatgcacccattccatttcgaccacaaagcaatggttatcaatgtttagattccaatggcagcacatcaggagctccagttcaaaatatccaacaaggcaatgagcttccgttcataaattcttctaatccggtcatgtcactggttgcatttttggcctcttcaattggacccagagttgcagcatcatgcgcacatgcagcattatcttttttgactagagacgaggattccagggtgagttcagaaggctcacatgctggtggtctgggcaatggtgcaaatccaaattttcagaaccataatggtgcttcaccatccatttctccagaaaatgttaaatatgctgccatgcttggtctgtcagcagcagcaatgaagtctaagctctttgccgatcaagaagaacgcgaagtgcaaagactaactgctactgtaataaatcatcagttgaagagattggagttgaagctgaagcagtttgcggaagttgagaccttgctcttgaaggaatgtgagcaagtagaaagggttagacacaggatttcagctgaacgcgtcaggatgaggtcagccctattaggtcccaccggaagcggtctaccagggggcagttgtagcactatgccatcaaatccagcaggcatgagccccagaccagtcggtgtgccaggctacatgccacagaccagcatgccagccacatatgccaacaacctgcaggggcatgggaatcctcagatgccgttcttacatcagcggcctcagatgctttcgttcggccctcgcctaccactctcagccatccagactcaaccatcaccacaatcatcaaacatgttcaactctggcatgcccaattcgattgctcctaaccaccatcagttgctgagatcatcctccggaaacaattctagtgcaggataggggaattgtccataagattttttttttctcagcttaggtttgtcaggtgtagcattatgtcatttataaacacatcactgtaattcatttatgtgatgtatgtgtttgtcatataagttttttattaggtcctataaattgtccccatattgctgcgcccttgtgtacctttgttaccaggtcacctcttcccagtgcagggagattcaaatgaacagaatatgttttcatatgtatcccttgagaactcttattgaatatatatgtatgtagttaattcaat

SEQ ID NO: 3031 - DNA, 828 bp, Zea mays
  unsure (1)..(828): unsure at all n locations
  Clone ID: TF_LIB4764-079-R1-K1-H8
cattgggtacctcgnagccggccgggctgactgacctcagcctcaggctcagctgcaccgatcatccatccccatacaaagacactgtatacatacattttaacaacaacaaggtttagctccgcatggcctattactgcaatgcttgctgcgcagggaagagctgccgcctccgctggttcaaccagctagacccccggatcagcaagcgccccttcagcgacgaggaggaggagcgcctgatggctgcgcaccgcttctacggcaacaagtgggccatgatcgcgcgcctcttccccggccgcacggacaacgccgtgaagaaccactggcacgtcatcatggcgcgcaagtaccgcgagcagtccacggcctaccgccgccgcaagctcaaccaggcagtccagcggaagctcgaggcagcctccgccgcggtcgcaatgccgccgggcgcgggcgcgggagacgtcgccgtcggccagcaccaccacctgctggccgccgccgcggcggcccacgcccacgacgccgcctacagcttcgccgcggacccctacggcttcggcatccgccaccaatactgcaccttcccgttcccgccaggcgccgcttcggctgaggacccgccgccgccagcgttcatagatttcctcggggtcggagccacatgaacgcgcgcgcatgtgcatgcatgctcgacttcaccacgcgccttgcagttgcatgtagtgggatctagctaggacaggtagctcgagcagcctctatctagtatctagctagctacctttgccatatatgangagtaagtacatcgatccaaggctt

SEQ ID NO: 3032 - DNA, 703 bp, Zea mays
  Clone ID: TF_LIB4978-032-A1-K1-C6
agttcagagaggatgcccccccaaacctttccttgcattccactgaaatcttcctatctgcaaccatgcagttgctcaattctggcctccgctgaagcccaaccatccattgttatataagtcgctgcagcctttgcaatttcccactccttcagccaccatcggtcattgaaggagcttcgtgccaccagagaaggtgttcgccgtgcataatcacagactatatacattccacagacctgtaaagctctgtgaatttggagctcccacaggttctgcattggcgttgagatggggaggcattcttgctgctacaagcaaaagttgagaaaggggctctggtcccccgaggaggatgagaaactcatgaaccacataacaaagcatggccatggctgctggagttctattcccaaactcgctgttcaattacctaaattcgagaagacaaattgttgcagggctccaaaggtgcggaaagagttgtaggctgaggtggataaactatctgaggccagacctcaagagaggggcattctcccaagacgaagaagacctcatcattgagctgcacgctgtccttggaaacaggtggtctcaaattgcagctcagctgccagggaggactgataatgagatcaagaatctatggaactcgtgcatcaagaagaagttcaggcagaaaggcattgatccccacacc

SEQ ID NO: 3033 - DNA, 714 bp, Zea mays
  Clone ID: TF_ZmC42_20
gaaaaaaaaaaccagagaggttgagcaagaaccgaggcggatccgccttttgtccctcctgcccgagggctagcctgccgccgcccccgcgagagatcgagaggaggcgctgttcagttcaggggggtgagaagccgtgggggaaaagatgatgcgggagacgtacatggacgtgctgccgccggtggaccacatagccgcctcacggagcggcggctggttcccgggcgcggcgcgtctctggacggcggcggagaacaagcagttcgagcgggcgctggccgggctcgacctctgccgcccggactgggagaaggtggcgcgggccatcccgggccggacggtgcgcgaggtcgtcagccacttcaagagcctccaggtcgacgtccagcagatcgagagcggcctggtgcccatgccggtctacggcgccggggccggggccggctcgttcaccctgcagtgggacggctgctacggccccgcggactcgaggcacaacggctaccgcttcggaagcggaggctgcgggatgcggcaccacggtcgcaccccggagcaggaccggaagaagggcgtgccgtggacggaggaggagcacaggctgttcctcttaggcctgaagaaatacggcaagggggactggaggaacatatcgcgcaactacgtccatacgcggacgcccacgcaggtggccagccacgcgcagaagta

SEQ ID NO: 3034 - DNA, 756 bp, Zea mays
  Clone ID: TF_LIB5117-045-A1-PF1-B2
tttcccctctgtctccttcctcctcccaccccatcccaagtagactaccagatcggtaacctcccaaatcactcgctcactactcgtatcacttacgatcgaggatctaccggcggccatggcggcgtgcagaggaggcgggggcggcaaggacgtggaccggatcaagggcccgtggagccccgaggaggacgacgcgctgcagcggctcgtgggccgccacggcgcgcgcaactggtccctcatcagcaagtccatcccggggcggtccggcaagtcctgccgcctccgctggtgcaaccagctctcgccgcaggtggagcaccgccccttcacccccgacgaggacgacaccatcctccgcgcccacgccaggttcggcaacaagtgggccaccatcgcacgcctcctctccggccgcactgacaacgccatcaagaaccactggaactccacgctcaagcgcaagtactcctcctcttcctctgcatcggcatcgccggctgatgacgccatggcaaacgacgatgaggaccgccggccgctgaagcggaccagcagcgacgggtacccggggctctgcttcagccccgggagcccgtcggggtcggacctcagcgactccagtcaccagagcctccccttcgtcatgccgtccgccgcctcgcagcagccgcacgtgtaccgcccggtcgcgcgggcccggcggggtgtaccggctcccgacggccaaccccgcatccgtcgccttcctgt

SEQ ID NO: 3035 - DNA, 1352 bp, Zea mays
  Clone ID: TF_ZmC659_3
cattgggtacctcgaggccggccgggacagtgcagtgctccccgaggtccccaaaagacaagcaggcaagcagcaaagacacgcctccctgcttgcactccccacacgcccagtcgcccacacctccaacagacaaagacaatctagcaagcacacacagcatcaggaggaggagatcgagtaggagcagaagcaaagaatggggagagctccgtgctgcgagaagatggggctcaagagggggccatggacgccggaggaggacaagatcctggtcgcgcacatccagagcttcggccacagcaactggcgcgcgctgcccaagcaagccgggctgctgcggtgcggcaagagctgccggctccggtggatcaactacctgcgcccggacatcaagcgcggcaacttcagcaaggaggaggaggacgccatcatcaccctccacgagcagctcggcaacaggtggtccgccatcgccgccaggctgcccgggcggacggacaacgagatcaagaacgtctggcacacgcacctcaagaagcggctggagcccaccaccaagcagctggagcaggagcagcacggggcgcatgcaggtggtgacgccgccaggaagcgcagcaggcccaagcgcgcgggtgccaggaaagacgacgacggccgccgtcgccccggccaccaccgcgccggcgtcgcctgaacggtcggcggcctcgtcgtcggtgaccgagtcgacggagcaggagcagggaaacacggggacgagctcgcccgggttccccaaggaggagagcttcacctcgtcctcggaggccgccgaggagttccagttcgacgacacgttctggtcggagacgctgtccatgccgctggacagcttcgacgacgtccccacggagccctgcagctccggcgcgttcggcgacgtggccgcctcctcctcctcctcgtccgttggcgccgacgccgacttggactactggctcggagtgttcatgaagtccggcgacgcgcaccaacaactgccgcaggtttagagcgcgcacgcgcgcccgagaattttcagttccctggctaattgattcatcgttctttctctctccctgcacgtcttgcaatcggaattcggaggggacagtcacaatagcagctaattaatagaggggtgtgtgtgttgaggaccacgacgagattaggaagaaacaacgcgacatgccattgcatctatctcttgtttgccttcttgtatataaagatcgatcgatcgacaagatatcggtgatcgaaacctatatatgctacccattttgagaggaaaaaaaaaaaaaaagggcggccgcttccatgttgga

SEQ ID NO: 3036 - DNA, 787 bp, Zea mays
  Clone ID: TF_LIB4974-032-A1-K1-F12
ctcgaggccggccgggccgggatctatctgcagtccctttcttcttcctcttgattgataggtgcgccgaagcttgttttgttgggtggcctttgtctctgtcgtctcgtcttccgcccggccgccaccacctccaggtccaggctactagctagctattaagtccggccaaccaagcagctcgatcaggtcgaccaacggcggggacagttcggagggaggaggcggccggagaccgaaaaattaaaggaagaggagcaaggctgaccgatgaacgatcgttatcttcatcatcagtcgtcgatggtgacaccggcagcagcgagcaagatgagcaagaagctgcagggcggtggtgagcgtagtagtggcagtagtagtaggggcagcggcaacagtgataagcagcagcagcagcaggtgccggcggcggcgatgaggaagggcccgtggacagaggaggaagacgctcagctggtctgaggcgcaccggcaagagctgccgcctccgctgggtcaactacctccacccggggctccggcgcggccgcatcaccgccgacgaggagcgactcatcctccagctccacgcgcagtggggcagccgctggtcgcgcatcgccaggagcctccccggccgcaccgacaacgagatcaagaacttctggaggacgcgcgccaggaagcagaaggcggcggcgcagcagcatcagcaggacagccggagcagcaagacggcgatgggcgtcggcgttctcagggtcagcgtcgtccgtgactaccacta

SEQ ID NO: 3037 - DNA, 1933 bp, Zea mays
  unsure (1)..(1933): unsure at all n locations
  Clone ID: TF_ZmC12010_1
gggacctcgagccggccgggccgggattacatacgtcgcctttcttcttcctcttgattgataggtgcgccgaagcttgttttgttgggtggcctttgtctctgtcgtctcgtcttccgcccggccgccaccacctccaggtccaggctactagctagctattaagtccggccaaccaagcagctcgatcaggtcgaccaacggcggggacagttcggagggaggaggcggccggagaccgaaaaattaaaggaagaggagcaaggctgaccgatgaacgatcgttatcttcatcatcagtcgtcgatggtgacaccggcagcagcgagcaagatgagcaagaagctgcagggcggtggtgagcgtagtagtggcagtagtagtaggggcagcggcaacagtgataagcagcaggtgccggcggcggcgatgaggaagggcccgtggacagaggaggaagacgctcagctggtatggttcgtccgcttgtttggtgaacgccggtgggatttcttagcaaaggtctcaggtttgcgcggtggcgggtgcatccgatccccaagcatgcatgcatgcatgcatatgtagatgcatgcgtgcgtggggatggattgatgtaggatgggctatggcgatgggtgttgattaaccatttcttttctctctctcttgtgcgtgccctgcttcttctctgtgcatgcgcatgtgtcggcggcgtactcgtgcaggtctgaggcgcaccggcaagagctgccgcctccgctgggtcaactacctccacccggggctccggcgcggccgcatcaccgccgacgaggagcgactcatcctccagctccacgcgcagtggggcagccgctggtcgcgcatcgccaggagcctccccggccgcaccgacaacgagatcaagaacttctggaggacgcgcgccaggaagcagaaggcggcggcgcagcagcagcagcagcagcaggacagccggagcagcaagacggcgacggcgtcggcgttctcagggtcagcgtcgtccgtgactaccaccacgtccagctgctctggctctcctagtccgaccagccgcggctgtggcacggccacgtcatcgtccgctctgaccgagtccgcgctgcggcaaagcggcggcgaagacgaggacgccgagctcgacgaggcgtccaccaccaccaccaccacggcaagccagcgtcaacaccaagacgacgaccaccagcagcagcaccaggagtgctacgcctcggaccacttctggaacgacatcgcggcggcggaggcggccatctacatgttgatcgacggcggctggacagggtccggccccggccatcccgccgccgatccgccttcgtcgccggcgtgggagtactgctctgattactcgctctggaggatcgacgacgacgagtactacgagaagatgctcgactcctcctcctgattcgattatccagccatcacacgcatatgcatatctatcattagcttatttctttcttttttttgtgctgattagtctagcatacagcagctatgagaatccaaagcttcggttcggctttcgttgcatctctttgtataatactgtaacatatctatatatatatatgtatgatatgatactgctctcgatcatatatattgtaccaatatgtgctaggatatatagacatgtagtataatcatcgtcgtcgatcgtgtgtttagtgaagaatcagatgatgaggcgagacacaacacaatcgattgtagtgtgtcctgctgcatctatgtatttattcatgtactaagtactatatatatatataagtgatgatgagattgtatatgattcagttcgacaaatacattcttcagtagtttctgagnnggtatatttacttaaggtanaaaagaaaggccgcccgctataaagcat

SEQ ID NO: 3038 - DNA, 1031 bp, Zea mays
  Clone ID: TF_ZmC39729_1
cgatgcggtaagagctgccgtcttcgctggctcaactacctccgcccggagctccggcacggcggcttcaccgacgaggaagacagcctcatcttgtctctctacggcgagattggaagcaagtggtcggtgatagcgtccagactccccggacggacggacaacgacgtcaagaactactggaacaccaagctcaagaagcggtacttggcgtcgtccacgtccacgggagaagcaaggccgccgccgccaccaccagctcctcctagcgctagcggcgacgacagcagcgccgccgccgacagccaccaggcccaacaagacgaaccctctcttccgctgacacctccagccttcagtaccgacctcgatacgacctttgccgttgtcgacgacgacatgctcctcttcaagtccgatcagctgtacgccgagctcgtgggtctggtcgagaagaaatcgcaggccacagctggcccgtccactggtggtggcggggacgaggctaattcgacggccacgccatcgtcctcgtcgtatggaactgggacaacaaacagtcccacggttagcagcagctcaggtagctgcgccctgtggcccacggacgtgcatggcacaacgctgctgtccgaacccaccagcagcagcctgttcgacgacgcttacggtgttggcgacgacgcgttcggagcggcggctctgcctgcgtactccttccaagaccttctggcctcgtcttacgacgatgctactgctgcggtggtgacgcaggagttgatgcagtactaccagtagtagtagtactgtaggcatgtggtcaatctggtgtgatgtgtaactggttaattagttactatatggccagtagagatggtaggtgctaggcagtggttagacgatgaagacggtgatgacggtaaaagacgtcaccatatggtcacaccccctgtcaaaagattacttgaggtcgagagcagaaagattaaatataatggaacctcgatattcaaaaaaaaaaaaaaaaaaaa

SEQ ID NO: 3039 - DNA, 962 bp, Zea mays
  unsure (1)..(962): unsure at all n locations
  Clone ID: TF_ZmC689999_1
catgtactaacttgtcacanaaaaagacatatggacggaggaggaggacatagtgcttatccaagcccacaaatcctttggaagccactggtcaacaatagcgaagttcctcccaggctggccagagaacgccatcaagaaccactggaactcaaccaagcgcagcctaggctcaaagcgccgactgaagaagaagaagagccaacaagcgccacccgggcagctctccgtcctggaggagtacatccggagcctggaatcggactccagttcggcagcaccaccggcggcaacgtccagaccagccatcggtcgtccgaggagggccgtccacacatcggcggtgcctgagatggaactgcacctcagtgcccccaataaccaagatgcaccggtgcgccaccagccccgggccatcagtcaaggcaatccgatgcttccagacctgaacgtcagctatgatccagaggagacgcactatatggggtaccctatgtatgatcccgcggcggcgccgcagctacagctggttagccaagagccccggcaagccaccttcacttggctcccgtttggtggacctcgcatggcgctgaacggagagcacgcatctggtccgtcgtcgtacgacgtcggtggatcctccggcaacgccggctactacagtgaagcagggccaagcaacgtcggtggcagcggtggtgacggccaagctgatgacgacaccaccaacaatgacgaccttgacctagcgtcgagggagttcttcatgccctcctgtgacgaggtgcgtcttggcttggccaggttcaagtgagctaggcagacgaccgggggctccggccggttgttgcttcgctacctattttgcaaaatggtaagagtatcttggtgtgcatgagtggcagaacactcgtactttaatgatttagaactccttttgtgagccgtggattttgttt

SEQ ID NO: 3040 - DNA, 1145 bp, Zea mays
  Clone ID: TF_ZmC10631_2
cccacgcgtccgcgcgctagctagctagctgttggcttgagatcgatccgtcgactaagctatagctagcagccatggggagggcgccgtgctgcgacaaggcgagcgtgaagaaggggccgtggtcgccggacgaggacgccaagctcaaggcctacatcgaggagcacggcaccggcggcaactggatcgcgctaccgcacaagattgggctgaagagatgcgggaaaagctgcaggctgagatggctcaattatctgaggcccaatattaagcatggtgacttcacagaagaagaggagcatatcatttgcagcctctacattagcattggaagcaggtggtccatcattgcagcgcagctgccggggcgaacggacaacgacatcaagaactactggaacaccaagctgaagaagaagctcctcggaaagcgcgcgccgtccaggcgcgcgaggacgaaccaggatccctgctacctcgccgcgggagccgccagcagcagcagcagcagcgccgcgacggccacgcaagccctaagcgcgtcggctctcgagcggatccagctccacatgcggctccaaggcatctacggcgcgttagcttgcaacgacgacagcaacgctgccttcgggtcggcggcggcggcgctgccgcagtggccgaagcttgaggcgctgtcgcaggccaacaggctgctcccggggtcgctgccggcggacgccatggccacaaccgtgagcgtgcagccgcacccacagcatctggtcgaggtcgaccaccaccagagcctcgccgccgccgcactcgagggcgagcaacagctcagctctgccggtgaaggaggctttttcgagcggcccaaggtagatttttactctccatcagccgaggtcgccgccgccgccgccgccagcgtagagatgaactcggtcgccccgatggttgttggcggctacgcgggcgccgccggattcgggcctcagcaccatcacgacgagctctacgactttctgtacagcaagtacggatcagtgggcgggctggcgcacgacggcgggcatgttccaacgttgccggagctgcagtgcccggacggcgctgccgccgtcgtcggagccgacgagaagttctcggcgtggacc

SEQ ID NO: 3041 - DNA, 1822 bp, Zea mays
  Clone ID: TF_ZmC344_1
gtctgaaaaaatacttatatcgttcaatacaatcttccagctactactttgttctgaacctttcgccatcttcttggcaggtaagcagaagcctggctagctggcctctggtatgtggttggccaaggattacaggatttcaattagtaacaatcacgatttgttagcatacaaggtgcagcatttcaattagtaacaatcacgagttgcattacaatcttgatcctcggtgaggtctccccgagggctcgagcaggggaatggtgcatgcaaccaggctcagggcacatgtacacctggtggcgctatctcacgcatcaagggaggttgtggccgcggcggtgcaattgcagcactagttctgctagaagcccttgccgcacaccttgcacacgaagcggttcgtggacagcagtgtcctcggcgagagcgcaatcgcccggatctggagtcttggggaggttccgcttcttcttgaccggagccggaacagcagccaccattcggctcgagtcgcggagctacctcttctgccgtgtcctgcacagccgccgcttccgcaccggttccgacggagcaaaggcgaaagcgacgaagtagcaacaagcaaaagcccagatcgataatacgatggggcggtcgccgtgctgcgagaaggcgcacaccaacaggggcgcgtggaccaaggaggaggacgagcggctggtggcctacgtccgcgcgcacggcgaagggtgctggcgctcgctgcccagggcggcgggcctgctgcgctgcggcaagagctgccgcctgcgctggatcaactacctccgcccggacctcaagcgaggcaacttcaccgccgacgaggacgacctcatcgtcaagctgcacagcctcctcgggaacaaccaaaccaagcaagcaagcaagctgaagaacgtcctccggttgttgccttgcctctgcctgcaggtggtcgctcatcgccgcgcggctcccggggcggacggacaacgagatcaagaactactggaacacgcacatccggcgcaagctgctgggcagcggcatcgaccccgtcacgcaccgccgcgtcgcggggggcgccgtgaccaccatctggttccagcccgacggaatcgagcccgaacaccgccggcgccggcgccgaagcagcagcagtggtggcggcggccatgaccaagacccgctggtgaagtggcttttggaagaggagcctgccaccgtcaaggcgcccaggtgccccgacctcaacctggacctctgcatcagcccgccgtgccagcatgaggacgacggcgaggaggaggaggaggagctggacctcatcaagcccgccgtcgtcaagcgggaggcgctgcaggccggccacggccacggccacggcctctgcctcggctgcggcctgggcggacagaagggagcggccgggtgcagctgcagcaacggccaccacttcctggggctcaggaccagcgtgctcgacttcagaggcctggagatgaagtgaacgaaacgaagcccacacgtcctttcttctccttttgttgtcggttgtagtcttggcttgttggatttggatagagctagttggttactagttgttagttagaagatagtgcaggatgatcactagctactggctacctcgacacagtagctgctcccttctcttccattctatgtaaaaaagaaacaaaaatacttagggggtgtttggtttctagggactaatgtttagtccctacattttactccgggttgcttcccggattctttgtgttgtaatgtaactactactactacaagtagtagg

SEQ ID NO: 3042 - DNA, 129 bp, Zea mays
  Clone ID: TF_6165795
ctcaactacctccggccaaacatcaagcacggcgggttctcggatgaggaggacatgataatccttagcctctacatcagcataggcagcaggtggtcgataatagcggcgcagctgccgggaaggacg

SEQ ID NO: 3043 - DNA, 2059 bp, Zea mays
  Clone ID: TF_ZmC1296_1
actttctgtgctatttgacgaatataaggatgcacaacaaacagcctagtgcacttgacattaagaattagtgaattactccattcgctggggcaagatgttccagggtctggtggttctaactggactgaccatgagacattgcttcttttggaagcgttagaaattttcaaaggaaaagaatggcatgagattgctgagcatgttgctacaaaaacaaaagaacagtgcatgttacacttccttcaaatgccaatttctgaaccgtttcttgatggcgatgatttcaatgaaacaccccagaagatcacaaaacaggattcagcagaaactggtccttctgatgtacctgacaagatggatgtagatggtaatgcggaaggaaaagagagcactgatgaaaaagcttacaagaaagcagattccagttccgcagaaacaagaacaaaattagctgaccaaaatatttctgctaaagaggatactatgaaattaggtgatgatgacctagttgcttccattgttgatgaaccaaataaatcttcattggtggatcctgcacataagaagaattctgctaatgctgatgtctctggggaacacccatccaactttattactaatatcctgagatccacttttgaagcagttgaccactttctgggtaaagaagacatgggttcgtttgctgaagcaggaaatcctgtgatggcactggctgcgtttcttgcttctcttgtggaacgtgatgatgctgtttcttcatgttgtagttcgttgagagctatatcagagatgtctcctgctctccaactggcaactgaacactgttttattcttccagatccaccaagtgacctcaaagatccggcttccactttcagcccttgcgcaggcggtgagagccaagaaggtgctgatactactcaaaatgtgaatgataccgataaaaacaacagcgaaagggaagatagtgatttagctctggagaaggagagtgctacattcacctcacagaagcagcacctggaagaattatctgacgcaaaggaaacatttattggaggtcctgaggcagaggccaaatccaacagcacaaaggattctgacaatccaattgctaaggtggggagcagtgtagcatctgacaagatgagagatgggtgcaatgctaatgccattccgtgtcctgctacttcaaatcatacaactgaacccagctccgtagcttcccaggaagccagtccagcaagtacaaaagacacagctatccctgaacaagttgaaagaccaagttctgaggaattactagctgatgtttcacttccacaagggaaggtagagccgaagaagactgaacctgcacctgctgcctcgtctagtatccaacagcatgggtgcaaacaagctggaaatggcaacactgaacctaaaagcaaggaaaacgctgcggccgatgatgaccccataacaaggctacagcgagcggccggtactgccatttcggcagctgcagtgaaggccaagttccttgtggagcaggaggagggttacattcggcagctagctgcacttgtgatcgaaaagcagtttcagaagatggaaacaaaaatgtcgtttctcaccgaagttggaaacctggtgttacgatcgagagatttgacagagaggatgcggaagaagcttttgttggagcggagcatgataatcgcttctcgaatgggtgcagcagcggcttccagaacaatccagcacggggctccggtgaccaccagactcccagtagggcatgtgcatgccttgaatccgcagctgaggcgcccttgaagctttttatagtatgtatatgatcagtaagactggcctatgtaggaggtgtgctaatccgcctctgtataaaatgcagtgtactgtagacgcgtctagggttctggagtcagtaggctttgatgctcaccacaccacacgacttggcttttcttttccttttcgtttaaccaagagttttcttctttgatgtcttacctcgccaccgccatacaatgacatgtgtttgaac

SEQ ID NO: 3044 - DNA, 1519 bp, Zea mays
  Clone ID: TF_ZmC337_2
ctgaagctgggtagctcctgctcctatcccggctgctggcgcgccgtggttttgtgctcttgtggacacactggcctccacccatccctctcacgtctctggccatccgcagccaaggcgcgcggcccatcgtcgatttatagccacaccatggccaggaagtgctcccactgtggcaactacggccacaactccaggacctgcggactaggactaggactaggacacagagaaataatgctctgcgaaggtggcgacgacaataatggccgcagcggcctaaggctcttcggagtgcaggtccgtatcggcggcggcggtggcgcagggtcggcgtccatgaagaagagctacagcatggactgcctgcagctcgcggctcctcatgcttgttcgtccctcgtctcgtccccgtcgtcgtcgtcgttgtgctcgtcctcgtccccgtcgtcgctgctgctgtcgattgatgatgggttgcagagaggggcggccgatggatacctgtctgatggacctcatggcagagctgtgcaggagaggaagaaagcaagtaacaatgaagcagctgagactgagagatactagtgcttcccttgctttgactaaatcaactcgcagcctgtgagttccatggagcgaggaggagcacaggcagttccttgccggcctggacaagctgggcaagggcgactggcgaggcatcgccaggagctacgtgccgacgaggaccccgacgcaggtcgccagccacgcgcagaagttcttcctccggcagagcagcatggggaagaagaagcgccggtccagcctcttcgacatggtgccgatctgcgagaacagtgcgagcatctccgatccgctggacgtggcacgccatggcgtcgcctcggcagactccgagagggcggccgtggacctgatgaattcgacgacggagggtgacgacggcaggagcagggacgtcgtgtcgtcggcgtcaggtgcagggaccgcactgcggttcccggcagcggcagctcagacggagccgctgcatccttcgtcatcgcatggccatgggcgcggccaccactgctctccgttggacctggagctgggcatgtccctgcccgccccatccgtcggaacgtgatggagatgaggcgaggccgaggccgtgcgtgactgctgtctccctcagctgtgtgtgtcagccagatggagatgatgcgctagccaatacagtactgttcgtgatcgtgaaaacggtgtgcaaacactagcacagcggcactaaactaggatgtcgctcctcgcaccatattgtgtactgtaaccacgttgatccacatcatctctatctcttcaccaccgttggatcataggctgtcagtttcatctatccgtccatgtgtcatactcattcacgatgcggtggcttaatgatccagcagtaatttttcttctttcgtgacttaagggtatatacggtggtatttaatgtagaggcttttgatgtatttaaaggggtatttgc

SEQ ID NO: 3045 - DNA, 634 bp, Zea mays
  unsure (1)..(634): unsure at all n locations
  Clone ID: TF_ZmC39713_1
ggacggcgcaggaagacaagctgctggtcgagtatgtcaggcatcatggagaagggaggtggaattctgtcgccaagttaactggtctgaagcgaagcggcaagagctgccggctccggtgggtgaactacctgaggcccgacctgaagcgaggcaagatcacgccgcaggaggagagcgtcatactccagctccacgccctgtgggggaacagatggtcgacgatcgcgcgcagcctgccggggcggacggacaacgagatcaagaactactggcggacgcacttcaagaaggccaagccgtccaagaacgtcgagcgcgccagggcgcggttcctcaagcagcgacgcgagatgcagagccagctgctgctgctgcaggggcaagatcagcatcggcaggaggaggaacagcccgatcatgacgacgacggcgccagtgaggcaacgccgggtgttccactggaggaggaggaggagcagcagcagcagcagcatgaggacctgcggatgatgctgcagcaggacatggacgacctgctgttccagttctgcccgatggcctcctgcacttnctcctcctgcctnctncccggcggcggcagctgcgccttcgtcgtcagcgcgtcggcgag

SEQ ID NO: 3046 - DNA, 1594 bp, Zea mays
  Clone ID: TF_ZmC1193_1
cgcagactcaggggaggcgcgcgcaagcaagtaccacgagggagcagcgggcaggcaggcatgcggcgctcgagccggccgggctgcgacccttgggctcgcaatcgcagcaattgggtacctcgaggccggccgggtgcctatgcctatctataaaatcccgcttcgccacacacccttggccttggcctggcgctcgcacctcacagcagcagcagcaacaacaacctccactgccgcaacccaccgagaggcgagaccggcggcggcaaaaggacgatacaaaagcagccagggttgctggcaacagcgtcggtcgcccgcccgctcgccatggggaggtcgccgtgctgcgagaaggcgcacaccaacaagggcgcgtggaccaaggaggaggacgagcgcctggtcgcgcacatcagggcgcacggcgaggggtgctggcgctcgctgcccaaggccgccggcctcctgcgctgcggcaagagctgccgcctccgctggatcaactacctccgccccgacctcaagcgcggcaacttcacggaggaggaggacgagctcatcgtcaagctgcacagcgtcctcggcaacaagtggtccctgatcgccggaaggctgcccggcaggacggacaacgagatcaagaactactggaacacgcacatccggaggaagctgctgagcagggggatcgacccggtgacgcaccgcccggtcacggagcaccacgcgtccaacatcaccatatcgttcgagacggaggtggccgccgctgcccgtgatgataagaagggcgccgtcttccggctggaggaggaggaggagcgcaacaaggcgacgatggtcgtcggccgcgaccggcagagccagagccacagccacagccaccccgccggcgagtggggccaggggaagaggccgctcaagtgccccgacctcaacctggacctctgcatcagcccgccgtgccaggaggaggaggaggagatggaggaggctgcgatgagagtgagaccggcggtgaagcgggaggccgggctctgcttcggctgcagcctgggactccccaggaccgcggactgcaagtgcagcagcagcagcttcctcgggctcaggaccgccatgctcgacttcagaagcctcgagatgaaatgagcgcgcttctaccctctctgtgtagcttctccccccccgtcgtcctcgtttttgttttgccacacctcacatggatgatgaattgatgatacgtggttggttagttttttcgtaggtgaaaaatacgcgatggtgagcgagtgaaagagagattttgtgccctgggtcctcctccctgctctctcttgctgctccattttgcctccctctgtcctctctctctctctctctctctctctctctctctctctctctgtatctctgtaattaccatcgccaaatgatcatgggggcaatatcatgctaggtctctggaaattgacgctaatcccgtttccaggaaaaaaaaaaaaaaaaaaaaaaaaaaaaaaaaaaaaaaaaaaaaaaaaaaaaaaaaaaaaaaaaaaaaaaaaaaaaaaaaaaaaaaaaaaaaaaa

SEQ ID NO: 3047 - DNA, 788 bp, Zea mays
  unsure (1)..(788): unsure at all n locations
  Clone ID: TF_ZmC91622_1
cgggatcccaacatcgtggnttatacaataacatcttgtgtagtactcaatcctcaactctcatggatcccaacttcaatggtgtgtggagtgcctccgagatggatatggcgaagtcactcatcccaagtcaaatcaccaacaaaacctacacaaacgacatggagacgaagcacattgactttgtggatgatctccaagcaatgttcccatggaaggagaagcaccaggtaaccaatttatatgttgagctactagtggagatcatgagggcacagagcaacaaccaacatgttgtgccaagtagcgtccttgtgaatgataactttgggatgctgtcaaaacccatggacaacatgaaagtgatagaagggtatctaatggatgagatggaggccatgaggattctagaggagcaaccaaatatgctgaatgtcattcataagaaaaagaggcatggagtgaagttttggaccacagacgagcacatgaattttcttcgtggtctggaagcatttggccgtggtgaatggagtaacatctccaagtactttgtccccacaaggacaccagtggacatctctagccatgcacagaagtattttcgtaggcaggagtgcaccacaggaaaacaaggcttcaacatcgacaatgttagcttctatggcacacaaccatgggtgcaaaacaacccttccagctgtgaagcgctcaccttcactggtnggtgcttacaacacanactacaatgacttagacgagaaacatgttggctttcacagcttcgc

SEQ ID NO: 3048 - DNA, 1375 bp, Zea mays
  Clone ID: TF_ZmC659_1
ttcgaccatccacccttccgcccagcacgaccaggacacagtgctccctccccaaagacaaacaggcgagcagcaaacacacacgctcgaaccgagacaagccaatctaataatggggagggctccgtgctgcgagaagatggggctgaagaaggggccatggacgcccgaggaggacaaggtcctggtcgcccacatccagagcttcggccacagcaactggcgcgcgctgcccaagcaagccgggctgctgcggtgcggcaagagctgccggctccggtggatcaactacctgcgcccggacatcaagcgcggcaacttcagcaaggaggaggaggacgccatcatcagcctccacgagcagctcggcaacaggtggtccgccatcgccgccaggctgcccgggcggacggacaacgagatcaagaacgtctggcacacgcacctcaagaagcgcctggatcccaccaagcaggaacagcagcagcagcacgggacgacgccggcggctggcgccggcaagaagcacaggcccgcggcggcggcgaagcgcgggggcggcggagccaggaaggcgacggccgacgccgtcgtcgtcccggccaccgctgcgccggcgtcgcccgaacggtccgcggcctcgtcgtcggtgaccgagtcgtccatgacggagcaggagcaggagcacggcaacacggggagctcgcccgcgttccccaaggaggagagcttcaccacctcctcctcggacgccgaggagttccagttcgacgacagcttctggtccgagacgctgtcgatgccgctggacagcctcgacgacgtcgtccccatggagccctccgacgacgcgttcggcgacgtcgacgtcgacgtggccgccgcctcctcctcgtccgtcggcgccgacggcgacctggactactggctcagagtgttcatggagtccggcgacgcgcacccagaactgccgcagatttagaccgctcgcgcgagaattttcggctcctaattgattcatcgttcttttgtctctatctctctctctctgcacgtcttgcatcggaggggacggacaaggacagcagcagctgattaacagagaaggaaatcaggcagaaacaacgcgacacgccgttgcaacttggatcgatcttgtttgccttcttgttgtatagatactagaatccatccaagcctatgcgttctgagaacagaagcacgctgtgctgtgcatgcagattcccatgtatgtacagtagccacggccgccgccagaacagaaatggatccggcctcttccaaattccattcgtttgagagaaaaaaaaaaaaaaaaatgcggccggcctctaaaaaaaaaaaaaaaccaact

SEQ ID NO: 3049 - DNA, 1169 bp, Zea mays
  Clone ID: TF_ZmC659_7
gggacctcgagccggccccctttgcttcgcacgacgaccaggacacagtgctccctccccaaagacaaacaggcgagcagcaaacacacacgctcgaaccgagacaagccaatctaataatggggagggctccgtgctgcgagaagatggggctgaagaaggggccatggacgcccgaggaggacaaggtcctggtcgcccacatccagagcttcggccacagcaactggcgcgcgctgcccaagcaagccgggctgctgcggtgcggcaagagctgccggctccggtggatcaactacctgcgcccggacatcaagcgcggcaacttcagcaaggaggaggaggacgccatcatcagcctccacgagcagctcggcaacaggtggtccgccatcgccgccaggctgcccgggcggacggacaacgagatcaagaacgtctggcacacgcacctcaagaagcgcctggatcccaccaagcaggagcagcagcagcagcacgggacgacgccggcggctggcgccggcaagaagcacaggcccgcagcggcggcgaagcgcgggggcggcggagccaggaaggcgacggccaacgccgacgccgtcgtcgtcccggccccggccccggccaccgctgcgccggcgtctcccgaacggtcggcggcctcgtcgtcggtgaccgagtcgtccatgacggagcaggagcaggagcacggcaacacggggagctcgcccgcgttccccaaggaggagagcctcaccacctcctcctcggacgccgaggagttccagttcgacgacagcttctggtccgagacgctgtcgatgccgctggacagcctcgacgacgtcgtccccatggagccctccgacgacgacgcgttcggcgacgtcgacgtggctgccgcctcctcctcgtccgtcggcgccgacggcgacctggactactggctcagagtgttcatggagtccggcgacgcgcacccagaactgccgcagatttagaccgctcgcgcgagaattttcggctcctaattgattcatcgttcttttgtctctatctctctctgcacgtcttgcatcggaggggacggacaaggacagcagcagctgattaacagagaaggaaatcaggcagaaacaacgcgacacgccgttgcaacttggatc

SEQ ID NO: 3050 - DNA, 716 bp, Zea mays
  unsure (1)..(716): unsure at all n locations
  Clone ID: TF_LIB4759-123-Q1-K1-E10
ccggccgggcttcatctcttctcctcacaaggcttcctgccttcctcccaccacctccagtcctccaccggaccaccacctccaccactcctctctcacgacacgcgcaaaccgctcgaaccctagctggcggcgggaggcggaggtggctccgggatgacgcggcggtgctcgcactgcagccacaacgggcacaactcgcggacgtgccccaaccgcggggtcaagatcttcggggtgcacctcaccgatggctcggccatccgcaagagcgcgagcatggggaacctctccctcctctccgcgggatccaccagcggcggcgcgtcccccgccgacgggcccgacctcgccgacggcggcgggggctacgcctccgacgacttcgtccaggggtcgtcctccgccagccgcgatcgaaagaaaggtgttccttggactgaagaagaacaccggaggtttttgctgggattacaaaagctcgggaaaggggattggcgaggaatttctcgtaattttgtggtctcaagaacacctactcaagtagcaagtcatgctcaaaagtatnttatacgccaatcaaatatgagcagaaggaagagaaggtctagccttttcgacatggttcctgatgagtccatggaccttccgccccttcctggaagtcaagaaccagagacctncatgttnnaatcaccgccactgcctcctgctgg

SEQ ID NO: 3051 - DNA, 871 bp, Zea mays
  unsure (1)..(871): unsure at all n locations
  Clone ID: TF_ZmC19315_1
ccgggttcnacccaacgcgtccgcccacgcccgtccggccgatcagcgagcgggcctctgggagaggtagggagccatggggaggtcgccgtgctgcgagaaggggcacaccaacaagggcgcgtggaccaaggaggaggacgagcggctggtggcgtacatccggtcgcacggggaagggtgctggcggtcgctgcccagcgcggcgggtctgctgcgctgcggcaagagctgcaggctgcggtggatgaactacctccggccggacctcaagcgcgggaacttcaccgacgacgaggacgagctcatcatccgcctgcacgccctcctcggcaacaagttcgtggtctctgatcgccgggcagctgccgggccggacggacaacgagatcaagaactactggaacacgcacatcaaacgcaagctcctggcccgcggcatcgacccgcacgcgcaccaccgcccgcaggcgctgcaccacgtggcagcagcagccctcgtcccggcccccgccgcgaagccgaagccgaagccggcggagtcgtccgacgacggcgggcgcagcagctgcagctgcagcggcagcggcagcagcgcgggggagccgcggtgccccgacctcaacctcgacctgtccgttggtccgccggacgcgcccacctcgccgccgccgccgtgcctgtgccaccgcgcctgggaagcgtgcggctgccaggcaggctgacggctgaggcagcaagagttcagattttttttttgttaggcagttgaaacaaggctagtgtgaaccgagaggagatcagtagctaggacactgtctcagagaaagaaagaaaaaaaaaaccaaaaggattcttgaatatctggctc

SEQ ID NO: 3052 - DNA, 837 bp, Zea mays
  unsure (1)..(837): unsure at all n locations
  Clone ID: TF_ZmC178558_1
ctccgctgatcaactacctcgccccgacatcaagcgcgcaacttcacccccgacgagangccctcatcgtccgcctccaccgcgagctcggcaacaggtggtcagcgatcgcggcgcagctgccggggcgcaccgacaacgagatcaagaacgtgtggcacacccacatcaagaagcgcctggaggacggccacggggaggagaagaaggcgcgcaaaggcaagcccgccgccaagaaggccgccgacgccgtgggccgcagcagcgagcacgggccgttcctgaccgcgtcgccggggctgtcgagcagcggcgtcacgttctccgccgcggcggactccgccgcggccgtgtcgtcgtcggccgacaacgcggccaccaccagccaccacccgcagcaggtcggcgccagcaaggcggagtcgtcgacggagttggacagcggcctcagctccgccgagttcccgcccctcgacgacagcttctggtcgtcggcggacgtcgtggacatgggcctcggcgccacggacgaggagctgggcctcgcgtgcccgccgccgctgtcgtcgtcgtccaccagggacgaggacatggagttctggctcaacatgctgctggaggccggcgacatgagggacttgagcgtcttgtaactaggatgcaggatcggaagcctcaggcgcctgctatatctgaggactagagcatcgcatcttctttcttttttcttgtcatcttgttgccctgttttctggtgatgagaaaatgctgagaaactcggtcgggtgattttcaccttccgtacaagaaagaatactagcatcaaccaaaaaaaaa

SEQ ID NO: 3053 - DNA, 1133 bp, Zea mays
  unsure (1)..(1133): unsure at all n locations
  Clone ID: TF_ZmC2063_2
gccaatcgtgtaatcttttttacttagctggcttgagtacaaagtaacaatatttcttgatataggaaggacgaactgtcgggagttccttgtagtagtttatggtagtgacgttgcagtaatagcgtaccagcagggggggctctgaagcccaccgacggttgatgaagggacacaaattctaggggaggcgctgataagacacaaggacacacgttttctacagagaagcaaagggaaaggctaagacgctcccacagccacgagctttaaaagaaggagaagagagtggcccttaaccctaccgttctcttctccctaatcctggtaatcagtagtagccactagcgctgctgccgttctcttcccctacccgacacaagctccaccacctctatctaccacacgccaccactgtaggagctcctccacgatcatcccgccctagagccataataattcgttgaagaggagggggttcttagaaccagagggcggctacctgtgaaggatacccgtgctgctggctgctgctgttcctcgagctagagccgtgtgtgggctgtgcagattgcagagcgcagcttccagtctcagcattgctttcaatggggaggcactcctgctgttacaagcagaagctgaggaaggggctctggtctcctgaggaagatgagaagctcatgaaccacataaccaagcacgggcatggctgctggagcactgtccccaagcttgcaggtacaaccatcaaaatcaaaatcaaatcctgcacgctttgctctaccttctcaattgtccatctccactgtttcctgctgcttctccaagggcttcagaggtgtggcaagagctgcaggctgaggtggataaattacctgaggcctgaccttaaaagaggtgcattctctgaggaggaggaagacctcatcgtcgaacttcatgctgtactggggaacaggtggtctcagattgcaacaaggttgcctggaagaactgacaacgagatcaagaatctctggaactcgagcatcaagaagaagctccggcagaaaggcattgacccccacaccccacagccgctccttgtcgaggttgaacgcagcanagcagctcccacgaccagtaccgag

SEQ ID NO: 3054 - DNA, 1456 bp, Zea mays
  Clone ID: TF_ZmC3487_1
cagagcactgcctgttgtttcttcttcctcctctctcccctctcgatcgatcgatccaacaagctgagcttggtctttgctttctagctgcctggtacggtctagcgaccgatcgatcgatcgaccatgtcgtccttgctatgtattagccgcaggaacaacaagaaggacagcgatggcgatggagagtacggtggcgagcagatcatcatcagcacgggcggcgcggccatgaggaagggcccgtggacggacgaggaggacgagcagctggtacggttcgtgcgcctgttcggcgaacgccgatgggatttcttagcaaaggtgtcaggtttgcgcggtggcgggtgcgtcgaccgatccgcctccatgcaactccgcatgcacgaggagggtcggtcggcctcgatcgagcagctagcagtgttcttaaccgtttgcttcttcttcttcctcctcatctttgtcgcgtatctgcgtgcggctcttgtggatacggacggcgacgtgcgtgcaggtctgaggcgcaccggcaagagctgccgcctccggtgggtgaactacctccacccggggctccggcgcggccgcatcacggccgatgaggagcgccgcatcgtggagctccacgcgcagtggggcagccggtggtcgcgcatcgccaggagcctgcccgggcgcaccgacaacgagatcaagaacttctggaggacgcggaccaggaagaaggcgctcgaggagaggagggctgccgcagcagcaacgtcgacggcggcggagtcggcgtcctcggtgatgacggtgtcgtcgtcgtccgagtgccgccgcccgcccgtatcgtcgtcgtcgtcgtcgtcttcgctacggcgggacgaagcgcggcgcagcggcgacgagaccgaggaggcgtccacgcccaccgcggcgccggcgaccaagcacgatgaggaaccccagccgcagccgcaggagtgctacgacttccccatggaccagctgtggaacgagatcgcggcagccgatgcggcggcgatgagctaccttgtcgtggacgcctgctggggcggagctgctgttggtggtcactgttattactacggcgccgccgcagcctcagccgcctcgccgccgccgccggcctcgccgccgtgggagtactgcggctccgatttttcgctgtggaggatcgacgaccaagagtactacaagaagatgctcgactcctcctcctgatcccggcccgcgactcatatcgtttggcgaggacacacgtacatacgcgctctgtgaatttgctagctcatatatattatccaggcgaggcgaggaacgagctgagatcatggtggtgagatgagatgagatgagatgagagagtagtgtgtattaatggtggttcagatcgagtagtgtgataaattaacagaatatatataataatttacgcttctctccg

SEQ ID NO: 3055 - DNA, 3318 bp, Zea mays
  Clone ID: TF_ZmC344_4
tcgcggtcgcgaccaagcgacgacggcgaggtagggaatctaagcggctgttacccatgctagcagaccctcccaccgcaatcggtcagcgtttgcgcacgaagattagcaacggggcctctacatttatgaagagtaattacaatcgacgctcgcgtaggtgatagggtcagaggtttcccgtctgtagccagaaaagctcccgctagaagatcaaagaatcctgccccgccggccctgcgtggttggaccccggttcaaggtctgtcaattaggacctgacaatgcgagcaagccgtccgactcaagggtcgacctaaaccccggcggaggagttgttgcttcgttggtggcagcatcgccgcggctgtcgatcggggaagtaaaggcgcgcgtagcatccaaggaccaaggtcgttggctactagtgcccaggtgcatcgagccggagctaggagcttgtgcgtgtgggaagaggtccgcagcctaccggggggaccgccgccgctgagcccggccccgcccaggccgaatcccgcccgaccctcgtcctccgcactaacagtaccgcaggcgccgagctgggtccagccgacggccccaggcaaggcgaccaggtgccccgacctcagccgggacctctgcatcagcccgccgtgccagcatgagggcgacggcgaggaggaggaggacgagctggacctcatcaagcccgccgtcgtcaagcgggaggcgctgcaggccggccacggccacggccacggcctctgcctcggctgcggcctgggcggacagaagggagcggccgggtgcagctggagcaaaggccactaattcctaaggctccggagccccgtgctcgagttggaagccctggagacgaagtgttggaaacgacgcccctacatcctttcttctcgcttggtggtgggcctacgtgatggtacgctgactttggtgtcgcagattcagttaccattagtagctgggcaagctatcaaaaggtgaaaccgtctggtcacgtcgtatccatacaggtcattcatatatagcagtcgcaactcacaactcgcacgtagagcgtagaggttcaaatctgagccttagttcagaatgcagcttcagtttgggagttcgttcgtgcatagcaggccctatagctggggttagtcgtgtgcaaggattctccatgtggacaacacaacacaagcaagcaagctaatataaggttggatttaaaagtcgcagaacaattcatgacgtgcttggaaaacgttggtagcgtcttttaatgcttgatctaaaggctaagttatcatccatgggctaggtttgtttgttagtattaccctgtccagtgcaagggcaggtaggaggtagagagagaccgagcaagtactaacctttcatggccccggtctgcccccccagctccctctttcccttgggggccgctgtgtgctccgtcgccatcgcgggggataaaaggaaaaggctccgaggaaacagtataaaagcgcccccggcacgcacgcacgcacgcaggctcactccacgcagcagttgccaggcgcttgtcactccagccagcggcagcccttttccttggcgaggcttggtttagtttagcccgcctgcggtctgccgcctgccaagtgccacctgacacccgatagccgcaaccgtgagaggctggtagcccgtagccggcatccctcgccctcgacccatttgaacagggcctcgagctttgcctctgctgctgctcgcttgatccgtctcttgccgtggtacgcgtgctcgatcggcggatcgtcggcggcggcggcgggaagctctccgacccgcggccgggatgggtcggcagccgtgctgcgacaagttgggggtgaagcgggggccgtggacggcggaggaggaccgcaagctcatcaacttcatcctcaccaacggccattgctgctggcgcgcggtgcccaagctcgccggcctgctgcgctgcggcaagagctgccgcctgcgctggaccaactacctccgcccggacctcaagcgcgggctcctcacggacgccgaggagcaggtcgtcatcgacctccacgccaagctcggcaacagatggtcgaagattgctgccaagctaccgggcaggactgacaacgagatcaagaaccactggaacacgcacattaagaagaagctgatcaagatgggcatcgatccagtcacgcacgaacccctcgaccggaagacaaccagcagcggcccggctacaacctctcagtcaaccaagtctgacgaggcgaccaaggagcagagcccgcagaacgacgacgccgtgataagggacgtgccggccgatggttgcagcccgacggaatcgagcacgaacaccgtgagcaccggcggaagcagcagcagtggtggcggcggccatgaccaagacccgctggtgaagtggcttttggaagaggagcctgccaccggcgacgaggcgtggctgaacttcactggcagtgtcgacgtggacgagttcagcagcattgccgccggtccggagttgttgccgtgggatggcgcgaccgactggctgctcgactaccaagattttggattgggggactcgagcttggtcgatggctacatggtcaacaacaacagctcaaacggagcaaagttctagctagctagccgaagatgtcatctcatctgcttgtgttgctttgctgccagtgaacgtagatacgtaagtaataaaagcattggtatcgaggttgtcaaaggtggatgaccacatcgcaggaagatcatgaagagtccttgcacgcactcctgtatctcgaaccaactaacggctgggatgcaattgagaaggggaggagcacaggccaatcaatctcaaagagataaaactggttcttgaagatctcgaagaaagatgtgtttcttcacaatcacaaagagaggttgtagaagttcttgctgttgtatacatggttgcgtatatattgctaaattgtaccttgttaggccattttgttcgcaaattgcacgagtcactaattagtcagcaaaaatgtgtgcataaagaagagcagttgaaatcgcctctttgtacgttgtgggtgacgttcttttagttacgttgtggatgacgttgatgcatttatagggtatttggtttgaggaataagttatctggtttgtagaatggaataagttatccatcatcacctcattaatcatggttagtactaacatgagtaattgagtcattccaccaaaaaaaaaaaaaaaaaaactcgagagtacttctag

SEQ ID NO: 3056 - DNA, 697 bp, Zea mays
  unsure (1)..(697): unsure at all n locations
  Clone ID: TF_LIB5026-024-B1-XP1-G10
gccggccgggccgcgattgccgaaaaactggagggaagatcaggtcgatcagatcggcaagagctgccggctcaggtggttcaaccagctggaccctcggatcaacaaacggcccttcacagaggtggaggaagagcggctgctcaacgcccaccgcgcccacggcaacaagtgggcgctcatcgcccgccacttaccaggccgcacggacaacgccgtcaagaaccactggcatgtcgtcatggcgcgtcgctgccgcgaccgctccaggcaccatgccagggccgcgagctccagctcccctctctccatgaacttgtctccaagagaaacgctacacgtggatatcggcgaccgtgtccgtcataaacatcgccgaaaggattatcacgccggtgacagcgccgacgagccattgaagaaggacgtgcccttcattgatttcctcggcgtcggcatgtcctcgtaattattcatagtattgcattaattcttgaaataccaatcgatgtagatcaacaagtgtatcgatcggcgtttgttggttattagggcattagtagactgcatgcaggagtagtcgtctagaggtatcagatatgcatgcagggttagagagttcatcgtcgttgatggntagggcgttctgatgtgctgattcatcaatccatcaaataaggctccagacacttgagng

SEQ ID NO: 3057 - DNA, 682 bp, Zea mays
  Clone ID: TF_ZmC352107_1
tgcgcttcctcccgatctgcagctgcggcggcagcagcgggggcaacgcgttcgctcggccagagcaggggaggaagaagcgcgtgcggccatggacagaggaggagcacaagttgtttctcttaggcctgaagaaatatggcaagggggactggaggaacatatcgcgcaacttcgttcagacaaggacgcctactcaggtggcctctcatgcacagaagtacttcatcaggctcaacaagaaaagatccagcattcgcgacactaccacagttaacctgacggacgatcagccaacctcgccatcccagtcctctctgatcactgaccagttcagcgcactagctctggcaaccgacgttaaccaaaacagccgtgcgaattcgccctcgatcgaattagcctagatggccggactattgggataagccaacttaaaaaaaagtgggatggggtttgcaagatctagttctgcagtgtggctcattgatatgatcagttggatggaagccagaacatgttgtttttaggtgcaatccagtctgccccatgaatctatcagatgtttagttgtatataaatataatacggccaatctggagaggccgggagtgttttcaagtttgctgtatcgtcttgatgtaataaactttaaatttaataaaatcttcctttatggaag

SEQ ID NO: 3058 - DNA, 1185 bp, Zea mays
  unsure (1)..(1185): unsure at all n locations
  Clone ID: TF_ZmC3476_1
ggcacagcagcaccgactagccaatctctacttgcctacacagcagaaggaaccagacagggaagtagggagagagcatagcaatggtgcggaagccgatccacgctgacgacgccggcgctaagagcacggaggcgagcaaggagaggaaggggttgtggtcgccggaggaggacgagcggctcttcacccacatcacctaccacggcgtctccacctggagctccgtcgcgcagctagcaggcaagattcagttcttgcaaaccgatcgggactctcggtaccggattctatttcagctatcgatcggacagcacaacgcggtatgattaatctcttcttaaatgttcaatgcacaggcctgcggaggagcggcaagagctgccggctgcggtggctgaactacctgcgcccggacctcaagaaggaacccatctccaagcgcgaggaggagaccatcatctccctgcagcagtcgctcggcaaccggtggtcgacgatcgcggcgaggatgccaggcaggacggacaacgagatcaagaactactggaactcccgcatcaggaagcgcctcaacgccgccgcctccagagctgcaggctgcgacggcggtgacagcgcggccgagccatcgggggccgtggcagcgggaggaaaggaggattcggccaacgctgcgacggcggtgacagcacagcctacgcccatcccggcgcggttcccggtcttcgggtgccagctgcccgacggagccggcggcggcatttcgtctcccggcagcggcagcggcaagagtccccagtcgtcgactactgcgagtatgccgcagaacgagggtgacgagagcgaggcgagcgacggtggcggtggcgacagcgacatggtccatttcctctcgttcgatgatctggattatcccggggatttgctcattgatgtgccgggagccatggacgcgtgggagagccaactgtgctatgcgaatccgatgatgagctcgctctgttgatccacactaccaataattgcatagcacagccattgtcttgttcccgctaatcatatataggctgtctgaattatttatgtgaaatttcactgggttttttggacaaggaatgcatgatgacgtgtgggtattcctattaaaaagaaattttgatcaatcgaaattttgnnatcaca

SEQ ID NO: 3059 - DNA, 335 bp, Zea mays
  Clone ID: TF_LIB3245-059-P1-KI-B7
cgcggcgggtctgctgtttctgttgcaagagctgcaggctgcgggggatgaactacctggggggggacctcaagcgcgggaacttcaccgacgacgaggacgagctcatcatccgcctgcacgccctcctcggcaacaagttcgtgagccgtctgccgtctgtcgacgagacagcgtccttcttctctgtgtctacctttattttctcgacggcgctgcctgacgtcacgcgccgcgctcgcaggtggtctctgatcgccgggcagctgccgggccggacggacaacgagatcaagaactactggaacacgcacatcaaacgcaagcttctggcc

SEQ ID NO: 3060 - DNA, 1411 bp, Zea mays
  Clone ID: TF_ZmC1193_9
cggggttatagtttgtttgatggtacgtgctgagcgagccgaggtatcttgagctccaattcattggcgcgcgcgagcccgcaccgcaccttgcttagaacccacttgatcgctgcctcaccttgctcgtctctcacctcacctcacaccagaccagagagtgtagtgtggtgtggccagggctgcggggcagctggttcttggtacgcacgcttcctcatatataccccccacgcccatacatagagctagccacaagcagacaccgatcgccattgcaactggcagcagcgggtcgatcgacgacgacgttgccccccgcagtctcttaatttgtcgccgtcgtcgtcggggcaggcagatcgtcgagagctagctagctgctagcgcgggagggagggagagggagaatgggacggctctcctgcggcggcggtggcggcggcggcgtgcagcccaagctccgcaaggggctctggtcgcccgaggaagacgagaagctgtacaatcacatcatccgacacggcgtcggctgctggagcactgtccccaagctcgcagggctgcagcgctgcggcaagagctgccgcctgcgctggatcaactacctccgcccggacctcaagcgcggcagcttctcgcagcacgaggaggagctcatcatccggctgcacaagatcctggggaacagtggtcgctcatcgcctcgcacctgccggggcggacggacaacgagatcaagaactactggaacacgcacatcaagcgcaagctcctcgcccgcggcatcgacccgaagacgcaccgcccgctcggcgccggcgccgacgccgccgcgccacccggcgtggtcgcgcaccgggcgctgctgcaccgcgcagccctcgtcgagctcgccgtgaagccggcgccggcggagtcatccgacgacgggagccggagcaggggcaccagcagcggggtgcgatgaggcgccagcgtggaggagcgcgggtgccccgacctcaacctcgacctgtccgtgggcccgccaggaccgcggactgcaactgcagtagcagcagcttcctcgggctcaggaccgccatgctcgacttcagaagcctcgagatgaaatgagcgcttctccctctctgtgtagcttctccccacgccgtcctcgtttttgttttgccacacctcacatggatgatgaattgatgatacatggttggttagttttttcgtaggtgaaaaatacgcgatggtgagcgagtgaaagagagattttgtgccctgggtcctcctccctgctctctcttgctgctccattttgcctcctctgtcccccctctctctctctgtatctctgtaattaccatcgccaaatgatcatggggggcaatataatataatacatgctgctaatgct

SEQ ID NO: 3061 - DNA, 964 bp, Zea mays
  unsure (1)..(964): unsure at all n locations
  Clone ID: TF_ZmC1443_3
cggtccggccttcccggtatcggtcattgaaggacttcgtgccaccananaagtgttcgccgtgcataatcacagactatatacattccacagacctgtaaagctctgtgaatttggagctcccacaggttctgcattggcgttgagatggggaggcattcttgctgctacaagcaaaagttgagaaaggggctctggtcccccgaggaggatgagaaactcatgaaccacataacaaagcatggccatggctgctggagttctattcccaaactcgctgggctccaaaggtgcggaaagagttgtaggctgaggtggataaactatctgaggccagacctcaagagaggggcattctcccaagacgaagaagacctcatcattgagctgcacgctgtccttggaaacagctcagctgccagggaggactgataatgagatcaagaatctatggaactcgtgcatcaagaagaagctcaggcagaaaggcattgatcccaacacccacaagccccttactgaggctgatcgcagcggagcagctcccacaatcagcatcgagagaacctcagggtccagcgaagtcaacccatcaagcgctggtgctctggggaacttgagccccctcctcagcgagacggctcaataaacaatgctgatgcacgtgtatgacaagaatcatgctatgtaacaactactattgtgccgctaagttggggtcatttcgtgcttgcttaccaggaccaggtttaattgcaaaagaaaaaatggaagcaaatacactgcaaaagttaaatgttcaagccagtccccagtcattcctactttgcctgaatgtcaaaccaattttctggatgtcaagtgcatatggtcatatagagtaatagagattatcagatgatctaccaaaacatcactatcatcaggatacttatttgtttaaaattacagcaaaacaaaggtg

SEQ ID NO: 3062 - DNA, 1437 bp, Zea mays
  Clone ID: TF_ZmC277_2
cctcgagggctggccgggaagcatcactgactccattgatgtgtgcatctaatgagaaaaaggttcctgtcctgcaccgccttgtcctagacccgagtggacccgagtggctgagtccacctctgatgctctgacctccgcctcctcctttctctcgtcgtcgtctccacgacacctcaaccccaatcagaacccggacccagatctctaaaaaatccccaatcccaatctgccgtacgccgttgcgatcatacctccaaatccgcccccaagtctgttcgatgcgaatagcacctgcgatttagcgaaccgtgcgctcgctaggtttagggtttcgagggtttgcgttagggtttgggcgcacgatggggcggtcgcgaggggtgctgagttccggcgacgacgacaccgggcacaggtcgaagcggaggagagtctcgtcgggcggggatgcgacggactccatttcagcctccatcgggggagctggagagggagggggcaagaaggcgctctatcactgcaactactgcaacaaggacatctccgggaagatacggatcaagtgctccaagtgccctgacttcgacctttgcgtggagtgtttctctgtcggcgctgaagtcaccccgcaccgcagcaaccatccttacaaagtcatggacaacttgtctttcccacttatttgcccggattggaatgcagatgaagaaattctcctccttgagggaattgaaatgtatggtctgggaaactggcttgaagttgcagagcatgttggtaccaagtctaagttacagtgtattgatcattacacatcagcatacatgaactcaccttgttatcccctcccggatatgtctcatgttaatggcaagaataggaaggaacttctagctatggctaaagtacagggtgagagtaaaaaagggactttgctgttacctggagaactcactcctaaggttgaatctcaattttctccctccagggtcaaggtggaagatgcacttggagaaggtccagcaggtcgatcaccttcacacatggctgttggtgcaaataaaaaagcttcaaatgtgggacatattaaggatggcgctactgtatcaaaagtcgaagagatatgctttctcaagaacgtctttttctgtaatttgagttctattaagaaatgaaatggtgatagtctcacgttacgacatgatgttcatgtagatagaagtgttggtgtgaagaagcccagatattctgcagatgaaggcccttcgttgactgaactgagtggatacaatgcaaagagacatgagtttgacccagaatacgataatgatgccgaacaagctcttgctgagatggaatttaaagaaactgattcggaaactgatcgtgaactgaaactccgtgtgctgcgtatttacctctccaggcttgatg

SEQ ID NO: 3063 - DNA, 577 bp, Zea mays
  Clone ID: TF_ZmC38224_3
aaggctccttcttaagatcgggcctaaggtggttcgtccagcgaagacgacagctcttgccacagcggttgagcctggcattctgctgcaccttattccagttccccgcgccgtgtacctcgacgtagtctttgacacgcttatcctcttcgggcgaccagggacccttcttcatctggggcgtcccgctggggttttcatagtcgtcgatgctatcggtctccttgtcttcatcatcaacgtgttcatcgtcggccgagacgtactcatcgtctaggggagagttctctccatccggcgcagggttctcgtccaccctcaccaccgtcattttgattttgaactttgaaggcagctgggtcgtcctccgaaagttggggctcctggggctcctttaatcttctgcaggccggctgctggcgccgccacgccggggatggaggaggggccgaggaggacgatgccgccgtatcccccgtcaccggtagcgcgccgccgtcacctgttccgctagggttcctccctcgccacctggttgcatgattcgtgtcgtgtgttcctgggcgttgctctgtta

SEQ ID NO: 3064 - DNA, 650 bp, Zea mays
  Clone ID: TF_LIB4827-009-R1-N1-C11
ccggccgggacttcatcattcctcaccccttcccttagaagctgcaggcggtgcatgccaaggtgacagggcctcgatactgtttgagatggaaggtgtcatgacgacgagaagcaagcatcgttgtcatgaggaggaccaggagatgactatggtggagctgaggagaggcccctggacgctcgaggaagacaacctcctcatgaactacactgcttgccacggcgagggccgctggaatctcctggcccgctgctccggtacgtatgatccatttctctgtggccgaattaacctatcggcctcatcttgatgtgctgcgtctgcgtgtgcatgcttgaattagggctgaagaggaccggcaagagctgccggctgaggtggctcaactacctcaagccggacatcaagcgcggcaacctggcgccggaggagcagctcctcatcctggagctccactccaagtgggggaaccggtggtccaggatagcgcagcacctgccggggcggaccgacaacgagatcaagaactactggcggacgcgggtgcagaagcaggcgcggcagctgcgcgtggacgccaacagcgccgtgttccgcgacgccgtccgctgatactggatgccgcgcctgctcgagaagacgatggc

SEQ ID NO: 3065 - DNA, 1770 bp, Zea mays
  Clone ID: TF_ZmC984_2
ttattcggcacgaggcctgcgtgctggtgcccgggccatccgggctccctttcttttcgcgggctcgcctcgcctcgcctcgcctcgccggggggctggggggcgcgggctcgctccagcaccgataaagcccacctcgagtgctgcgctgctccaccccccgggaccggaatgcagaggcggaggacctggattgattccttcttctgtgagcaatcaaaagcttcagccgggggttgtgggggaatcggagcttcttatccgagagcagacatggagcagagtagtgatgggttgccaatcagccagcggagggctaacaggtcaacaaaacactcaagcaaggcagatgaggtggctgaagacatggtgcagagtaatataccacatgaaactgtgagactgtgccaaggtgtggaatcagaagagatagagggacctcctcacaagaaaattgtgcagaacttcacggagagcagtagttccaaaaaaaaaaaacaaaaaaaaaaaaaaaaaaaaaaaatatcgtacgtcgactcaaataatgctgacactattcatttgttattcattgttgttaattagaagcctttatggtttggaatatttactagctgagaatgtccattatgcagactgcatttaaatgttcattagaactgcatgccttttcttcactttgtgctgatgggccttccatatagatggacacgcagtcttgacccagcaataaagaaacaggattggtcagaacaggaggatctaaaattgattcgagctcatcaaatatatggaagtcagtggcttaaaatggtcaaacatttccctgggaggacaaatcatgcactcaaagaacactggagaaatcgtatcaaaggaaaactgaatttgtgtttagcctcaggattgctagaacaagttccggacctggaaggtcagtcagaaattccgaaggacagtcagggttcagctgacaggagtggaccgccaccagttttacgagcacagcccaaatctaaaccggaactcccagaaaacgctggtacatcaggagaaggaacttctgattccattcgtcctaaagggcccaacgcccatccaaccgaagtttctgaaaaggtattggctaaatcaaagcagcgtgccagagccagaaggagattggattttctgtcaaccccagtggagctcaaattgtgcactgctgcggcaagttgtcaaaggcctccccagaaaatggatcaaccgggtccagtggccgaaaacatctctccgtcagatgcatgtcaagacatttcacagaatgttccaccagagcgtgcggatgccatcacaccgctggcttctagtaaccaccattcaccaacgacaccagatgatccattctctctcgaaatgcatgaggcgaacgcatcagatcttctggacatgtcctactgtgatggcttgataatcgattctcgtcgtgatccacgtgacggtagcctcatgtagaagaaaaagttaccaacgcaaaatgacacttttaatagcaagagtgtcttcctgaaatccagcaactccctgtataaaaatcgtgttgcatgttggatggaacttgtatcttgtcttggcaaaaataattgcattgctgttctgttaatgcccctaactggtttggagagcatttttcttttgcaggtttgaagagcattttgaggggtgttgtaggtcaaaatgattttttttcgttgttttgggttggacaggtccccataactctttttatgc

SEQ ID NO: 3066 - DNA, 2437 bp, Zea mays
  Clone ID: TF_ZmC300_35
ttgggtacctcgaggccggccgggatggtcggtcgtcaatcggccacgattcccagtcatcaccaattattactgtctttcgtccacagctactcatcaatgtgatcgacatgaacctcgcgtccgcggtgcgagtgttcttgtcctactgcctgctgctccaccggtggatggggtccgagcaggccggaggcgtgttcgatcaggggggccatagcgtcagcctcacccgcctcgacgaagcaagggctccgccgaggtgcgccgtgcagtcgtccctgtccagcgcggccagcctgccgccgaagccgctgctcgtcgccgcgccgcgcgagactggggagtacccggtgatcctgttcctacacggctacctcgccgtcaactccttctactcccagctgttcgagcacgtcgcctcccatggctttatcgtcgtcggacctcagctgtacaccatatccggggccgacacaaccgaggagatcaactcagcggcggccgtcatcgactggctagccaccgggctgccgtcaactctgccactcggcgtccgcgcggacctaaccaaggtgtccatctccggccacagccgcggtgggaaggtggcgttcgcgctggcgctgggccacgccaaggccaagctcgctgtccctctcgccgccgtcgtcgccgtggacccggtggacggcatgggcgtgggcaagcagacaccgccgccgatcctcacgggcaggcacggctcgctgcacgtgggtgcccccaccatggtcatcggcacggggctcggcgagctgccccgcggctcactgctcccgccgtgcgcgccccggggcgtcagtcacgcggccttctacgacgagctggacggcgcggcgccagcgtgccacctggtggccagggactacgggcacacggacatgatggacgacgacacgccgggcgccagggggatgctcacgcgcaccatctgcaggagcggcggggccagggcgcccatgcgccgcttcgtggccggcgccaccgtcgcgttcctcaagaaatgggtggctggggacgccgcggcgatggatagcatcacggcgcggccggaccaggcccccatcgcgctgtccgtggtggagtttggagatgagaaagcgatagcttagctgctagacaatatgtgatatgtgcaggcgctagccactcaggcaggttggtgatgacgttgaaattgcagatgaaattaaggccctgtttcaatcccgtgagataaactttagcagcttttttttagccacttttagccatttgtaatctaaacatgagagctaatggtgataattgaaactaaactttagcacttcaattcatatagctaaagtttagccggaagctaaagtttatcccgtgagattgaaacggggccttaaactaccatacatgttgtcttcaacaacgagatttaacagcttaggaacaaaatctccaagctagtagctagctaataataagtggtccatgacatttcagccccacccccctccatcatgggtggagctgcagaagagcaaatcggtggctgctgacctcctgcagcccaggtgactgctgtctggctgctgctgctcgcctgactggcatggcactggaagggggatgatgcgagctgctgctggccaccaccaaaggcatagcagtatgggttgtaataagcattattgttggtgctagtgaaagccggcagtgagctgttctgctgctgctgctgctgctcctcccatggctcagcatcgtagaggccgacgtcgttgatgctgtagcgctgcttccttgtggtgctctcctgcctccggaagtacttctgtgcatggctggagacctgcaccggcgtcttagtggtgacgaagtccttggagatgttcttccaattgccgcgcccgtacacacgcaggccacgcaggaaattcctgtgctcctccagagtccaaaacctccctgcacgttgttggttatcctgtcgaggaacagcaactaatttcctacggcgctgttcctccagcagcatcctcttcgccttcatctcgtctgctaaatacccatccatcgtcctgctgtgcaccccaccagagttgagcaggagctggttgctgctcagctctgccccactgtttatcatctccaccacaagctcaacgtacaagtcagttacctggcgcttatccttccctgggaacattgcctggagctcatccagaatgtcgtcgttcgtgctgttgctggcgccgtgacaagcgatgagagatctcaccatctcgatctcgttggcactccagtcgacgttgaaccttgggtccatgtccatcggccggggttagctaagctagctagttagtttttttgagggttcagtatactacaacacttgcgctgaatctcccggccggcctcgagg

SEQ ID NO: 3067 - DNA, 589 bp, Zea mays
  unsure (1)..(589): unsure at all n locations
  Clone ID: TF_LIB5117-027-A1-PF1-C3
aaccacccaccaccaccaccgctcgccgccacccacaagaatcaatcgtcttcccgtgatcccattccgtcgtaggctcgtactagatggaggggtgtgaccggatcaggggcccgtggagcccggaggaggacggcgcgctgcggcggctggtggagctccacggcgcgcgcaactggacggccatcggccgcggggtgcccggccgctccggcaagtcctgccgcctgcggtggtgcaaccagctctcgcccggggtggagcgcaggcccttcacggccgaggaggacaccgtcatcgcccgcgcccacgtccggatcggcaaccgatgggccgccatcgcgcgcctcctccgcggccgcaccgacaacgccgtcaagaaccactggaactgctccctcaagcgcaggctcggcgaccttggtgctgacggggtcaccgagggtgatctggacgagcggccgtgcaagcgcgccagcgtcacgcccgagagcacctccggatcggggtcggggtctggctctgggtcggaccgcagcgacctcagccatggnggtgccttcgggcttggccaggtttaccggccggt

SEQ ID NO: 3068 - DNA, 1171 bp, Zea mays
  Clone ID: TF_ZmC79863_1
tcgaggccggccggttttccgcacagcaaacaagtacgaggagtcgaggactgcagctgcgccagcaaacgccgacctgccgggacatggcagctgcggcgccggccgcgggcaagggaaaacgaaagcgccacctctccgaggacgacgtctgcctcctccaaaggtacaatccggggacgatcctgacggcgctgcaggaggtggcgcagcatgcggagggccggatcatcgactggagggcggtggtggcgaagtcggccacggggatcacctccgcccgcgagtaccagatgctctggcgctacttagcatatcaccacgacctaaacgagagcatcgaagccggtgacctgcctctgggcgatgacagtgacctggaattggagcttgaacccaatcccagcgagaccaaggaagctttatctgaggcctctgcattggccaaggcgctaatatccagatcttcacgtgagcaagcctcgggtcatcgcattaatttggatgttcctgcgctgaacactcaaaatgaaaagatagtgcgggttccatctaagcagcttgctcagagtcatcgtgtaacaaatgttacatgtcctgtttccaatccaaaacagttatctcatatagtaccctctcctactcatttggatccaaatggagcttctaaaaagaggaaaaaggcaaaagcttggtctaaagaggaggatgcagacctagcagctggtgtgcagaagtatggtgaaggaaattgggaggtcattttgcataaatgtaactttgataaatacagagaacgccccaatcatcagttatctcagagatgggcgctgaagcgtccaggaggatcaaccaagcctgctagcactaaacacgcctctgttggcttagaggaaagatcagcagccctcaaggcactttcattggctgtcggtcctatgcgtggatcatctgcactgagatcaggagcttatccacaaagcattcagcataagtctacagtgtttgctcctaagatgccagaactaagatctgcagtaaccccttcaccggcaccagcagtgccagtcccagttgctatgcctctgcgtgtggcagctcaagtacaggcttcggctcatcaagggcattaagcttctgcccatgcttcaccacccaaatttgtaaatgc

SEQ ID NO: 3069 - DNA, 615 bp, Zea mays
  Clone ID: TF_LIB4745-001-R1-K2-F12
gggctgtctctacatatgcagcagctataggtccctcctctcatcaactcatcgtgttcttcttttccaatccctacactgcttgctagttgctacacacacccactgatgacccacaactttaaagaagctgcaggtgcagtgcatgcaaggagacaggccacgatactgtctgagatggaaggggccatgacgacgagaagcaagcatcgtcgtgatgaggaggaccaggagatgacgatggtggagctgaggagaggcccctggacgctcgaggaagacaacctcctcatgaactacattgcttgccacggcgagggccgctggaatctcctggcccgctgctccgggctgaagatgaccggcaagagctgccggctgaggtagctcaactacctcaagccggacatcaagcgcggcaacctggcgccggaggagcagctcctcatcctggagctccactccaagtgggggaaccggtggtccaggatagcgcagcacctgccggggcggaccgacaacgagatcaagaactactggcggacgcgggtgcagaagcaggcgcggcagttgcccgtggacgccaacagcgccgtgttccgcgacgccgtccgc

SEQ ID NO: 3070 - DNA, 800 bp, Zea mays
  Clone ID: TF_ZmC11894_4
ggggccggcagatccccctcctgctcatccgccttcctttctcgaagcgcccaatttattaccttcccctaatcccgcagccttgccagaagccaaattggtgctcctcttatctcgccgcgccgccaccgctccatttccgctcccccagcccccccaaaagaacctcgtaaccctactcgcgggattccgcaggccgccgcttgcttagggttcatcactcctgttcacacccgatggccgtggacgaggcgagcagcagtggcggtggggaggaggggtgcgggtcgtggacccgcgagcaggagaaggcgttcgagaacgcggtggcgacgatgggcggggaggaggacggggacgcgaggtgggagaagctagcggaggccgtcgaggggaagacgccggaggaggtcaggcggcactacgagctgctggtggaggacgtcgacggcatcgagtcgggccgcgtcccgcttccggcgtacgcagctgacggcgctgccgaggaagggggcggtggcgggaagaagggaagtggcggaggagggacccatggggacaaggggtcggcgaagtccgccgagcaggagcgtaggaagggcatcgcctggacagaggacgagcacagattgttcctccttggacttgaaaagtatggcaaaggtgactggcggagcatctcgcggaactttgtgatctcaaggacgccgactcaagtagctagtcatgcacagaagtactttatccgtctgaactcaatgaacagagaaaggcggcgatcaagtatacatgacatcacc

SEQ ID NO: 3071 - DNA, 722 bp, Zea mays
  Clone ID: TF_ZmC27878_4
gggtacctcgaggccggccgggcggccgggcggctttttcactaaacgcttcatccgggagcctccaccatccgagagaagccagagaaaaggttactccgcagaaagcaaaaccctagcccactccggcgcgccaccggccgatggtttcgatgagcaccacgccgaagccgcttgactccgccgtcgtcagcgcagccgttgacggcggggatgagggtggtggtggaggcggtggcgggaagaagcaggcgcacggggcggtgatggcgccgccaccgatggtggtcccggccgcggcgcccgcgggcgaggaggaggttcggaaggtcaggaagccgtacaccatcaccaagtcgcgggagagctggacggagccggagcacgacgagttcctcgaggtcctgcagctttttgatcgtgattggaagaaaattgaagcatatgttggctcaaagactgttatacagataaggagccatgcacagaagtacttcctgaaggttcacaataatggtacgggcgagcatctgcccccacccaggacaaaacgaaaggcagctcatccatatccacagaaggcatctaacaatgtttctcaagctattttatcacaacatcaacctacccagagggagcaaggttctgtcatgcctatggatactgctactgagagaaacaaaatgagaatgtcgtggtgacttactgcgactgtactcttg

SEQ ID NO: 3072 - DNA, 633 bp, Zea mays
  Clone ID: TF_LIB3594-051-Q1-K7-G7
gaagaaaggcccgtggacccccgaggaggacctcatgctcgtctcctatgtccaggagcacggccccgggaactggcgcgccgtgccgaccaacaccggtgtgtgatgaatcatctggtgatgcagggcttgatgacgcgcgcggcggatggaattgcctttcaagatccaagctccgagcttacttgatttttttgtttgtttgttggtttggtcggcacgtgtgcgcgtgtgtgcagggctgatgcggtgcagcaagagctgccgattgcggtggacaaactacctccggccgggaatcaagcgcggcaactttaccgagcaggaggagaagctcatcgtccacctccaggctctccttggcaacaggtgatggtcactcgcctgtcgtcgtcttaaagcttttgttcccgttttgttttttccgctgtaacaaatggatcggacaaaccaaatcatccacggcacgaggtgatcgtgtgctgagcttgttgatctgcatgccgtgcacttgttgatgtgtcgtgcaggtgggcggccatagcatcctacttgccgaagaggacggacaacgatatcaagaactactggaacacgcatcttaagaagaagctgaagaacatgcagggcggc

SEQ ID NO: 3073 - DNA, 1254 bp, Zea mays
  Clone ID: TF_ZmC1193_4
ctctcgaccgatcggcgccacgagtgctttgctttctggctgctgggagcgcgccatggggaggtcgccgtgctgcgagaaggcgcacaccaacaagggcgcgtggaccaaggaggaggacgagcggctggtggcgtacgtccgggcgcacggggaggggtgctggcgctcgctgcccaaggcggcggggctgctgcgctgcggcaagagctgcaggctgcgctggatgaactacctccgcccggacctcaagcgcggcaacttcaccgacgacgaggacgagctcatcatccgcctgcacagcctcctgggcaacaagtcagtgagcgtgtgccgggctgccggcgtccttctgtctagctattactctattagctctcgtcgtcgctgttcctattcctagtcgatacggttaatacaacaataatgctcccggccgggcgcttcgatgatcgcctaacgccacaacgaacctgctctcttctcttaccccccgcaggtggtccctcatcgccgggcagctgcctggccggacggacaacgagatcaagaactactggaacacgcacatcaagcgcaagctcctcgcccgcggcatcgacccgaagacgcaccgcccgctcggcgccggcgccgacgccgccgcgccacccggcgtggtcgcgcaccgggcgctgctgcaccgcgcaggcgcagcccccgtcgagctcgccgtgaagccggcgccggcggagtcatccgacgacggcggccggagcagcgccagcgccagcagcggcggcggcgccagcgtggaggagccgcggtgccccgacctcaacctcgacctgtccgtgggcccgccatgctcgccgcccaagacgccggcggccaccgcgtcgacgcccacgtggcatcagcagcagcggacgacgaccatatgactgtgctaccacctcgaagtccgcagcggggaggcctgtagctgcaagtccccctcgccagcggcggcggggttccggtttctccggccgctcgaggagggccagtacatataaggcaggcgtcgtcgatcacagtaggccggcagaagcaaacccccccgccgcaaaacctgtaaaaacaaccacagaacagagtttctaatggagatgatgactgatgtggatggatgatgagagattgagagcatagcataagatttcgtgtccacgtcgattcaaaccgatctatttcttaagaaaaaaaacaaaaagggcggccgtcgactagtga

SEQ ID NO: 3074 - DNA, 1653 bp, Zea mays
  Clone ID: TF_ZmC1597_1
cccgggggattattagctcagcattctcccggggtcaaactgtgttccagacttccagtgtgtgtgtgccagccactactgtacaatagctctcttctttctctcgccgtagcttcgctcgtgctgtgcgtgtgtgtatatataagcatcctgcccccactccttttatctctctactcgtctccacggaatcgatcgatcggtgctttgatctctgagcctgagcaagcggtcgagctcaccaaccgccacgctcaagacaggtcgagtagctagctagctgccggagcggaaaaggaggcggtgcagtggcatggggaggccgccgtgctgcgacaagatgggggtgaagaaaggcccgtggacccccgaggaggacctcatgctcgtctcctatgtccaggagcacggccccgggaactggcgcgccgtgccgaccaacaccgggctgatgcggtgcagcaagagctgccgattgcggtggacaaactacctccggccgggaatcaagcgcggcaactttaccgagcaggaggagaagctcatcgtccacctccaggctctccttggcaacaggtgggcggccatagcatcctacttgccgaagaggacggacaacgatatcaagaactactggaacacgcatcttaagaagaagctgaagaacatgcagggcggcgaagggggcgcgggagggaagcgcccggccgttcccaaggggcagtgggagcggcggctgcagactgacatccacacggcgcggcaggctctgcgcgacgcgctctcgctggagccttcggcgacgccgctggccaaggtggagcctctgccgacggctccggggtgcgcgacgtacgcgtctagcgccgacaacatcgcgcggctgctggaggggtggctgcgcccgggcagcggcaaggggccggaggcgtcgggttcgacgtcgacgacggccacgacgcgccagcggccgcagtgctccggtgagggcacggcgtctgcgtcggcgagccacagtggcggggcggccgcgaacacggcggcgcagacccccgagtgctcgacggagaccagtaagatggccggcagctcggtcggcgcgggctccgcgccggcgttctcgatgctggagagatggctgctggacgacggcatggggcacgctgaggtggggctcatgaccgacgtggtgccattaggggaccccagtgagttcttttaattaaggcacaagtaccaccaaaagcaaactgatcaagtagagatgcaagaacaaaaagaagaaattaatcgccgggttaggtaactagttaagcagaaatccaacaaaactaaatgtatttgaattctcggtgaatttgatcgagttggatgtcgatatagtttttgttttagtcccttcttttatttttttctctgttgtttctctgatgttagggtttgtaactgatcatgtaagcttatactaatgacaggttcctaaatggaccctgcatgaaaatacatcttataaattaaaagatctatacaaaaaaaaaaaaaaaaaactatatatttagaagttataatagatgctcaatcctcaattatattactccaatatttttccttcatcaagctctatatatttttcgtgttattcttactctacta

SEQ ID NO: 3075 - DNA, 1651 bp, Zea mays
  Clone ID: TF_ZmC20648_1
tttccgcggcgccggcggctctgcatgcgcgcgccctgcggaaactgatccatgatctgatcccacggcaccagcagcagcagcaacggtcgaccgccggcggccggccggccacggtgggcgcgcgcgcggtggcaaataaagagcttagagccgccggccgggatctatggggcgcgaggcggcagcgacgaggccgcccaagctgaggaggggcctgtggtcgccggaggaggacgagaagctgtacaatcacatcatccgatatggcgtcggctgctggagctcagtcccaaagctcgctggcttggagagatgcggcaagagctgcaggctgagatggatcaactacctgcggcctgacctcaagaggggcagcttctcccagcaggaggaggatctcatcgtcagcctccacaagatactaggcaacaggtggtcccagatcgcgtcgcagctgccggggaggacggacaacgagatcaaaaacttctggaactcgtgcatcaagaagaagctccggcagcagggcatcgaccccgccacccacaagccgctcaacgacgacgacaacgctgctgctgctgctgctgcggacaacgacgccgccgtggcgccgcaccaccatcgtcgtcatcaggacgaccactgcggcgccgccaatattgataataataataataacaacaacaacaacaacaatcggcagctcccctcagccgacgaccactgcttcgccatgagcagcgacgaccctctcgcgccacactccccgaccgtcagcttcgacccactgtccgtcaccaacgtccccacggcaatgcagcagggctcctacggctcgttccgctccgacaacgaccacctctgcgactacggcggcggcggcgtcgacgtggtctcggacgccgccacggcgtacagcgccccctacacaggcggcggcggcggcggagacagctccagcaacagcaacggcaccggcacctgggcctgcagcggcggcgagccgatgccgccgcacgtggccatgttcggccgcgatgctgcccaggcggcggcgtaccatcagttcgtcgacccggccaagtacagcccctggcagcagcacccggcggcgaggctccatgatcacaacgtcggcggcgctgctgcgggcttcccgatacggtccatgtcgcgggacctgccgggttcctgcttcgacctcgcccgcagcgcgctggaggacgagttcagcgtcgacttcctctgacgtacgactacgccgacgcgcgacgtacggccaggaggtcgttggtgcatgtcgtcgtccaacactcactcgatcgacagacacacacacacacatacacttttcattcactactactgctactattacctcagtcctcagagatcacccaaaaaaacaagacacacactccttgtgtctgccatattcattcgttatcccccccccccctcttttcatgtggtccggtcatactttatttggacccatcgatcaagttggttaattaacacgttttggtggtatgttatactgtgtttataataagggttttatctgtattattatatatacacctcaattatattcatgggaaccaaatttttttgttggaaaaaaaaaaaaaaaaaagcggcc

SEQ ID NO: 3076 - DNA, 1118 bp, Zea mays
  Clone ID: TF_700203222_FLI
gcggcggcgacaagacacaatggggtgccggtcctgtgacaagcccaagatgaactaccgcaaggggctgtggtctcctgaggaggaccagcggctcagggactacatcctcaagcatggcctcggctgctggagtgctgtcccggcaaaggctggtctccagagaaacggcaagagctgccgcctgcgctggatcaactacctgcgccctggactgaagcgtggaatgttctcccaggaggaggaggacgtcgtcatcgatctccaagccaagctgggcaacaagtggtctcagattgcgatgcatctgccggggaggaccgacaacgaggtgaagaactactggaactcgtacctcaagaagagggtgatgcagcaggcccagggcgcgtcgtccaactccagccccaagagcccgcccgagctcacctccatgagcaccaccgccgacctgtcgtccatgtccatgcccatgcccatgtccatgcccatgcaccagcgccaccacgtcaagaacaacagcggcggcggcagcaccacgacgtcgcacgaccagcaggacgacgccaacatcagcggcagccgtgcagcgctgtcggccccaccgccgccgcccctcgcccagcagccattcgagcaccaggcggctaggagcttcgtgttctcggactgggcgccggagagctactcgctgtccacgcactggcccgccgccacgtcgacctctggcaacgtgacgccgtcccacggcagcgccgccgccttcggggaccagatgagcggcacatacggcgccggcgggctgccgccgccgcaccaggatcaccaccacagcgccgcgcccgccaccaccggcatcgcggggagtggctactttgacctgctcaatatgggagacatctacggtggattcagctcgacaaacaacgatgatctgctcttctgaactcaactgacgacgatggaggcgtgatcagtgttgtgcatgagtgagtcaaatgcagcggtatattgttggatttgttgcttcgtcttcttcttttgtacgtattttgtaacaaaattattatttgtaacaacattattaattgcgatgtagagaacacaccctaggctgg

SEQ ID NO: 3077 - DNA, 1130 bp, Zea mays
  Clone ID: TF_ZmC2012_1
gacaaggcggcggcgacaagacacaatggggtgccggtcctgtgacaagcccaagatgaactaccgcaaggggctgtggtctcctgaggaggaccagcggctcagggactacatcctcaagcatggcctcggctgctggagtgctgtcccggcaaaggctggtctccagagaaacggcaagagctgccgcctgcgctggatcaactacctgcgccctggactgaagcgtggaatgttctcccaggaggaggaggacgtcgtcatcgacctccaagccaagctgggcaacaagtggtctcagattgcgatgcatctgccggggaggaccgacaacgaggtgaagaactactggaactcgtacctcaagaagagggtgatgcagcaggcccagggcgcgtcgtccaactccagccccaagagcccgcccgagctcacctccatgagcaccaccgccgacctgtcgtccatgtccatgcccatgcccatgcccatgcccatgcaccagcgccaccacgtcaagaacaacagcggcggcggcagcaccgcgacgtcgcacggccagcaggacgacgccaacatcagcggcagccatgcagcgctgtcggccccaccgccgccgcctctcgcccagcagccattcgagcaccaggcggctaggagcttcgtgttctcggactgggcgccggagagctactcgctgtccacgcactggcccgccgccacgtcgacctccgggaacgtgacgccatcccacggcagcaccgccgcagccgccgccgccgccttcggggaccagatgagcggcacatacggcgccggcgggctgccgccgcagcaccaggatcaccaccacagcaccgcgcccgccaccggcatcgcggggagtggctactttgacctgctcaatatgggagacatctacggtggattcagctcgacaaacaacgatgatctgctcttctgaactcaactgacgacgatggaggcgtgatcagtgttgtgcatgagtgagtcaaatggatgcagcgcgcggtatattgttggatttgttgcttcgtcttcttcttttgtacgtattttgtaacaaaattattatttgtaacaacattattaattgcgatgtagagaac

SEQ ID NO: 3078 - DNA, 1316 bp, Zea mays
  Clone ID: TF_ZmC24450_1
ctcggccgggagggatcctcctcggccgcaaacaaaaccctcctcgtcatccgcgcccgctttcccccctgccggcccccggtctcgctctcgcccaagcaccaaatcttcctcccactcatcacaagacgaagtttcagtgcctgcgcgtgccgcgcgatctctcgtccttggcgtcgtcaagacgcgttagtttcagtgcgcgcacgagtgtgtgttgtgggagttagtgagagcgagagcgagagcgagcgcaccaagcgattcggcgggcggcggccgatggggagggcgccgtgctgcgacaggaccaagggcctcaagaaggggccctggacgccggaggaggacaagctcctcgtcgactacatccagaccaacggccatggcagctggcgcctgctccccaagctcgcagggctaaaccggtgcggcaagagctgccgactgcggtggacgaactacctccggccggacatcaagcgcgggcccttcacatccgaggagcagaagtccatcgtccagctccacgccatcgtcggcaacaagtggtccatgatcgcggcgcagctccctggccggacggacaacgagatcaagaactactggaacacgcacctcaagaagcagctgcgtcggatgggcctcgacgagcccccgcccggcccggccgccggctgcccctccgcgcgccacatggcgcagtgggaaacggccaggctcgaggcggaggcgcgcctctccctcctcgccaccgccgcctcctcctcctcctgcggcgccatcgcggccacctccgcctcatcctcctcctccaccgtggacttgaagaccgcatgcgccaggcccgcggacatcttcctgcgcctgtggagctcggacatcggggactccttccgccgcaagacggccgcggcgcccgtggtcaaggggaaggacgcggtgatcaagcaggagtcgcaggcgctgctgctgggtcccggggacgactcctcggccgcgtccaacgagacggaggtggcggaggcgctggaggagtaccagatgttcctcgacttcgccggcgaagagctggggctgtttcacggccggcacggcggcttctcgctgttcccgccgctcgacgtgctcgccgaggcgtccctggacacggcgttcaagtgaagacgtagcgagtaccacgtacgtacacatacctattgccatgggcaagcggcagtggacatgcctctacggctagctgtatactgtacgccgcctccgccttaacatgagcgcggatgtactatgtatatatgcatgctgtctcgcgtacc

SEQ ID NO: 3079 - DNA, 967 bp, Zea mays
  Clone ID: TF_ZmC27687_1
gggtggggtgtgtttttttttttttttttcccctgaaaaaaaaattattcatggatcctccaatgcatgcagaaagacatctggaacgacgaggaagacagtgttctgatacaagcgcacaaggaggtaggcaacagatgggccgagatagccaagcggctgccgggccggacagagaactccatcaagaaccactggaacgcaaccaagaggaggcagttcgcacggaggcggagccgtgccagcgcctccacctccacctccaagggccctcctaaaccaggcacccttctgcagaactacatcaaaggcctcggtattggcccagtaagcaaccggagcgccgcaccgcttcctgagcctaccacaccgccgccgccgccgccgtcttcgcctgaaactcccggcggggcgaggtcagcgaagcaggctggtgaaagtaccacgctggaggtggaacgccgcagcccgtcgtgcgacgtgctggtggattcttcccagtgcaccaccattcttccacctactagcgtgcatgggtacgacgagtacagcaactgcagcggcgagtcccaccagtcctgcgaggtgctcctcgcccctatcatcagctgtggcgacgacgcgttctcggttggaatgtgcggcggcggcggcggcctgttcgacacggacgacgcggacgccttcttgcaagcgtacggcgtggccgccgacgacgtcgtcgacggcatcggcatgggctactacgtcttcaacgacggccatgtcgaccacgcggccacggtcgacgctgagatcgacatggagacgatgatgatgatgtgggacgacgacgacgactacgccgccgccctagggttagggtgtgctgctgggccggctggtgtggagagtgctgtgcgcgtgaaggaggagatggacctgcaggtggagacgatggtggcggccacgcacaagtgcggcgatg

SEQ ID NO: 3080 - DNA, 2798 bp, Zea mays
  Clone ID: TF_ZmC1443_1
accaggagcagagggagcaacagtatgggatttgaaccacagagcacgccggccggtctgccggacaagccggaagcaggccaagggaagggctaaacctccatcccttggcacaagccacaaccaccacctccaccaccaccaccacctttaaaagaagggtgctaaagggctgtcctgcgaagaaaaggagaggagtgcccctagcctttccttgctttccactgaaatctcctatctgcagccatgcagttgctcaatcctggcctcagatgaagcccaaccattcattggtatataagtcgctacaacctttgcaatttcccactgcttcagaacatcgtcgaagaagctctgtgctaccggagaaggtgttcgtcgtcgtgcataattatacattccgcagacctgtaagctctgtgagtttggttggagctcccaggttctgcattgcgttgagatggggaggcattcttgctgctacaagcagaagctgagaaaggggctctggtcccctgaggaggatgagaaactcatgaatcacataacaaagcatggccatggctgctggagctctgttcccaaactcgctgggcttcaaaggtgcggaaagagttgtaggctgaggtggataaactatctgaggccagacctcaagagaggggcattcgcccaagacgaagaagacctcatcatcgagctgcacgctgtcctcgggaacaggtggtctcaaattgcagcgcagctgccagggaggactgataatgagatcaagaatctatggaactcgtgcatcaagaagaagctgaggcagaaaggcattgatcccaacacccacaagccccttactgaggctgatcgcagcggagcagctcccaccatcagcaccgagagaacctcagggtccagcgacatcaacccatcaagcgctggtgctctgggaaacttgagccacctcctcagcgagacggctcaatcatcaatgctgatgcccgtgtatgacaagaatcgcgctgaaactccaaacttggcacgccctaagctgccaccaaaggagctgttcctggagcagcttactgctggacacgagagtccatcaacctgccactcatcaggccaaactctctatttccctttccaacagcctttaggctacaacagtgagagtggcagtagcgatggggcgaatatgaattcactctggttcaaccagagtgacttcaactgcagcacaatttctacagtgatgccgccagtttcaccatcggccctctctacatcaatggggctgaatcttccacctgataatcctcgacatggaggaactggcattggaagtaccgcagtagattcattctactgggatggtactaatcctagcagcagtagcagtactgggagcagagggagcaacagtatgggatttgaaccacagagcacgagcacaattctggagaacagtgtcttcccatggacagacattggacaagaaaaagatacaagggctcacctagtagcggaacttaagtggcctgactcctttgccgagacgaccacagccatgcagaaccagagccaaacgctttatgatgatgtgatcaaggcagagagccaattcaacatagaagggatatgtgcttcttggttccagaatcagcagccacagcaacagctgcaggtagcaccagacatgtatgacaaggacttgcaaagaatgcaactatcttttgagaatatctaggcattatgttccaccacatggaacagagcagatcagaagaagcagaaacttgtaattttcagagattcgtgggcagaattatgctgaattgcttacatagatacattaagttgatacagaaatcatcctccacagctgctcctcagttgaagacctggcaatatcaaggaaaggacagccctggcattagaagttgcagcagaatgcatacaaaagtatgttctagagtctccttttctttctcttgaaaattgatgttttccttctgtacacgactcaacttttgcatatttgagtttttgttctctctggtggaaattaaataaatataggcagccatgggcaaaactgcatgtgtcggtagctctcaacatgcaagtagacccaaacatttcaactgctgccatgcacgtccatgcaaattaattattgcatgttgtatttttttttctttttttttgataagttgccgacaaacgacagttgtatatttgtaagaagaaatttggaatgttgacctgagagctattttcttccccctttcactttcccgtttctgtcgtaaacttttctgtgtggagaacccaagctacttgagcgctttctacttgaatacaggaatggaaaacgattggttgatttgatagggtacaaaggagcaatcattctcaagaagaagtaaacacattcaggaaagaaaaaaggaagaaactattcatgaatatctacctaccatgtagattgggtaatctatgaagcctcaatgtggcaagaaaattggtggagctcggaagtctcaaaatcaaaaagatggcgtgtgagatctacaacaagactcgtggttggaggccagttgacagacgaatccgatgaaatgaaacatgttttgttatctggttattttggttcaataactgtgcggtcgttctacttcttctcccttgtagcgcctagctacaggaaaaactatgagatagaaatgctgcttgctgctttggtgtgaaaaaaaaaaaaaaaaaaaaaaaaaaagggaaaaaaaaaaaaaaaaaggccccta

SEQ ID NO: 3081 - DNA, 139 bp, Zea mays
  Clone ID: TF_700451947H1
cctccactcggaatgactatcctgctgccaagagggtcaagttggacagtgtcagagtcctgagacagatcagcaacaaccgaaaatgcaccagctccaggtcctcggacaccgaggagaatgtcaagaggtgaataca

SEQ ID NO: 3082 - DNA, 330 bp, Zea mays
  unsure (1)..(330): unsure at all n locations
  Clone ID: TF_LIB3066-040-Q1-K1-A5
gcacacagctcatcagttcttcttcgttgtcttggctagctgcctagctagctagctggttcctcactcctctccgagaaccccctttttcatctctctctctcgcctagctcctttcgcgatgttatcttctctgctggcctcacaactcgagagagactcgtgaaaagaatccagatatataaagagatcgagggcagctagcttaattattagcatgtcgatgagcttcttgagcatggtggaggcggagctgccgccggggttccggttccacccgagggacgacgagctcatntgcgactacctcgcgcccaagctcggcgccaa

SEQ ID NO: 3083 - DNA, 663 bp, Zea mays
  unsure (1)..(663): unsure at all n locations
  Clone ID: TF_LIB4759-104-A1-K1-B8
ttgggaccctcgaggccggccggggcccgttgctcacttccctctcattctctcgacctcgccgcctccctcccaggctcccaccgtgccctaccttttcctcacgcccgcgtctcgccgccacgcccgcgtctcgccactgattgcggccccccatggagtcgtcgccctctcgatctgcgtgccactccatcgtcttcctgtccgcgcctcgtcttcatcctcgtgtcgccaccccgtcccggggtcgtcctcctcgcgcagtcgcagttggtgcctctcccgcaccctgttgtctccctcctcggcccgatgctgctactgccgccctcgtgggtcagcgctgccgcgaggcatatgcacggcgatggcgtcttggtcgctgcagtcggcatagtccatggcgtctgccttcttcttatagaagaccccagtcctccttgggcagnggtgtgtgggttctccatccagaactcgtgcatcacccagctggtcttgacgccgttgggggcgctaccgcggtagaagacgagggtcttgcgcatgccgacgacggcgcggtggtggcacgcggcggcggcgggccagctgcagggggtgtggatcacgcggtccttgccggtggccttccagtagccggacttggtggcgcggttggtgcgc

SEQ ID NO: 3084 - DNA, 1066 bp, Zea mays
  unsure (1)..(1066): unsure at all n locations
  Clone ID: TF_ZmC313604_2
gagaaaagaacatggtntaacaaggggaagaggtgcacagaagcttacttgggagatcccatggatcatatttgtagatgtctagctgcctgatgagctcaatggggagagacttctgatggatttttcttttaaggtaaaacctgacaagctcttcatctgttggatgaaacctgaatccagatacttatagaagaagttttaaaagtgtcacctattgtaactcacgtagggtcccattgtgcgaatctcaatgaggtatgtattctgcagcacgcttgggattaacaatcttgtgatctgatattcacctcggcacgaaactaactcgatgtcaagtactttgcatctaatgtatgtcttgtttctatagttaagcctcctcacagaataatctagctctctagatagctaccttaggaatttttaattgtgttcccttgaattttctaaaggcgaactatataagtacaattcccaagacactaggagacttgaaaattccactaagtgcagtactctattggaataacgagagtctaattccttttcacagtacatatatcttacagcggtatgtgcacatatacctttgattctcccatgatcccaaaatcctttttggacagacttccctcttcattggtaccctttttttctcacctgtatatgtgaatttgaaggggggtttagcgaacacaaagaaagcactgtaaaaccttcgagagaaaagtatacatgttccttactcatcattgatctcctgagttgattgaaattaaaaaaatagagatttttttattatacagcagatctctgtaatttgtaacatggtacaagatatagttttccaaagaagaaaggcctctttttaaaaccttggtctaaatttcttgaatcggnatatgaggggaaaatttcatgccatgaaacttgcttgtgcgaaagcttatgcatgccacccagtttnatgaagtgcacctatcgaaatggaatttagctaagctgagggaaagtgcctgttttcacatncccctgagttgagctgaaattcctgagtcatgtc

SEQ ID NO: 3085 - DNA, 631 bp, Zea mays
  unsure (1)..(631): unsure at all n locations
  Clone ID: TF_LIB3591-121-Q1-K6-E2
ctcacgcacgcccccagctctctccttctccctgctcgctcgctggccatgggcgctccgagcagctggaagagtcctgcgcgcgccaagtgaccggagaagctgcgagatcagagtagttgcttgccgctcccgtgccaccaaattagattggacgtagctagcagctagctgagccgtagtgcgtagcggcaggtagggtgctagctcgatcgttatagctgcgtactagtggtgtcgcagcagaagcagtagccagcttcagtagccgatccggtggtaaaagcaacttttttttggacatggcggcggagggagccccggtgctggtgaggcatgctggcggcgtggaggagctgcggcagctcccgccggggttccggttccgccccacggacgaggagctcgtggtgcagtacctccggcgcaaggccttgggcgcgccgctccccgccgccgtcatccccgtcgtccgcgacctctacagcctcgacccctgggacgccgtcgacgtgccggccgcccctggtacatacacgatcgacgacggcgcttcgaaccaccagcagcatccatcggttttgtcagtactcagtngtagtaggagaaagaactaaatcgcaagcttttt

SEQ ID NO: 3086 - DNA, 747 bp, Zea mays
  unsure (1)..(747): unsure at all n locations
  Clone ID: TF_LIB4977-051-Q1-K1-F2
tgatacaggggtaggagaaggaggaggaggagtanaagcagctccacacctgtacgtagctgccgcgcgccggtgagcgaggtcgttcttgagagctgtatatatatatatagctccgcgacgacgccgatgatggccatcaagtcgctgagcatggtggaggccagcctgcctccggggttcaggttccacccgcgcgacgacgagctcgtgctggactaccgggccaagaagctcggcggcggcggaggcccctgtggtggtgagcatctacggctgccccaccatggtcgacgtcgatctcaacgagtgcgagccctgggaccttcccggtatgtaagacgacggcgcctacacatgctaatataacttgcttgttcctgtccttgatttctggccaagattgatatgatcgagcttttccccttgccaagtccttaattgcgcagcgaattcttcttccttccttcccttcccttcccttcctcttgggtttttgaattaatccccccctgctgtgtgagagcgctattaattattctctttggggtctgatctgttattatggtatgggttcctgatgactaaggagttgaattggtccctcacataatcctttatgttatggccatcaaaggatttttnttaagtgggaaaaaaaaaaaaaaaaaaaagggcgccctaggggccccccgaggcccccccccctttntgggcccccccccccctgagagggggggggggggg

SEQ ID NO: 3087 - DNA, 987 bp, Zea mays
  Clone ID: TF_ZmC9425_1
ggccgcgagcgggcggtggaagccgtcggggaaggagaagccggtggtgctgccccgcccgtgtggcggagggagcctcctggtgggcgtgaagagggcgatgacgttcgtgccccgccgccggaagaagacggcggcgttgccgtcgtcggcggccctgaagaccggctgggtcatgcacgagtaccgcctcgccgcgccgctgcacaagaacggctgcagcctggctcaggcgcaaggagagtgggtcgtctgccgcgtcttccagaagggcggcaacaggccgaggaggaggcagcgagaagcgtcgccgccgccgtccgctagcagcagctgcgtcacggatgcgtcgagctcggacctggacgaggtcagcagctagcttagctagctagctagcagaaccgaccgtacgtgccggctggccacaacatgcagtcaagaacgtacgtacgtatatgtataccgccaccagctcgtcgcgcgcgcagctgtgctgtgcatgccgtacgtgtgcggccggcctcgacctcgatctcgaagagaggatgtgatcaagctgagttacggataagggggaacaacccatccacacgcacttctcctccgacccaacattatttgttgttaactagtttttcttttctttatctctttctttcttttgcactctgtacgtgtaatgtaatgcagtgtaatttaattagtgagagaagcatgacgccctactaccggccggattattagttaacagcaaattaattactacgtacctactactcgcgtcagcagcttctactgtacttgaggtttcagaagcccaatatgtatattgtcaaattagtaacctgcattatatgcagaggtcgtcgtacgtgtccttaattagtgtctttgtaatatctcttcatgaagcgaggaggaaggaaagaacctgaatccatgcgtaacagcgcagtcgttgctgcataaaaccccccaaacacc

SEQ ID NO: 3088 - DNA, 684 bp, Zea mays
  Clone ID: TF_LIB4738-128-A1-K1-E7
acgacgacgagatccccccattccccaccaggtcgccgatgccgcctaccatctgacatcgatcgcccaggcagatcgcgcgcaagccacccaaacaaatccaaatcctgatccgattccgtcgatcggcggcgccgacgatggaggcccggcccggcgcgtggcgcctgcagcagcggggccccggcgcgcccgtcgcgggcctgcccatcggcttccgcttccgccccaccgacgaggagctgctgctgcactacctccgccgcaaggcgctggcctgcccgctcccggcgggcgtcatcccggacgccgacctcgcgcgcctcgacccgtcggacctcctcctccccgccgccgcaccacctgcggggggagccgccgacgacgccagcggggagcgcttcttcttccaccgccttggtgacaggcaagaagaagaagaggaagaggaagaagagcagcacgcggcggtggagagcgcgtcgtccacgtcgtcgtgcgtcaccgacgcctccgggaccatcgggcaggacgacgatggcgacgaagggatcagtggcagctgcagcgtcgcctcctctaattgagaccgactagaagaaacaagagctggctagcccgcccgtcgaccatatcacgggcgccgtgccctaattgccgtaacaccctctcagtctcagtccc

SEQ ID NO: 3089 - DNA, 424 bp, Zea mays
  unsure (1)..(424): unsure at all n locations
  Clone ID: TF_LIB3062-027-Q1-K1-G5
acaagcagagcagagcagagcagcgtcgtgcgtccgagaagaagacgactcacaagagcagaacgagcaccgatcgatggcagtgatggccggggcggcgtccatggaggtggagcagggacctcccgggcttccggttccatcccaccgaggaggagctcctcggcttctacctctcccgcgtggtccacggcaagcagctccacttcgacatcatcggcagcctcaacatctaccgctgcctcccaaggaggacatggtgatctgcaagatctacaggaaggccacgccactgaaggagctcgagcagagggcctctgccatggaggagatgcagacgcgcatcggcggggctagagcaacatccctggtccaggccgncggctccaccggcgacgactacctgtcgtccgacgacacaagc

SEQ ID NO: 3090 - DNA, 579 bp, Zea mays
  Clone ID: TF_LIB4739-062-Q2-K1-D10
aatggcctctctagatctttcaatctatcattgcttactagctctctttgccgtgtgtaccggacgagaggggaaagtaggcaagcacgtgtaaatacctcctcgagcgaaggagcaatccagctccaacagcacacgagtacatcgccatgccgagaatcggagaagacggcaatggccgagacattactattaacatcagggtgatggccaaactcacggcctgattccgtttgcacacccacggacgaagagctcatggtgcactacctcttgatgaaggccctctccatgccgtgccccgtgcccatcgtccccgaagccaacatctaccggtgcaacccctgagcatctccctgcgcaaggtgttgactacgagaaaagagtgggttatctctcgcccccacggagcgctagtaccccaacatggtccgcctcaaccccaccaccgggagctggtactggaatgtcaccagcacccacaggtcatgctcgacgtgtgcatggccacttaacacagcggcgccaagatattgcgactggtgaacaaggacacttgtcttctatatgggaacgacg

SEQ ID NO: 3091 - DNA, 548 bp, Zea mays
  Clone ID: TF_LIB5116-016-A1-PF1-E4
acaatgccggacgagcctatcgctgttctcagtcagtactcggtagagacagatcggcaagtccttgcaagcgcttcgctgaacctcctctagtcctcttcctcccagaactgccgcattaggtttcgatccactggtcgcgatggtcgttgatccagttctcaagggatttgacctcaacatcgcggcagtagatgagtcaagccctttggaaggaatcggccttggcctgtatgcgactgagttcatccacaagtacctcagattcaatcccacggaccaggagctgatggagtggctcgaggccaaggtgagggatggaggcgcgagatctgaccctctgattgataaattcatacccaccatagaggtcgagtacggctacccccatcctcagcaacttccaggtgtgacgatggacggcacgatcaagcattttttctgccgtccgagggcgttcgagagtggacggaggaaacatcggaagataaaggcggagcgcaacgatcgtaccgcatggcacaagaccggcaaaagcatggcattga

SEQ ID NO: 3092 - DNA, 763 bp, Zea mays
  Clone ID: TF_ZmC151_4
ctccgccgggcggcccacacccacccacacaaccgcacctcgcacccattgaccagacggcggcgctcatctcctcacccacggttctccccatcggcctgctggcttctccccggcttccccgatactgatcctcatcactcatgtctgctgaagttgctggaggacacccttatttcctctcgtgctacttctggttcatatactgcataaaattccgagattttacttgatacaagtggaacactcagagttttgtgcgaatacttcctaccatgtgaatcagttgtagctggtgaatttggcaagactcaatttctcccatttgagttcagaaacgtttgcttggtctcctgcttcccttgagtcttgccaacaatagttttctctcatctctttctgtgacttgaccaacatctcttttggtcctgtcagtctcgcaatactcccttccaaagacttgtctagaggttggattgccctgctctctgctggcactgcagcctgctgaagtctttacttgctgcattctgtgctcacacttttgaaagctgctctcttctgctctgcgttgttgatttctgcactcaagcttctctcttcctgggcaactagtgatctccttgaagcatttcagcttttacctagagatttttctgttgttgctgaaggcaagagaggctttagggtgatggcgcaaactagcctgcctcctggttttcgtttgcacccaactgatgttgagctcgttttctactacctg

SEQ ID NO: 3093 - DNA, 310 bp, Zea mays
  Clone ID: TF_jC-zmX019Bb09b1
tcctacccgtgggcggacgcgtgggtggggatgctcttgcgctatggaacacgaaagcacacgtgttactacacctactaggcgccactcgttgtaaagacagactggttcatgcacgagtacaggctcgctgacaccggccgccgaaccaagaaggggtcgctcatgttggagagactgggagctgtgcctgctgcacaacaagaagaacgagtgtgagaagatgcggtttgagaagggggcagacggcggcgcagctaaagaggaggaggccatggacatgtgcacctgccactcgcaaatcacccac

SEQ ID NO: 3094 - DNA, 278 bp, Zea mays
  Clone ID: TF_700240279H1
catcactccactccctccatttccctcaccttccgtagtagctagccgccagccattaaccgaaccaaccattcaattcacaggccacagtgagcgagtaaagcgtctaatggttgtgatggtggccgttcatcagcagtagctgcagcagcgcctgtacgcgtaggctgagctcaacctgcccccgggcatctggttctatccgacggttgatgagctggtcgtgcactacctctgcgcgcttgcctgcgggctgtgcttgccggtgtccatcatcg

SEQ ID NO: 3095 - DNA, 773 bp, Zea mays
  Clone ID: TF_LIB5026-014-A1-XP1-D11
gccggccgttccgggatcccgcgcaggggctgaaagcctgaaactgctcaagacgccaccgtcttcctccgcgatcttctgttctctgtctctccctctctctttcctctagctcccaaccaaccaaaccaagagtacgtcgtacgtcaagtgcgccgcgtgtgtgtgtgccagtaggctacagggcacggaggaacgccgtcatgagcttgatcagcatgatggaggcgcggctgccgccggggttccggttccacccgagggacgacgagctcgtgctcgactacctctgccgcaagctctccggcaaaggcggcggcggcggcggtggcggcgcgtacggcggcatcgccatggtcgacgtcgacctcaacaagtgcgagccgtgggatcttccaggtattccgtcaggttcaactttgcgctaccgtgtatcgatttgctgcaggttctatgttgcgcatgctgcatgcacacttgcacctatcaacaacaagagcccagcagccagcaccggccgtagaaattgaacttaattagtagttgcgacttgcgatagtaagtaagcactaagcaggaaggaagattcattgaaagaatatataggcccggcccggatcaatcagactgtaccatgcacaaggtgaatcacctaagaacgaaaaagatagaccattgaggttttatagatttattaggtatgtaaaaaagcgaagataattcatccggccatgtgtgccagaaggaaaaagtcgacgcccattttctctgag

SEQ ID NO: 3096 - DNA, 378 bp, Zea mays
  Clone ID: TF_LIB3245-008-P2-N1-F12
gacactatagaagagctatgacgtcgcatgcacgcgtacgtaagctcggaattcggctcgagctcacctcccgtggcagcagccgtccaacactcgtactgcagtccacagtaagaaccaagccacagcgaataaaagattctatggtgatggcgccggttgcggcgcaacagcagcggcgccgtgacgcggttgcggagctgaacctgtccccgggcttgcggttccacccgacggacgaggagctggtggcgcactacctgtgcgcgcgcgcctcgggtcagtcgccctctgtgtccatgattgccgaggtcgacctgtaccgctttgacctctgggacctgtctgagcgcgccctctttggtcgacgtgagtggt

SEQ ID NO: 3097 - DNA, 298 bp, Zea mays
  unsure (1)..(298): unsure at all n locations
  Clone ID: TF_LIB3245-421-P1-N1-G12
ctcaccttccgcagcagctagccgccagccaagaagccgtccaacgaagtaaggcggagcgagcgagtnaagcgtccaatggtagcgatggcggccgtgcagcanaagcagcagcagcagcgccgcgacgcggaagctgagctcaacctgcccccaggcttccggttccacccgacagacgaagagctggtggcgcactacctctgcgcgcgcgccgcggagcgccgtccgccggtgtccatcatcgccgaagtcgacctgtaccgcttcgacccctgtgacctgccggagcgcgccc

SEQ ID NO: 3098 - DNA, 217 bp, Zea mays
  Clone ID: TF_LIB3060-022-Q1-K1-C4
gctcagcatccagtcagtcagtcctcgatcttctatcctctactgcctgcatcgattccatctgcgatcgattccattccatgcatcgaagctgcatcagggccatgacgatggcagctacgacgactatgatctcagcatcagcgcatgcgtcgacgtcgcagctgccgacggagttccggttccacccgaccgacgaggagctcatcctgcacta

SEQ ID NO: 3099 - DNA, 891 bp, Zea mays
  Clone ID: TF_ZmC9425_2
gcacgagggagaagccggtggtgctgccccgcccgtgtggcggagggagcctcctggtgggcgtgaagagggcgatgacgttcgtgccccgccgccggaagaagacggcggcgttgccgtcggcggccctgaagaccggctgggtcatgcacgagtaccgcctcgccgcgccgctgcacaagaacggctgcagcctggctcaggcgcaaggagagtgggtcgtctgccgcgtcttccagaagggcggcaacaggccgaggaggaggcagcgagaagcgtcgccgccgccgtccgctagcagcagctgcgtcacggatgcgtcgagctcggacctggacgaggtcagcagctagcttagctagctagctagcagaaccgaccgtacgtgccggctggccacaacatgcagtcaagaacgtacgtacgtatatgtataccgccaccagctcgtcgcgcgcgcacgtgtgctgtgcatgccgtacgtgtgcggccggcctcgacctcgatctcgaagagaggatgtgatcaagctgagttacggataagggggaacaacccatccacacgcacttctcctccgacccaacattatttgttgttaactagttttttcttttctttatctctttctttcttttgcactctgtacgtgtaatgtaatgcagtgtaatttaattagtgagagaagcatgacgccctactaccggccggattattagttaacagcaaattaattactacgtacctagctactactcgcgtcaaaaaaaaaaaaaaaaaaaaaaaaaaaaggcggacgcgtgggtatattgtcaaatttgtaacctgcattatatgcagaggtggtcgtcgtacgtgtcccaaaaaaaaacacaaaaaaaaaaataaacc

SEQ ID NO: 3100 - DNA, 667 bp, Zea mays
  unsure (1)..(667): unsure at all n locations
  Clone ID: TF_LIB4743-073-R1-K1-G1
ccggccgggagacagcagtgcacccacagcttcctggctgcttcgtccatctcgcccaatcgccctcccctactactcgctccccaccaccctacctctgacgcttcccccacccagtgccgccactcccagccttgactcgtccgctgggccgaacaccgccctcgacctcttcgccgtgccccctccaggctcctcttccccgcacggcggcgccgtcctggtggttacgcggggcgccggtcgggcgcgatcggccgtgcgggcacctgggctccggagaggtgagccgatcccgtcgtcggcctcgacgtgccgtttctgttcgcctggtgctggtgccctggtcggtgtgcggtgtttttgttgggcgtttatctgttctacgcgtccctggcgctcggggtgcgactgcgcggcgtgtgcggtggtgcggccacgatggtggtggattcgcttaggacattgtaaaatggaagtactgcgtgatatgcacctgccaccaggatttggattccatccttctgatatanaacttgtttctcactatctcaagaggaaaatacttggtcagaaaattgaaaatgatcttataccanaagtggatatatacaagcatgaaccatgggatttaccttgcaggngcaatcttccaatcaaggacaac

SEQ ID NO: 3101 - DNA, 373 bp, Zea mays
  Clone ID: TF_jC-zmX700222002b1
tctgtctaggtgctggtcctgtactacctgaggaacagggagggaggcaacacgatctaccttgacgtggtaaaagacgtggctctggacaaaattgagccctgggatctccaaatgaagtgcacgatcgggactgtagaccaaaacgagtggctcttccttggccacttgggcgaaaagtacctgatggacaccctgaccaaccgggctaccaccgacgtgattctggaaggcaaatgttcgtgacaagcccatttacaccaagaggtgtctagatagcatgagtaagactctcgtcttctacaagggccgcgcgcccaacgtgcccgagtccgactggatcatgcacgagatccacctaaagactaccgat

SEQ ID NO: 3102 - DNA, 775 bp, Zea mays
  Clone ID: TF_LIB4738-071-R1-K1-H12
aaaccatccggctacagcaagcaaccgtagcagtcgtagatgtgcagcgcgcgcagccaattccttcttactcccccgggccttccctctgtctctctcctcttctcttcagatcgacgtgctggttgcagagtgcaaactgcgtatataatatacagttcgttgttcttccagctccgcacataaagatagatagatatacagggaaaaagtgtagtagctggagcagaagctagctagcatggggctgcgggacatcgagctcacgctgccgccggggttccggttctaccccagcgacgaggagctggtgtgccactacctgcacggcaaggtggccaacgagcagctcgcaggcgccggcgcagccatggtggaggtggatctgcacgcccacgagccgtgggagctccctggtacgtgtactcgtactcggtgccttgacagttaattcagttgtttgcttaatttagcgtctctagcaagcaatctccgtgcgtaattattaactcgattccgtgtcatggaacgagtaattacgcacgcacgcaacctcggtttattggttcagcttcagccatgttgattcttgtttgttttgttcttgttagttgtctgttaattattattattggaagaagatgcttatacaatatatttttccctttcacaactgacgatccagttaatagtaaacaccgaataccgattgctctacacatctgaagcttactgactgataaactgatgatgaatccatgcatacgcgtattac

SEQ ID NO: 3103 - DNA, 854 bp, Zea mays
  unsure (1)..(854): unsure at all n locations
  Clone ID: TF_LIB4980-065-R1-K1-E6
ccggccgggccgggccgagacaacaggcgagctcgggacctgagaaacaaccagccaaccagggcaggacgaccagacaggctccgcgtttcccggcccgcgagcgcgagcgcgagctcatcgccttcccggttcccgccgcgccgcgggctttcccgccttccccgagccctcctcccccgcacacccacgaccagtgtgtgggtgggtcatgggtgtgtgtggagactactgggagtgggaggcgttataatcggtcggcgcgcggacgtggggggagggggggctaatccggccgtgcgcgcaaccggaccgggcgcggtagccagtgcgtaggcgccgttccgccgctgccgcctcgcccggcgttcctcgccgccagcacagggcgtggccggagcccgcgcgccaccatggcaaggtcatggctgataacttgtaggggaattgctaagaaaataaggtacacaaatcctggcgctaatcaccatataagtgaactggttgcagaagcacggagggaatgcccaaactgcagttatattattgataacagcgatgttgccatgcagtggcctgggttgcctgctggagtcaagtttgatccttctgaattggagttgcttgaacatttagaacagaaagttggcctgggagattcaagaccacatgtgctcattgatgaatttattccaactatagacaatgatgagggaatctgctattcacatcctgaanatcttcctggtatgaaaacagatggtagcaatgctcatttctntcatagagtttcaanaggcgtatggttgtgggcagcncaagcgtcgaaggacccatcactgcagtgatcacac

SEQ ID NO: 3104 - DNA, 145 bp, Zea mays
  Clone ID: TF_9743024
ggaatccctgaagtagacctctacaaatgtgagccttgggagctagcagagaaatcattcctgcctggtagagactccgagtggtacttctttgggccaagggataggaagtatccaaatggatgccgcacaaaccgcgcaaccc

SEQ ID NO: 3105 - DNA, 186 bp, Zea mays
  Clone ID: TF_LIB3117-005-Q1-K1-A2
cactcgttcgccgacgcgtgggtgggacctccctaaatttgcaaagatgggcgacaaggactggtacggagtgtaccataaagaccggaagtgcccgacagtgctgatggctaaccgggccactgacgcgggttattggaaggcgaccgctaaggacaatgatgtctacaacccctttgcagcgga

SEQ ID NO: 3106 - DNA, 383 bp, Zea mays
  Clone ID: TF_LIB3206-117-P1-K1-E11
cgacccactcttcctcagactccttatctccacttcactccattccccttacctaccccaccatttacccttcagccgacatccgaactaaccaaccaacccacactccactactagcgaataaagcgtccaatgctagctattacggcctcgcagcaacaccatcaacaacatcgcctcctacgcgtaccctgagctcaacctcccccctgtcttaccgtttcacccgactgacgacgatctggtggcgcactacctctacgcacgctccatgtctcgccacccgccggtatctatcatcgtcgaagtctacctgtaccgcttcgacccctgtgacctgcctaagcgctccctcttcggactccgctagatgtacttcttca

SEQ ID NO: 3107 - DNA, 2117 bp, Zea mays
  unsure (1)..(2117): unsure at all n locations
  Clone ID: TF_ZmC9370_13
tcaaggagagacatggcttcgcacccggcccgcactatcgacgattttgtcgatccgaggcagcgggaagttgtccttggggcaggccttgttgagactggtgaagtcaatgcacatccgccatttgtcgctcttcttttgcaccatcactacattggcgagccatgtaggattggcgactggctcgataaatttagcctcaagcaggcgatgtacctcggccttggcggcttctgtcttctcatcagacatcttgcgcaaccgctgtttcttcggcctcaccgaagggtcgattcccaagctgtgctcgatgatggagcgactaactccgaccaggtcgagggtggaccaggcgaagacgcctttattttttgacagacagcagaggagtctctcctcgtcatgtgaagtgaggtcttcgctgatggtgactgtttgtttgggcgttgcctggtcgaggggaacagtcttggtcccgtcgttgctctgcaactgtgccttgtcatgttctttggcggttgggctggcagactcggggacctcgcactgggccatgaggcagtgtacattcctttgcccaggaacgaagtctctttctatgttgcgcgcggcctgctggttgccgtagactatgatcgtgccttgcggacctgggatcttcatgcacaggtaaagtccgtgaatggctgcctcaaacttgttgatggagccccgacccattatggcattgtatgggtacaccatgtcgacaatgttgaacgtgacttgctcgcttcgtgcattgggcgctacaccgaaggagaggggtaactctattttgccgacaggaaaggtgcccttgccgccgaagccatatgggttgtctgaaggcttaagcaagctgtgactgatgcccatgcggtcgaaggcatggaggaaaatgatatccgcctggctgccattgttgactaagactttgtgcaggtcccagcctgccacgctgcagttggtaaccatggcgtcgatgtggggtgcgctgcgcaggtcgacgtctcgggcgtcgaaggtcaatggcacatgggaccactttgtctgcacgactggaccagtgacggcgacgtggttgatgttgtggtagtggtctctcttctgtcgcttcatgtcgaagtcgacgctggaccccccagtgatcatgtgaatgactccgcgatacggctgatcgacaaagtcttcttgctttggggcttgggggtggtggggtggtggatgatttgttgttgcggatgaggaggtgggggtgggggaggtacgatttgtacctcggctggactgcagagggtctttgggtttcctctgagactcgactttgcgttggtggagctcttcggatctggcgtatttttcgaatagctgatacagctcctggaggttcctaggcggatctctgatacagtggctgtaaaggacgccagcccgaaggccactgatggcgtagtgaatagcgatttggtcatcgaccgaaggcagttgtgacttgagagtcagaaacttgcggtagtactcccacagagtttccctttccagctgcttgcagagtgaaagttcagccaaggcgtcggtgtctgggcggtacccttggaagttgagcaggaatttgtcccggagacttctccaggagtcgatggacagcgggggcaacctagtgtaccaggtgagggccgggccttcgagggcgatgatgaatgacttggccatgcgccttgcggcggaggtagtacagcancagctcctcgtcggtggggcggaagcggaagccgatgggcaggcccgcgacgggcgcgccggggccccgctgctgcaggcgccacgcgccgggccgggcctccatcgccgccgccgccgatagacgggatcggatcaggattcggttttggatttgtttgggtggcttgcgcgcgatctgcctgggtgatcgatgtcagacggtaggcggcatcggcgacctggtttttgtggcggcggcggcggctgtggtagcggcatggctatcgaaggcttcaaggccaaccacgccaagtctggtggctgcggctctggctgaggtggtggctgcggcaccctgttcggctccagcgctg

SEQ ID NO: 3108 - DNA, 293 bp, Zea mays
  unsure (1)..(293): unsure at all n locations
  Clone ID: TF_LIB4765-026-R1-K1-C2
attgggtactcgagcggccgggactactatcaatgggctcggattggtactctacttgtncgctgtgggcgcccagaggtgctgcaatggagcaggagccgcaccggcccatgggagctgcccccgggcttccgcttccacccgaccgacgaggagctcatcacgcactacactggncggcaaggncgccgacgccgcttcgcgcgttcgccgtcgccgaggncgacctcaacaagtgcgagccctgggactgccatgctggcgagatggggagggaagagnggacttcttct

SEQ ID NO: 3109 - DNA, 1266 bp, Zea mays
  Clone ID: TF_ZmC198_13
ggccgcttttttttttttttttttaggtacggtactagctcgtcatcagtatgtatatatgataatgccaaaccaaaagatacctagcagcagtatgcatgctagctattagtataggtctgtggaacaatgaccatatatatatagctacttcatcgaggacgacggtcgatctgagattctgagattgcattggttaaaagttgaggacgctggggtagtagggagaccagctctccatccatgggctccgcagctgcgtcaagaaggggtcctgcatccactcctgctgctgcttcgccacctccagctgcggcaggctcagcgtcgacggcctcatcagcaccgccggcagcggcgcctcgggctcggccacctcctcctcttgcttcatgctcatcatcacaggcggtggtagtggtggtggtggtgagatgccgccgacgggcatcgtcatcatgatctccactccctgcccaacaagttgggtttgttggtcctggtcggacgacgacatggagtcggcgggcgacccggcgttgtgggacgcggacggcgtggcgcgcgccagctcctccatggccactcgctgctccagctccttgagcgacacggccttccggtagaccttgcacagcacgatgtcctccttgggcgagttgttggtggtggtggtggaagaggccgccgccgcggatgagtcgccggggacggcattattgttgttgctgttgttattgcaggcgtcggggaggcggtactcgttcatgacccagtcggtcttggtgccacgaggcgcgcggccctcgtagtagacgagcgtcttcttgaggccgatgaggcgcttggggtcgtgggcgcagcgcacggcgcggtcggagcccgtagctttccagaagccgcgctccgtggtgcggctggggcgggcgccggacgactggtggtggtgctgcttggcaggccggccgccgtcgcggggcacgaagaagtaccactcgcgctcgccgatgcgcgccaggcccgggagctcccaggggtcgtggcggtacaggtgcaccgtggggatgatgtcgaacttgagcttccgcccgtgcgccacctgcttcaggtagaactccagcagctcctcctcggtggggtggaaccggaaccctggcaggtccagctgctccgccatggatggatcgacgacgacgacgatagatggaggccggtggagaatggagatgagctgatagagatgagaggaaagagcaggccgggttc

SEQ ID NO: 3110 - DNA, 1256 bp, Zea mays
  Clone ID: TF_ZmC1378_1
cccacgcgtccgcccacgcgtccgccacaagcttcctcctccactttttttatctgctttttccccctcggctgttcctactcaggctgggcagcagagctagcagtggtccctggtgcttcaggcgaccggccatggtggagctggagcctagtgtgaagtcggagcatggtggaggagtcggcctggtcctgcctcctggcttcaggttccatcccacagacgaagaggtcatcaccagctacctcctgcacaagttcctgaaccctagcttcgcgccgcacgccatcggggaggtggacctcaacaagtgcgagccatgggatctcccaagcaaggcgaagatgggggagaattccaaggagtggtacttcttctgccacaaggacatgaaataccccacgggcacgcgcgcgaaccgcgccaccaaggagggctactggaaggccacaggcaaggacagggagatcttcaagccagctgcagggcgtgaccgtgaccgcgagctagtggggatgaggaagacgctggtgttctacatgggcagggctccgcgcggcaccaagaccaactgggtgatgcacgagttccgcctcgagggcaagtccaggcacacctgcaacgacctacgcttcaatcccaaggatgaatgggtcgtgtgcaaggtgcaccacaaaggggccgaagaggccagcgccgccaagaagtccgccggcgggggcggcgaggagcactactactccaccgcaacgcccaacgtcagctccgtcgaaggcggcgacgagttcctcgtcgactccctgctggattactccagctacttcaactgcttcgcaaccggtggcttgcctctgcccagcacgacggccaactcagccgcagcacctgcaacgaacgacgacgactcctcctggagcatgcttcgtcacgcgccggcagaccagcaagcaatggtggggagctacagcttgcaccaccaggcaatgaaggcgaaaactgtaggcggcgtcacctccccgagtttctccgctggtttgccgagctcgccggtggcggactacgtgggaaacgatgcttctggctaccatacaaacaactattaattaacgatggatgatgagccgctgccgaaaatatagtgatccaataggtggtgttaggctattcacacttactgtacagttttaaaacaatgtcacatcaaattttgtttatggaaccgtgtacactgagtttcaactagatgcaactctctc

SEQ ID NO: 3111 - DNA, 712 bp, Zea mays
  Clone ID: TF_LIB5117-019-A1-PF1-A12
gatttcccaacacagctcgctcaccacatcttacagccatcggaatcaacagcagcagcggagcgatttcatcgactaacaaatcagcggacatggggatgccggcggtgaggaggagggagagggacgcggaggcggagctcaacctgccccccggcttccgcttccaccccaccgacgacgagctggtggagcactacctgtgccgcaaggcggccgggcagcgcctcccggtccccatcatcgccgaggtcgacctctaccgcttcgacccgtgggcgctccccgaccgcgccctcttcggcacccgcgagtggtacatcttcaccccgcgcgaccgcaagtaccccaacgggtcgcgccccaaccgcgccgccggcaacggctactggaaggccaccggcgccgacaagcccgtcgcgccccgcggagggcgcaccatggggatcaagaaggcgctggtgttttatgccgggaaggcgcctaagggggttaagaccgactggatcatgcatgagtaccgcctcgccgacgccggccgcgccgccgccagcaagaagggctcgctcaggctggacgactgggtgctctgccggctctacaacaagaagaacgagtgagagaagatgcagctccagcagcagggcggagaggagatgatggcggaacccaagcggagaacacgcgaccgacatggtggtcacctcgcagt

SEQ ID NO: 3112 - DNA, 723 bp, Zea mays
  Clone ID: TF_LIB5116-031-A1-PF1-F10
gttcctcatcttcctcttgtttctcttgcttctctctcgctctctctatccttcgttggtttgggcacaaaaggcaacaggagattttccaagatcgatcttagggccggcgagggagagagccagcatgcatccgagtggcggcgcgctgtcggtgccaccgggcttccggttccatccgacggacgaggagctcctctactactacctgaggaagaaggtcgcctatgaggccatagatcttgacgtcatcagggagatcgacctcaacaagctcgagccatgggacctcaaagatcggtgcaggataggcacggggccgcagaacgagtggtacttcttcagccacaaggacaagaagtacccgacggggacgaggacgaaccgggccaccacggcggggttctggaaagcgacgggccgcgacaaggccatcttcctcggcagcggctccaggaggatcggcatgaggaagacgctggtgttctacgtcgggagggctccccacggcaagaagaccgactggatcatgcacgagtaccgcctagacgaagacaacgtcgaggtccaggaagatggctgggtggtgtgtagggttttcaccaagaagagctacacgagaggcgtgaacccggcggagatggcggggtacgacgacgacgagctcctccaccctttcccggttccatcttccaccgccggcgcaatgcatatgatcacgga

SEQ ID NO: 3113 - DNA, 608 bp, Zea mays
  unsure (1)..(608): unsure at all n locations
  Clone ID: TF_LIB3591-121-Q1-N6-E2
tagctagctgctgacctcgtccatgtccgagctcgacgacgacgacccgtccgtgacgcagctgctagcggacgacggtgacggtgacaccggtcgttgcctcctcctcctcggcctgccgctgcccttctggaagacgcggcagacgacccactctccctgagcctgggccaggctgcagccgtgcttgtgcagcggcgcggcgaggcggtactcgtgcatgacccagccgatcgccagggccgccgccgccgccgccttcttcttcttccgccggggaacgaacgccatcgccctcttcacgcccaccaggaggctcccgccgccgcacgggcggggcagggccaccggcttctccttccccgccggcctccaccgcccgctcgcggtcgccctcctagcacttccgacgccgcccgccggccgcaccgcgnaagaagtatctctcgccttggctgctcgcatctggatcgatcgtagggaaaaagcaaagaaaaaagcttgcgattttagttctttctcctactactactgagtactgacagaaacgatggatgctnngctggtggttcgaagcgccgtcgtcgatcgtgtatgtaccaggggcg

SEQ ID NO: 3114 - DNA, 232 bp, Zea mays
  Clone ID: TF_700239811H1
actccctccatttccctcacctcccgcagcagctagccgccagccaacaaccgaaccaaccaaccaacccacaggccacagcgagcgagtaaagcgtccaatggtagcgatagcggccgtgcagcagcagcagcagcagcagcgccgcgacgcggaggcggagctcaacctgccgccgggcttccggttcgacgcgacggacgatgagctggtagcgcactacctctgcgcg

SEQ ID NO: 3115 - DNA, 333 bp, Zea mays
  unsure (1)..(333): unsure at all n locations
  Clone ID: TF_LIB3182-016-P2-M1-F1
ctctcactgactgactactgtaataccagagggcgaacaacttggggcggcgggtgaagaagagagttatgtgcattcgtgggccgggggcancagacagagatagagagccatatcaacggaccagcagccgcagctctaagacgagatgaacgactctgcctgcagcggagctaggctgactccagaggttcgtttccaaccaaccgacttctagatatgcactttatacctcaccaacaaggtgctgaacacgcgcttaacctggaccgacatcaccgaggccgacctaaacaagattgcgccatggaacctccctagcaatgccaaaat

SEQ ID NO: 3116 - DNA, 2064 bp, Zea mays
  unsure (1)..(2064): unsure at all n locations
  Clone ID: TF_ZmC27_16
tcggcacagctctcctcccctcttcctaccttagcagtagccacagccagaacaccagcagacagcagcatcagcagggaggaacacgatgagcggcgccggtccggatctgcagctgccaccggggttccggttccacccgacggacgaggagctggtgatgcactacctctgccgccgctgcgccggcctgcccatcgccgtccccatcatcgccgagatcgacctctacaagttcgacccatggcagctcccaagtacgtcccgtcgtcctcggtcttcttgcagcagcagtagcagccgtgaaccaatttcctgtgcggccgtgacgatggcgagctaatcgatcgattgctaactctctgtgtgcagggatggcgctgtacggcgagaaggagtggtacttcttctccccgcgggaccgcaagtacccgaacgggtccaggcccaaccgcgccgccggggctgggtactggaaggccaccggcgctgacaagcccgtgggcacgcccaagccgctggccatcaagaaggcgctcgtcttctacgccggcaaggcgcccaagggcgagaagaccaactggatcatgcacgagtaccgcctggnncgacgtcgaccgctcggcgcgcaagaagaacagcctcagggtaagaacaagcgctccgccgccgtccgtccgtccgttggcgtcgtcaccgtccaaatcaaacaaaaagaacttggcgataatgtgtcgctttcgtaatgaacgcggggataagcgtggcccatggttttgggccgctgaattttttttacgtgggccatgctaggtggggtggggggctgcaccgtgcccaatgattcgaccgcgtcgcagtcctccgcgcgcaagtattcgatgcccatgggtcatagcgaacagatcattttcgcccgtcgcgccctgcgacggcgacggcgacggagagccagtggggtctcactgggattagacatcgaaatgacgctttgtgattctttagctcatccatttctcgtcagctgcacggacgacaaactaagttctctattgtgttgacgggtgcagttggatgactgggtcctgtgccgcatctacaacaagaagggcggcgggctggagaaggcggcggcgccggcggccggcggcgaccacaagcctgtgttcgccacggcggcggtgagctccccgccggagcagaagccgttcgtggcggcggcgggcgggctgcccccggcgttcccggagctggcggcgtactacgaccggccgtcggactcgatgccgcggctgcacgcggactactccagctgctcggagcaggtgctgtccccggagcagctggcgtgcgaccgggaggtgcagagccagcccaagatcagcgagtgggagcggaccttcgcctccgaccccgtgaaccccgcgggctccatgctcgaccccgtcgtcggccacgccggcggcgacccgctgctgcaggacatcctcatgtactggggcaagccgttctagacgacaccgcccatcatgtcctgaggggaggtgggggtggcgaagcatcctcggctgcggttggttggttgattgatctgtcttgggcagcgcaatgcaatgcaaccgcacggtgtgggctttgactcaggcgagccgccattgttgacttgcaaggaggatataatatgaaactatagctggattacatggagaggcggcaatgagaccgtctggccccgccggaagggagacggagacggagacggatggcgcagtgcatcgggtgtggtggatcgtgcgcggcatgtgtgtgtgtggctgtacatatacatactgtacatgattggttcagtgcagggtttctgttccttcattgattagttattatactaataagtactagtaattttgtaagggcttgtagttgcagtctccgtactggtggtaggtagtgcaggccatattcgtcatcgccaagcttcgagtgtacttactcctacaatatatattttacagtaaatattgtagctgttggctcttcggaaaaaaaatggaagttattttgttt

SEQ ID NO: 3117 - DNA, 1671 bp, Zea mays
  unsure (1)..(1671): unsure at all n locations
  Clone ID: TF_ZmC1509_1
caccctcgcattggtttctcttgatcgctttgtcacttgaatccgtgcctgctctaacagagagcggagacgaccacgacgacggcgaggccaggctctgcgatggagcaggagccgcaccggcccatggagctgcccccgggcttccgcttccacccgaccgacgaggagctcatcacgcactacctggcccgcaaggccgccgacgcccgcttcgccgcgcttgccgtcgccgaggccgacctcaacaagtgcgagccctgggacctgccatgtaagcaacgcacgcgccggcatagctactagatcatgtttctgcacggatcgagtcatgcatggcttcataaaggaagaagaagaagggagttatgatatgtgatttggttgcgccagcgctggcgaggatgggggagaaggagtggtacttcttctgcctcaaggaccgcaagtacccgacggggctgaggaccaaccgggccacggaggccgggtactggaaggccacgggcaaggacagggacgtcttcaggggcaaggcgctcgtcggctccaagaagacgctcgtcttctacacggggagggcgcccaggggcgagaagtccggatgggtcatgcacgagtaccgcctccacgccaagctccacggccacggccacggccaaggcgcagccgtcgtcgtcgtccccaaggccgccgggtccaagaacgagtgggtgctgtgcagggtgttcaagaagagcctcgtcgtaggtggtgcagctgcagcagcagcaccaaccgcaggcaagaggggcggcacggagacgtcgtccaactccaagacgggcgacgtagcggccatcgcccacctccctccgctgatggacgtgtccggctccggctccggcgccggcccgccgcggcggcggcacacgtgacctgcttctccgacgcgctggagggccagttcttggaccagacgacgaccacgccgccgccagaagccgccaccgccgccacggacgacgacggccacctcggcgccctcggcgcctcctcctcgcccttccagctgcccggcttcgcgcactactactacggcggcgggccgccgcacctgcaccagcaccacggcgccgccagcctggtgcagctcctggagggcagcgtgccgccgtgcaataagggcggcgagcgggagcgggagcggctgagcgcgtcgcaggacacggggctcacctccgacgtcaaccccgagatctcctcctcctccggccaacgcttcgaccacgaccacgaccatgaccaccacctctgctgctggggctactgatcgtcgattcgatgagcctacgacgactaccgagcgcgcatcatgcatgcgtcgcgttattactagcgattagtgtatagcacactgctgtaaataaaacatctactagtactacatctgcgtgaggtcgacgatcggccgtgtggtggtggtggtgcgtggcatgcatgcgtcgagctgcctacgtttcattatctgctcgtgtgatttgttactgtagacgagtgtgggggtgtgtaattagcattgttgatgtattattattcacgatttggtggaataatatctccttggttaatgaaaacgccaaaaaaaaaaaaaaaaagcggccctcgagctgccagnttgttgttctcctt

SEQ ID NO: 3118 - DNA, 795 bp, Zea mays
  Clone ID: TF_ZmC8549_1
cgtcgtcttggctagctgcctagctagctagctagttcctcactcctctccgagaaccccctttttcatctctctctctctctctctcggtctcgcccagctcctttcgatgttatcgtctctgctggcctcgcaactcgtcgagagagactcgtgaaaaagaatccagatatagctagagagaccgagagggcagctagcttaattattagcatgtcgatgagcttcttgagcatggtggaggcggagctgccgccggggttccggttccacccgagggacgacgagctcatctgcgactacctcgcgcccaagctcggcgccaagcccggcttctccggctgccgcccgcccatggtcgacgtcgacctcaacaaggtcgagccatgggacctccccgtggcggcgtcggtggggccgcgggagtggtacttcttcagcctcaaggaccgcaagtacgcgacggggcagcggacgaaccgggccacggtgtccgggtactggaaggcgacggggaaggaccgaccagtggtggcggcgcggcgaggcgcgctggtggggatgcgcaagacgctcgtgttctaccaggggagggcgcccaagggcaggaagacggagtgggtgatgcacgagtacaggatggagccagctgctcctcttcttgatcaccaaccctcctcatccaactccaagcaggatgaagattgggtgctgtgcagagtcatctgcaagaagaaactggcagcaggaggccgcgcaggagggggcagctcgaggagcctggtcgccagcaac

SEQ ID NO: 3119 - DNA, 1592 bp, Zea mays
  Clone ID: TF_ZmC27_23
ccggccgagaagctctcctcccctcttcctaccattagcagtagccacagccagaacaccagcagacagcagcatcagcagggaggaacacgatgagcggcgccggtccggatctgcagctgccaccggggttccggttccacccgacggacgaggagctggtgatgcactacctctgccgccgctgcgccggcctgcccatcgccgtccccatcatcgccgagatcgacctctacaagttcgacccatggcagctcccaaggatggcgctgtacggcgagaaggagtggtacttcttctccccgcgggaccgcaagtacccgaacgggtccaggcccaaccgcgccgccggggctgggtactggaaggccaccggcgctgacaagcccgtgggcacgcccaagccgctggccatcaagaaggcgctcgtcttctacgccggcaaggcgcccaagggcgagaagaccaactggatcgtgcacgagtaccgcctcgccgacgtcgaccgctcggcgcgcaagaagaacagcctcaggttggatgactgggtcctgtgccgcatctacaacaagaagggcggcgggctggagaaggcggcggcgccggcggccggcggcgaccacaagcctgtgttcgccacggcggcggtgagctccccgccggagcagaagccgttcgtggcggcggcgggcgggctgcccccggcgttcccggagctggcggcgtactacgaccggccgtcggactcgatgccgcggctgcacgcggactactccagctgctcggagcaggtgctgtccccggagcagctggcgtgcgaccgggaggtgcagagccagcccaagatcagcgagtgggagcggaccttcgcctccgaccccgtgaaccccgcgggctccatgctcgaccccgtcgtcggccacgccggcggcgacccgctgctgcaggacatcctcatgtactggggcaagccgttctagacgacaccgcccatcatgtcctgaggggaggtgggggtggcgaagcatcctcggctgcggttggttggttgattgatctgtcttgggcagcgcaatgcaatgcaaccgcacggtgtgggctttgactcaggcgagccgccattgttgacttgcaaggaggatataatatgaaactatagctggattacatggagaggcggcaatgagaccgtctggccccgccggaagggagacggagacggagacggatggcgcagtgcatcgggtgtggtggatcgtgcgcggcatgtgtgtgtgtggctgtacatatacatactgtacatgattggttcagtgcagggtttctgttccttcattgattagttattatactaataagtactagtaattttgtaagggcttgtagttgcagtctccgtactggtggtaggtagtgcaggccatattcgtcatcgccaagcttcgagtgtacttactcctacaatatatattttacagtatatattgtagctgtgttggctcttccggaaaaaaaatggaaggggaaaatagggattatgttattttgattaaaaaaaaaaaaaaaaaaaactcgagggggggcccggtacc

SEQ ID NO: 3120 - DNA, 1291 bp, Zea mays
  Clone ID: TF_ZmC604294_1
cattgggtacctcgaggccggccgggctaatgacacaagcggcaggccgccgtcgatcgatggggggagcatccggaggcgaccacccgcagcagcacggcggcggcgacgatgggcacctgcagcaaggcggcggaggcgacatggtgatgccggggttccggttccaccccacggaggaggagctcatcgacttctacctccgccgtagggtggagggcaagcgtttcaacatcgagctcatcaacctcgtcgacctctaccgctacgacccatgggatctccctgctctggcttcgatcggggacaaggagtggtacttctacgtgccgagagaccgcaagtaccgcaacggcgaccgccccaaccgggtcacgccgtccggctactggaaggccacgggcgccgaccgcacggtctacgtcgaggtcaagcggccgatcgggctcaagaagacgctggtgttctacgtggggaaggcgcccaagggactcaggagcagctggatcatgaacgagtaccgccttccttcaggcgaggccgaccgctaccaaaaggaaatttctctttgcaaagtgtacaaacgaccagggattgaagacaactttcacctcagcaccaccacagcaagatcatctggctcaaaggctgcagcaaccatggaaaagaagcaccaccgaacatcggcgtcgccccgcatggcgccagtgttcgacggtggccactcatcaggttacatgaacaagccatacacttagcgcaaccaccaccatggaggaggtcgcatcatcagtcgcagctcgagaagctgctcttaacccaccgatgttgccttcttcaacacacgccctgcttaatgcaaactccgctacaatggcaacaattccaatagatgagctgagtagggcaattggatgccaaggagaccctaaccagaccttgccaacacaagctccattgcttccttttcctaacttggaaaagatttgggattggaatccactcctagaatctcccaaggtttgcacaagcttcaagtgactttcaagtggctcgaagcatatatgtgcatgcttgcatgcgtgcacctattatttatgaatacaagtgtgtatatgtgcagacacataattattatttgggctagaatgtggttgagatgtaatggaatatataggatgagatagttctagtcctatctaatgctccactatattaatcaattcaccatcacaaatatgtactatgttgcagtgatcatttgaacttaatttaaaaaaaaaaaaaaaaa

SEQ ID NO: 3121 - DNA, 792 bp, Zea mays
  Clone ID: TF_ZmC156397_1
cattgggtacctcgaggccggccggggcaccaccctcttatcctgtcctcccacttgcctcgcacccccaaattccacgcctcctcctcggcgcagtgctcccctcggcgttgccctagcccccgctggctcgccgccgcttccagcgcgcgctatgccatgagcagagacctcgaggacgggcacggcgccgtcggcaacgttattgcggcagcagcagctgcaggaggggaggcggtgggtgccggcgaggccggggacgcgcacgacaacgacgtggtgatgccggggttccggttccaccccacggaggaggagctgatcgagttctacctccggcgcaaggttgagggaaaacgcttcaacgtcgagctcattgctttcctggacctctaccgcttcgacccatgggagcttccagcaatggcggtgatgggcgggaaggagtggttcttctacgtgccgagggaccgtaagtaccggaacggagaccgcccaaaccgggtgacggcgtcggggtactggaaggcgacgggcgctgaccggatgatccgaggcgagaacaaccgccccatcgggctgaagaagacgctcgtgttctactccggcaaggcgcccaagggcgtccgcagcagctggatcatgaacgagtaccgcctcccgccaccacccaccgacgccgacccattgattcccaagtccgagatctctctctgccgcgtctacaagcgctcaggcatcgacgacggccacgggcagtcatcctccagcacccaagcttcctcagcgcgg

SEQ ID NO: 3122 - DNA, 1497 bp, Zea mays
  unsure (1)..(1497): unsure at all n locations
  Clone ID: TF_ZmC1381_1
gngcagggaaacaggcagctctccacggacaacgcgattctatttagttatctggcggctgccagtgccagccagccgcctttcgaaaccgagcacgagggagccgacgtggtggtctctggaacctggttcgagcgagcgagcgatccatctatccagccgcccgccgggaatttctgtgacgaggaggaggaggaggagggggtatggcaatggtggcgtcgcagggaggcggccggagggacgccgaggcggagctcaacctgccgccggggttccggttccatcccaccgatgaggagctggtggtgcactacctctgcaggaaggtggcgtgtcagcagctgcccgtgcccatcatcgccgaggtcgacctttacaaattcgacccgtgggatcttccagagaaggcgctgtttggccgcaaggagtggtacttcttcacgccgcgggaccgcaagtacccaaacggctcgcgccccaaccgcgccgccgggagagggtattggaaggcaacgggcgcagacaagccgatcgcgcccaagggcggtggcggggcggcaggaatcaagaaggctctcgtcttctactcgggcaaggcgcccaggggattcaagaccgactggatcatgcatgagtaccgcctcgcggacgcggaccgtgcgccgggcaagaagggctcacggaagttggatgagtgggtgctgtgccggctgtacaacaagaaaaacaattgggagaaggtgaaggcggaggagccggaggcggcggcgccgctccgtaaccagcagggcgcagcggaggattccatgtctgacagcttccagacgcacgactcggacatcgacaacaatgcctttggtgtgcagaacggcttcggtaacatggtgcacgggcaggccatgaccatgaggaacggcattggcagcgtggcgaggacggtgaaggaggatagctattggttcacggacctgaatctagatgatctgcaggcgccctacaacgtgacccatgtgttgaatccgaacccggtccagacgatgaatctggcggctgggcaaggccatggctacttgcagtctatgagctcgccgtcgacgaagatgtggcagacgatcctgcctccgttctgagagttgctgtgatggaagggggaagagatgatcttgggcgtaggagtggttagactggctaggaacagcaggtttaaaatttggagggtttgaattctgcaactgttgctggtagtcttgtaagggttattcatttgttaaattatgtgcttggtaatataccaaaaggaaaatccatctccctttgcactacttgaagaaaccagtacaaaattacagttctcatatttaatatggtcggtttgagccaaaattggtttagggcatttcatctttattatggtaaaaattcaaatagttttttcataatgattaaatggtaggagtaacattcagtgaatggaatcgactcccttttttccct

SEQ ID NO: 3123 - DNA, 823 bp, Zea mays
  unsure (1)..(823): unsure at all n locations
  Clone ID: TF_ZmC5878_3
cggccgcccagtgttctgaagcccgatgcgtccgatcaatcagagaaaatcatccctccctatctctccagctcttcttcctcctcctcctcctcgtcagctcccgagttcttcctgagcgaagcaagccaaggcaagctaggtagcagatccaagaaggagaagcgatgtcggacgtgacggcggtgatggatctggaggaggaggagccgcggctgtcgctcccgccgggcttccgcttccacccgacggacgaggaggtggtcacccactacctcacccccaaggccgtcaacaacgccttctcctgcctcgtgatcgccgacgtcgacctcaacaagacagagccgtgggatctccccgggaaggcgaagatgggggagaaggagtggtacttcttcgtgcacaaggatcgcaagtacccgacagggacgcgcaccaaccgcgccacggagaaggggtactggaaggcgacggggaaggacaaggagatcttccgcggcaagggccgggacgccgtgctcgtcggcatgaagaagacgctcgtcttctacaccggccgcgcgccccgcggcgataagacgccctacgtcatgcacgagtaccgcctcgagggccagctgccccaccgcctcccccgctccgccaagaacgattgggctgtttgccgggtgttcgacaaggacttggcggcgaagaatgcgccgccccagacggcgccggcgggccgtcgnnggtcatggaggacccgtacgcccttcttcgacgtcgacgacttcctcacaaccccgacctgctcaacacgccgacctgccgatgctct

SEQ ID NO: 3124 - DNA, 355 bp, Zea mays
  Clone ID: TF_LIB3245-118-P1-K1-E12
gtccactacagtcactgcattttcttcaacttgcatactaacttggcgccagacttcaacagggccaagcgacctacccacaggccacatcgagaggagtaaaacgcacaatgattatgatagtagccactcataagcttctgcagcaaccacaccgtcacgctgaagcggagctaaacctggccccgggctttcggtttcacccgacagacgaagagctggtggcgcactacctctgcgcagcgcgccgagatgcgccgtccgccggtgtccatcatcgccgatgtcgacctgtaccgattcgacccctgggacctgtcggagcgcgccctattcggtcgacgcgagtggtact

SEQ ID NO: 3125 - DNA, 824 bp, Zea mays
  Clone ID: TF_LIB4741-095-Q1-K1-A5
aatcgtgttcgccgcctgcctctcccaaaccctagcaacccacgatcgaacccaaatccgctcctcccacccgaggaattatgcgaaattccccgagatcctagcccagcactagcagatcgatccatcgcttgcccacctgccggccaccaacccttgtagtctcagtcaatctgtagattgagactacgatgagcctgtcaccgctcgactcctcctccccgccggccgcggctgcggctgctgctacggaggtgcccctcgccccgggcttccgcttccaccccaccgacgaggagctcgtctcctactacctccgccgccgcgtcctcggccgccgcctccgcgtcgggatgaagaagacgctcgtcttccacgccgggagggcgcctaagggcgagaggaccaactgggtcatgcacgagtaccgcctcctcgatgcagacggacctcaggatctgcatgtggtttgtagaatcttccagaagcatgggtctggaccacagaacggtgcgcagtatggtgcaccatacatggaagaggaatgggaagaggatgatgatgctattgagaatggttctacccacgatgcatctggtcaaattgctgcaaccacctgtgctgtagatgaggagtcaaatgaggacgatgagaatgcatattgtgaaacaaacagacctgctcgagtagaaccatctcatctgccttcggtccatgaaatgctcaatccaccagagatggctcctctccaaggtcaagattctaaagagacaagcgatggaagttggtctgatgttgctatttctctggaagagattttgcag

SEQ ID NO: 3126 - DNA, 875 bp, Zea mays
  Clone ID: TF_LIB4974-041-A1-K1-E7
cctcgaggccggccgggccgggttgccccaacctacctccgggcttccatttcttcccttcagacgaagacctcgtcgtccatttcctccgccgcaaagccgccaacctcccgtgccgccccgacatcgtcccgacgatcctccttcaccgctacgacccgtgggagctgaacggcacggcgctgcaggctgggaaccagtggtacttcttcagtagccacgcccacgcccacgcccactccgcggcggggcagaccagaacctctccgtccgggtactggaaccccgccggcgccgatgaaacagtagtactagcgagcagcagccgtgtcgttggcctcaagaagacgctcgtcttctgcaccggagagcctttcagagggttcagaacgaactgggtcatgcatgagtaccaccttcaggacgggccggccgggtgcaatgtcggcgggagcagcggcgccaccaccccaagtagctccagcagctccggcagcagcaggagatcgcagaggaagagagttcactcgagcacggagtcaataaacagctgggtgatatgtagagtgttcgaatcaagctgcggttcgcaagtgagcttccatgacgagggcacagagctttcgtgcttggatgaggtgttcttgtcgctagatgactacgacgaagtgagcttgccaaataattagaaccctagctagcgcgcaggccatttgattagtacctgtgacggtgacgtcgtcgtctgcgtaagcgtaagtggttgcaagttgcattgtgcatgatgcagatggcctgatgataggcatcgagcttaagccggtctctatccaaaatcattatatattaccctggtatcgatcgattatcatgca

SEQ ID NO: 3127 - DNA, 1588 bp, Zea mays
  Clone ID: TF_ZmC1424_1
gctgcctgaaccaaaacacacacacacacaaaacacgcaatgggcgccatgactctgccgcccggcttccgcttccacccgaccgacgacgagctcgtgggctactacctcaagaggaaggtggacaacctcaagatcgatctcgaggtcatccccgtcgtccatctctacaaatccgagccatgggagctaccagagaagtcgcttctgccgaggcgtgacctggagtggttcttcttctgcccgcgcgaccgcaagtacccgaacgggtcgcgaaccaaccgcgccacgtccacggggtactggaaggccacgggcaaggaccgccgcatcgcctgcgacggcggcgtctacggcctccgcaagacgctcgtcttctaccgcggccgcgccccgggcggcgagcgcaccgcctgggtcatgcacgagtaccgcctctgccaggacctcgcccacggcacttgcaacttcatcggtgcttacgcgctttgccgcgtgatcaagcggcacgagggcgggctgccgcagggcgagagctacgcgaaaggagccgccggcagcgcgagatcagggcagatgagcaaggtctccagcagctcgtccctcgtcagcaacgaccagctcagcgcgtcgttcacccctcctcctacactggacgtgggcaccatggctggatccggcaacgcgttccagagccccgttgggtacgggtacggcgtgacgacgacggcgacggcgacggccaccactgcggggctgccgtcgagcgcactggccacgcccctgctcatcgtgccgtctccccacgacacgttttccatcggcggcgacggcgacttcctccccgccgcggccgagtcgcgcgcgttcgcacgcgcacctgttcgacaccgtgggaatggggatgggcggcgtctcggagcaggagctgaaatgggacagcttcgcctgcccaagcacgttctcgagtggtgccgacatggcggcggcgagtccggcgacgctgtgccggcaggcgagcgacggcttcgacgacctgctggcggccttcttcttctcggatgacaacaggatcgtcttctgaacccaatgcacagcacaggggtaaatgctgctctgatcaactcaagatgttcatactgggaaataaaaagtgacctctgctctcccagaaatggcgattatatttttcacagccagggaaagggagatactacgtactggggagttcactcgtgttggctacagacagagtgatggcattttatttaccgtgcggtcttctctgtagcactggtgctgtgtacgacggccgtgtgtcacttcttcctgaattctcatgcgtgtgtcatttgcaccaccacctactactagttacatgtactagcagtagtacttgtgtgattgacctgccctgttctgtatacgacagagctaatgcagtattgccatgctttgtagccttactaaccattcttaattccatggcatatcgtgttaaagcacacatgctgttcccaattgccatgtatcttgtatcacgcagtgtaattcagtatcaacgattcccgaagcagtgcgctgtgcc

SEQ ID NO: 3128 - DNA, 802 bp, Zea mays
  unsure (1)..(802): unsure at all n locations
  Clone ID: TF_LIB5116-010-A1-PF1-D6
aattgaagctctagctagctagctactttgcaaagtttgcgtgcttcgatcgtctcgatggctgacttctcgtccagcaacggcgtcccgccggggttccggttccaccctaccgacgaggagctgctgctctactacctcaagaagaagatcggcttcgagaagttcgacctcgaggtcatcagggaggtcgacctcaacaagatcgagccatgggacctccaagagagatgccggatcgggtctgcgccgcagaacgaatggtacttcttcagccacaaggaccgcaagtacccgacggggtcgcggacgaaccgcgcgacgacggccgggttctggaaggcgacggggagggacaagtgcatccgcaccagctaccgcaagatcgggatgcgcaagacgctcgtcttctaccgcggtcgcgccccccacggccagaagtccgactggatcatgcacgagtaccgcctcgaggaaatcgacgaagcccagggcggcaccagcgaggatggatgggtggtgtgccgcgtgttcaagaagaagtgtttcttcaagatcgccggaggcggcgaagggagctcaagccagagcgcggacgccggcgccggccacatggccgtgtcgtcaccactgggtggccacgaccacgctgacagggccgccatggcatctcactacatgcacgggatgcacccgcagtaccacccccagcacgcctcttccttctactactcccagatgcaaccaccggaggcggnctactcgcaccacgtgcaggtccaggacctcctcacaaccaccg

SEQ ID NO: 3129 - DNA, 388 bp, Zea mays
  Clone ID: TF_LIB3245-339-Q1-K1-C4
gcaaggctaagatgggcgagaaggagtggtacttcttctgccacaaggaccgcaagtacccgacggggatgcgcaccaaccgcgccaccgccagcgggtactggaaggccacgggcaaggacaaggagatcttccgcggcagtagtccccgccgcgtgctcgtcggcatgaagaagacgctcgtcttctacacgggccgcgcgccgcgcggaggcaagacgccgtgggtcatgcacgagtaccgcctcgagggcagcctgccgcccaacctccaccgcggggccaaggtgaggtcacctggcctcctctcgtctattttgttgttttttaaaaaaaaaaaatcccgcgaccgacggatggatggagccccccatggaggttgttttca

SEQ ID NO: 3130 - DNA, 1329 bp, Zea mays
  unsure (1)..(1329): unsure at all n locations
  Clone ID: TF_ZmC12224_3
nnnnnnnnnnnnnnnnnnnnnnnnnnnnnnnnnnnnnnnnnnnnnnnnnnnccacacccccactttgtcccggcctttgttccggagagaatcatcgagtcggatagagtcctgggctccaggcgctgcgtactgaacgaagaggcgtgtctcttcgatcgacctccaggcttccagctagctagctagcgagcgatggcattgagggagatcgagtcgacgctgccaccggggttcaggttctacccgagcgacgaggagctggtgtgccactacctccacaagaaggtggccaacgagcgcatcgcgcaggggacgctcgtcgaggtggacctgcacgcccgcgagccgtgggagctcccagaggtggcgaagctgacggccaccgagtggtacttcttcagcttccgggaccgcaagtacgccacggggtcgcgcaccaaccgcgccaccaggacgggctactggaaggccacgggcaaggaccgcgaggtgcgcagcagcagcagcgccaccgccgccgtcgtcggcatgcgcaagacgctcgtcttctaccggggcagggcccccaacggcgtcaagtccggctgggtcatgcacgagttccgcctcgacaccccgcattcgccgccaagggaggactgggtgctgtgcagggtgttccagaagacgaaagccgccgacggcgacggcgatggcggcgcccaagacggcgactcctcgtccccgccggccgccttcaccggcccgtcacggccacgcgccgtgtcagagccgccggaccattccgcgccgccggcgggaggaggctactactacggcctcgcgttcgggccgcggcaggtggaggtggcgcagcagcagtgttacggcggcggcggcgccacggtcgccgaccaccaccacggcttcacgcgagacagcgggggcgctgcagggtttggcgcgacgtggggacgaggagtcgccggcggtgagtgcggggctggctacctcgacatggacggcgcctttgacgtcatgatggccggctgctttggcggtggagacatggatgagttccctcaagtgtggaggtgatcgattgggcaacgtcacggggttattaccatcctcttgaaagaggagaatacatattgttcttactggagacactgggtcagttaaatttattggttgtttaatacacatggggtttggctggtagattagaatgggtttgaaatgctgtgagctcgacaaggttcattgtgaacgtgaactatcaaatgtaaattaattgggaaatcctttcttttctatattatttagtgtatagagttaattgat

SEQ ID NO: 3131 - DNA, 142 bp, Zea mays
  Clone ID: TF_LIB3076-012-Q1-K1-F12
cttatactgaatggtcacaggtaaggaccgtcttatccgctcacgcccagcatgcaccctcatatgcgttaagaagacgctcgtcttacacagatgcagggcacccttaggacaccgtatcctctggatcatgcacgagtac

SEQ ID NO: 3132 - DNA, 802 bp, Zea mays
  Clone ID: TF_ZmC3782_2
gcctctacagttcgacccagggacctgccggccaggcgctgtacggcgacggcgagtactacttcttcagcccgcgggaccgcaagtaccccaacggcatccgccccaaccgcgccgccggctccggctactggaaggccaccggcaccgacaagcccatccacgacgccgccaccggcgagggcgtcggcgtcaagaaggcgctcgtcttctacaagggccgcccgcccaggggctccaagaccaactggatcatgcacgagtaccgcctcgccgccgtcgccggctccaccagccccctcgccgcctaccgcccgccctccaagttcaggaacgcctccatgagggtaagtcgatcgacctcgatcatccctgaatcatatccattgcatgacctgtacatatgttcttcccattatctatcctatccatggtgtcatgttgagctgagctggtgatcacacgcatgcacgggccgctttcatctgattcgttcgtaacgaccgcaacaatattcgtgggtcacgccggtcgcatgcacgccacgcccgcccggcggtgtgcagtgtgcggcggcatgtcgctcgttcgtcgtgcaccgccagccgccgttggtttggctgcttttccatatcgatgaccaaactgccctcaccggccgaattcgtcgttctccaaaagcgccgtagctagagctagccatgcatcaatcagccgccaaaccagcagcgcgtcacatctaccggcactagctagcatcgcctcgcatcgcatcgccgtggaggtgaatggcagcttaccg

SEQ ID NO: 3133 - DNA, 1955 bp, Zea mays
  Clone ID: TF_ZmC21867_1
ctcgaggccggccgggagacaaacagtcgagctcgggaccctgagaaacaaccagggagggcactagggcagggacaggacgaccagacaggctccgcgtttcccggcccgcgaacgcgagcgcgagttcatcgccttcccggttcccgccgcgccgcgggctttcccgccttccccgagccctcctcccccgcacacccacgaccagtgtgtgggtggagactagtgggagtgggaggcgttataatcggtcggcgcaaggacgtgggggagaaggggggctaatccggccgtgcacgcaaccggaccgggcgcggtagccagtgcgtaggcgccgttccgccgctgccgcctcgcccggcgttcctcgccgccagcacagggcgtggccggagtccgcgcgccaccatggcaaggtcatggctgataacttgtaggggaattgctaagaaaataaggtacacaaatcctggcgctaatcaccatataagtgaactggttgcagaagcacggagggaatgcccaaactgcagttatattattgataacagcgatgttgccatgcagtggcctgggttgcctgctggagtcaagtttgatccttctgaattggagttgcttgaacatttagaacagaaagttggcctgggagattcaagaccacatgtgctcattgatgaatttattccaactatagacaatgatgagggaatctgctattcacatcctgaaaatcttcctggtatgaaaacagatggtagcaatgctcatttctttcatagagtttcaaaagcgtatggttgtggtcagcgcaaacgtcgaaggaccatcaactgcagtgatcacactgtttctgatgagcatgtgagatggcacaagacagggagatccaaagccatatatgaaaatggtgttataaaaggttggaagaaaataatggtgctgtacaaaatttcgcaaagaggcagaaagcctgatagagctaaatgggtaatgcatcagtatcaccttggaaaagaggaagatgaaaaggacggggaacttgtagtatctaaaatcttcttccagttggcaaataagagtatggaaatttctgaaacagaaactgcttgtgaagaacctgatgcacctgcttcagtgattggtccgaaaactccaaagacaatcacaccacagccacgccatcctaaaagtagtccatgtgaaactgagcagaatattttcattgtgcaggaccagctactactggacggtgaagacgagcctaccatgcctatcgttagtctggcggatgatgcaatgaaccctgcatggtgtgctgtagctgaagaagagcaggttgttggagaggcatctcgggctcagtcaaactcagatgaacctcttctctgtcgcgaagacccaaattccttaaacgacgaagcattgcttccctgggactatccgattctgtcgcaatgcaggagtgagatttttgatcggaacctgaatggatacgggttgcctgatctccataatgtggatctcggcacgcctccagatcttcagcttgctgatttccagtttggctctcaggaaagcctcggcagctggctggatcgcatctaggaagatactaaagtacgtatttggtagagcagctcagcaacctgatcgatgggcatcttttttgcacatgatatggtaaccggtggcagctatttttgggcttgcaacacaaagattgcattcttgcattagtgttgtattagtgttgcgctgtcaaactttatctggaaaccaaagaacctttcgctcttttctattttctttagaacctttaacagctggctatcagaacactagccttgaaatatagctgtaagttttgtggcatggttggtgcaaacctacattgccccgctgtaggtaagatcggtgccttgagatctttgactttatgagttcagagtgtt

SEQ ID NO: 3134 - DNA, 1800 bp, Zea mays
  Clone ID: TF_ZmC27_12
cgattgggtacctcgaggccggccgggattccatagtctcgagacttcctcagcaatcaatcagctttccagcgatcggcagctcctcgatcgtttcgaagctccaatccgcccggccgcctccgcctgttgccactagctaggtgatcgatcgaatggactgcggtggcgcgctgcagctcccgcctgggttccgcttccaccccaccgatgacgagctggtgatgtactatctcctccgcaagtgcggcggcctgccgctcgccgcgccggtcatcgccgaggtggatctctacaagttcgacccatggcagctcccagagaaggcgttcggtggggagaaggagtggtacttcttctcgccgcgcgaccgcaagtacccgaatggctccaggcctaaccgggcggccgggacagggtactggaaggccaccggcgccgacaagccggtagggtcgccgcgccccgtggccatcaagaaggcgctcgtcttctacgccgggaagccgcccaagggcgtcaagaccaactggatcatgcacgagtaccgcctcgcggacgtcgaccgctcggccgccgcacgcaagaagaccaacaacgcgctcaggctggatgactgggtgctgtgccggatctacaacaagaagggtgttatcgagcggtacgacacagtggacgacgacgacggcgacggcgccgtggccgaagacgtcaagccggtgccggcgccggcggcgtcgaagaacccgcgtgccagtgcccgcgtaggggcagcagcggcggcgccgatgaaggtggagctccccgagtacggcggcggctactacgactacgacgacctggagacgccgtcggcggggatgctgtgcttcgaccgcccgtcggccccggcgcccgcggaccgcgactcaaacaactccgtgccgtggacgacgcaccacacgcacacggacaactccagcagcggctccgagcgcgtgctctcgccgtcgccggacctgcccgaccgcgaccacgccgagagccagcccgccgccgccgccgccgccgccgggtggtggcctgtcggaggcgactggggcagcgccgccgaggacgggttcatggtcgacgtcgacgtcgacgacgggagctcgctgttcgggccgctgtccccggggctgttcgcgcgcgtcgacgccgccgcgttcggcttcggcgacatgctcgcgtcgtacctgcacaaaccgttctgatgcaacgcgacgcgacgcgagcgcggccaccccgcgcctgcgtgctcctctaggccactgaccactgacatggacattctggtcgtcgtgtagctcagttcttcattcattcaggtcgacgtgcaactggtaattgtacaagatcttgggcagctgccgtatggagatcgatgagtgccgagttagcatggaggacgactggtggtcatggttggtacagagctagctagccgtccgatcgggtatcggattaatctgattgccagttttgtttttttttggtcgcgtcaagtagctgacatcttaagaatgaagcctactggattcagaggcctgttgatggtaatggtatggtgtatgtatatcgtctagtttagtctagcctagctgtacttagaattggttcaggttggtggcaagcagagcgctgtaatttttgttgagtgtttatgcactataattgcaacgtcatgtattagagtcgctctcagcggtcgctttctcgtgatcgaaaattttgcgatgcaaattatcctaataaagttgttgtaagatgtaattacgt

SEQ ID NO: 3135 - DNA, 2349 bp, Zea mays
  Clone ID: TF_ZmC27_20
gacttcctcagcaatcaatcagctttccagcgatcggcagctcctcgatcgtttcgaagctccaatccgcccggccgcctccgcctgttgccactagctaggtgatcgatcgaatggactgcggtggcgcgctgcagctcccgcctgggttccgcttccaccccaccgatgacgagctggtgatgtactatctcctccgcaagtgcggcggcctgccgctcgccgcgccggtcatcgccgaggtggatctctacaagttcgacccatggcagctcccagagaaggcgttcggtggggagaaggagtggtacttcttctcgccgcgcgaccgcaagtacccgaatggctccaggcctaaccgggcggccgggacagggtactggaaggccaccggcgccgacaagccggtagggtcgccgcgccccgtggccatcaagaaggcgctcgtcttctacgccgggaagccgcccaagggcgtcaagaccaactggatcatgcacgagtaccgcctcgcggacgtcgaccgctcggccgccgcacgcaagaagaccaacaacgcgctcagggtaattcactacaccatgacctttctcaggagaacatatttatctccccgaaatactgacacttgcagttagagggaaaaaatatagagagaagtaaaaaaaaaaagattgatgtttgattttaccaatgctgcaacaagaaacagtggatcgaatcgaaatgtgttgttaggcttgcaactatatatgcagattcttagttaagaggaattgaaaaaggctctagagacatgtaaagcgcgggcggcgtggcgtcacggctcacgcacgccgcgatagagacaagcgcggcaaccatggtccatggccggcgcagagccgccgcctgatcttatcgcccgcgcacaaattaccacatgcgcggcgcgcaccggatccgacgtcacgtcgacctcatctccaagcctcttccaaacactccaatgcgtactggatgactgggtgctgtgccggatctacaacaagaagggtgttatcgagcggtacgacacagtgaacgacgacgacggcgacggcgccgtggccgaagacgtcaagccggtgccggcgccggcggcgtcgaagaacccgcgtgccagtgcccgcgtaggggcagcagcggcggcgccgatgaaggtggagctccccgagtacggcggcggctactacgactacgacgacctggagacgccgtcggcggggatgctgtgcttcgaccgcccgtcggccccggcgcccgcggaccgcgactcaaacaactccgtgccgtggacgacgcaccacacgcacacggacaactccagcagcggctccgagcgcgtgctctcgccgtcgccggacctgcccgaccgcgaccacgccgagagccagcccgccgccgccgccgccgccgccgggtggtggcctgtcggaggcgactggggcagcgccgccgaggacgggttcatggtcgacgtcgacgtcgacgacgggagctcgctgttcgggccgctgtccccggggctgttcgcgcgcgtcgacgccgccgcgttcggcttcggcgacatgctcgcgtcgtacctgcacaaaccgttctgatgcaacgcgacgcgacgcgacgcgagcgcggccaccccgcgcctgcgtgctcctctaggccactgaccactgacatggacattctggtcgtcgtgtagctcggttcaggacgaatcgagagccggccggtctaggtgtagtgctgcgaaaccaacaccaccgtgcaggcacactctccgcgggcggcagatcgacggacaatcctgcgcccgtaggtatataccggtcgtcgatcaggtgttcatcagttcttcattcattcaggtcgacgtgcaactggtaattgtacaagatcttgggcagctgccgtatggagatcgatgagtgccgagttagcatggaggacgactggtggtcatggttggtacagagctagctagccgtccgatcgggtatcggattaatctgattgccagttttgtttttttttggtcgcgtcaagtagctgacatcttaagaatgaagcctactggattcagaggcctgttgatggtaatggtatggtgtatgtatatcgtctagtttagtctagcctagctgtacttagaattggttcaggttggtggcaagcagagcgctgtaatttttgttgagtgtttatgcactataattgcaacgtcatgtattagagtcgctctcagcggtcgctttctcgtgatcgaaaattttgcgatgcaaattatcctaataaagttgttgtaagatgtaaaaaaaaaaaaaaaaaaaa

SEQ ID NO: 3136 - DNA, 575 bp, Zea mays
  Clone ID: TF_ZmC27_7
ctccaatccgcccggccgcctgttgccactagctaggtgatcgatcgaatggactgcggtggcgcgctgcagctcccgcctgggttccgcttccaccccaccgatgacgagctggtgatgtactatctcctccgcaagtgcggcggcctgccgctcgccgcgccggtcatcgccgaggtggatctctacaagttcgacccatggcagctcccagagaaggcgttcggtggggagaaggagtggtacttcttctcgccgcgcgaccgcaagtacccgaatggctccaggcctaaccgggcggccgggacagggtactggaaggccaccggcgccgacaagccggtagggtcgccgcgccccgtggccatcaagaaggcgctcgtcttctacgccgggaagccgcccaagggcgtcaagaccaactggatcatgcacgagtaccgcctcgcggacgtcgaccgctcggccgccgcacgcaagaagaccaacaacgcgctcagggtaattcactacaccatgacctttctcaggagaacatatttatctcccccgaaatactgacactttgcattaag

SEQ ID NO: 3137 - DNA, 871 bp, Zea mays
  Clone ID: TF_ZmC16461_2
ggagacacccccctccaaaactttccccaatccaatctcccaatccaatcttccctctcctctcctggaaccctaagcctcctcaggtacatgacccacccttcctcgtcctcctcctccgccccggcggccgcgccggatgacccgacctcccttgccccgggcttccgcttccacccaacagacgaggagctcgtctcctactacctcaagcgcaaggtgctcggtcgcccgctcaaggtcgacgccatcgctgaggtagacctctacaaggtcgagccatgggacctcccggcaaggtcgcgcctccgcagccgcgattcccagtggtacttcttcagccgcctcgaccgcaagcacgccaaccgcgcgcgcaccaaccgcgccactgcaggaggctactggaagaccaccggcaaggacagggaggtccgccatggagctagggttgtcgggatgaagaagacgctcgtcttccacgctggccgcgcgcccaagggcgagcgcaccaactgggtcatgcacgagtatcgccttgagggcgatggcgcagccgggatcccacaggattcatttgtagtgtgccgaatcttccagaaggctgggcctggtcctcaaaacggggcacagtatggagctcccttcgtcgaggaggagtgggaggcggatgaggatgatgattttggtcctatgccagtgcagagggacgtttttggtgagcatgaggctcctggtgctatggagaaagatatcttcagatgaatgatctcattcaggacttggctggtcaaaatgagaatggcagtgttgttttgccagtttctgacacttcaaacaccagcagccattctgaagacgaaaagggaaattc

SEQ ID NO: 3138 - DNA, 1212 bp, Zea mays
  Clone ID: TF_ZmC545_9
ggtaccactcgaggcctgccgtgggaggactggcaggcacaaccgaagccaccgcttctagttctcgggttcatcgccagcaatccgggacacataatgggacagccggtgacgaggaggagggagagggacgaggaggcggagctggacctgccgccggggttccggttccaccccacagacgacgagctggtggagcactacctgtgccgcaaggcggcggggcagcgcctccccgtgcccatcatcgccgaggtggacctgtacaggttcgacccgtgggacctgccggagcgcgcgctcttcggggcccgggagtggtacttcttcacgcccagggaccgcaagtaccccaacggctcccgccccaaccgcgccgccggcgacgggtactggaaggccaccggcgccgacaagcccgtcgcgccgcgcgccgccgccgccgacgcccgcacgctcgggatcaagaaggcgctcgtcttctacgccggcaaggcgccgcgcggggtcaagacggactggatcatgcacgagtacaggctcgctgaccccggcggacgcgctaagaaggggtcgctcaggttggatgactgggtgctgtgccggctgtacaacaagaagaacgagtgggagaagatgcggctggggaaaggggcagccgccggcgtcatcggcgcagccaaagaggaggaggccatggacgtgagcatctcccactcgcagacccactcgtggggcgagacgcgcacgccggagtcggagatcgtggacaacgatccgccgccgccggcgatgatggtgcccaagaagaagcgggtggacgacggcggcagcgccaggaccagcgacctgttcgtggatctcagctacgacgacatccagggcatgtacagcggcctcgacatgctgccgccggccggcgaggacttctactcctcgctcttcgcgtcgcccagggtcagggggaaccagcccaccggagccgcggggtcttgggccccttctgagtgagctcaggcgaggatggaggcatggagatgaggagagaagacggacggcgttgcgaactctgtaaatacaggcagcataggaggagtcgaacctgactggacctggtcggggttacaagtcgagtgtgtcggtgtttcgtacatggtacatacagagaacatattctttgcaatcacttattttggtgcaaacgtgcaatcc

SEQ ID NO: 3139 - DNA, 883 bp, Zea mays
  Clone ID: TF_ZmC328_2
caagtacccaaacggctcgcgccctaaccgcaccgccgggaaggggtactggaaggcgactggggccgacaagtcgatcgtgcccatgggcagcaccagggcggcagggatcaagaaggcgctggtgttctactctggcaaggcgtccaggggcgtcaagacggactggattatgcatgagtaccgcgtcgctcaagcggaccacaccctggggaagaagggctcacataagctggacgagtgggtgttgtgccggctgtataacaagagaaacaattgggacaaggtgaaggtcgaggagcaggagttggaggcggcgccgcgccgacaacatcaccgacaaagtgcggaggattccatgtctgacagtttccagacacacgacttagacatcgacaacgcctccgagctacataattgctacggtaacaacatggtgcaagggcaggccatgaccgccagaaacgacattggcgtcgtgacggtgaaggaggacaacgactggttcaccgacatgaatctggatgatctgcaggcgtcctacaacatggcccatacggtgaatccgatcccggcccaaaccgcgaacctggtgacggggcaaggccatggctacttgcaaggctatggctacttgcagtacatgaactcaccgtcgatgaagatgtggcagacaatcctgcctccgttctgagtgtccacgatgaagagatgctcttgtacataagggggcatagaagtgactagactggaatagaaacaacatggtataggcttgtaacgtttattcatttgttagataatacgtatgtggttggtaataccaaaaaaatgcatctccctttgcactacttgaagaaagcacaaagttgtagttctcgtt

SEQ ID NO: 3140 - DNA, 359 bp, Zea mays
  Clone ID: TF_LIB3245-448-P1-N1-B7
cctcgtcagaaaattaagtatcaacttataccgagaggtgcaatatatatgggttgaccaatggaattaccctccaagagtgatcttccaatgaagggcaaccagggggatttctttgcctatcttgacaagaagtaccctaatggttctaggtcaaacagggcaacactaactggatactggaaatgaactgggatggaccgctccataaagcttaacaagctaactctaggaacaaaaaatacgttactttttcatgaaaggcgacctctcttttgcatacgcactgagtggattattcatgagttctacattgacgcgaatggattttaaagtcgtccttatattaaagatgcctt

SEQ ID NO: 3141 - DNA, 649 bp, Zea mays
  Clone ID: TF_ZmC27_5
attccaaagctctcgagacttcctcagcaatcaatcagctttccagcgatcggcagctcctcgatcgtttcgaagctccaatccgcccggccgcctgttgccactagctaggtgatcgatcgaatggactgcggtggcgcgctgcagctcccgcctgggttccgcttccaccccaccgatgacgagctggtgatgtactatctcctccgcaagtgcggcggcctgccgctcgccgcgccggtcatcgccgaggtggatctctacaagttcgacccatggcagctcccagagaaggcgttcggtggggagaaggagtggtacttcttctcgccgcgcgaccgcaagtacccgaatggctccaggcctaaccgggcggccgggacagggtactggaaggccaccggcgccgacaagccggtagggtcgccgcgccccgtggccatcaagaaggcgctcgtcttctacgccgggaagccgcccaagggcgtcaagaccaactggatcatgcacgagtaccgccctcgcggacgtcgaccgctcggccgccgcacgcaagaagaccaacaacgcgctcaggctggatgactgggtgctgtgccggatctacaataagaagggcgttatcgagcggtacgacacagtgaacgac

SEQ ID NO: 3142 - DNA, 234 bp, Zea mays
  Clone ID: TF_700168653H1
caccactccagtccctccatttccctcagctcgcgcagcagctagccggcagccaacaaccgaaccaacgagccaacccacaggccacagcgagcgagtaaagcgtccaatggtagcgatggcggccgggcagcagcagcagcagcagcagcgccgctacgcgaggcggactcaacctgcccccgtgcttccggttccacccgacggacgaggagctggtggctcactagctct

SEQ ID NO: 3143 - DNA, 1755 bp, Zea mays
  Clone ID: TF_ZmC17732_2
gccttcgtgtccctcccctccactccctcaccgggggctgggctggtggggagtggggactgggggcagtcgccacgccgcagtccattctttcgtcacccatcgcagctccaacacctctcgctagtcgtcatggcggcttccgcggcagcgttccccctcccaccgccgacgcctcctcttcgactttcacatgtcttttgatatcacagaaaaggattgcccctgccttcactgctgtgaatgccagggacgtttctgtcgccctacaatatatggacattggacttgatagttggcaaactttcttctatatactggacgttccagctttcgccaacctgctgctttaaccacatcttttccttctttcccgattttgcctctcactatcatcaattaccgctaaaagtgaaacaagtgttctccctatggccaagacatcacttcctcctggattccggtttcatccaactgatgtagaactcacagtctactatttaaagaggaaactactgggaaaacacttacgctgcaatgctatcactgagattgatctatacaagttcgccccttgggatcttccaggctggaggacgaggaaatagctgcttctggtgttaaactggatgcctgcgttctatgcaaaatctttcagaaaagtggcccagggcccaagattggcgcacagtatggtgccccattcaatgaagaagactggaacgatgccagtaaatgtagagtgttctccatgtgtgccttctgtggccccttgcgcacctgaaatcaagtcgtggtgggttgaattctgctggtcaacgcctggctgtgagttatgatgtcaaggtttccttgggctcctcggcagaaggtatcaacagacctgctgtcaatggagttcatcctgtcagaccttctcctgatgctcctaatgactgcatacacattcaattgctggctgaggttatgagatgttcctcaacctcaatgcatgttttacgtactgctggtgacgatggtttgctggtaatttcgttgatgccaggctactttctttttttgttttgtttcttgttagctccagtgactttctatttctggtgtcgatgcaggctgattcaactgctgactacagtagtgataatagaatatctttggatgctattgaaactatattctgtgaagtggatgagcttgggccccaggctatggtgaacaatactaaccattgtgactcatgcggtgagtatttgattcaccctacgatggtggcacgaggagctgaacagtacttagagctaaatgacctgtccttttcgctcaccgatggtcctgattcctgtggcgtgcttttctctaatggtgtatctgttgagcaactaccggatcttgagctcaggtttgagcagttctctcctgaccacatctccaataccgctattgcttccacatcaacaacggttggttcatctgcttcagtgcccttattggaggatcacaggacctgattcagaattggagtcatctggcgcacatgttaattgaatctaggaggatctgcaggacaaaggcataatgctccctttttttcaattttcatgaagttagaatttttttttggatgaaggcacggattagtgaccacttggcacagaaatatgtttgtgttgcggcttgtgaatccaggaccatttctctgcctgtagttttgcatggtagaactagatgggcaacaacaaaatgtgttcagtattg

SEQ ID NO: 3144 - DNA, 834 bp, Zea mays
  Clone ID: TF_LIB4743-101-Q1-K1-G2
cattgggtacctcgaggccggccgggccgtttcccctatcgcgattctctctcctccgtgtttccgtcgccacctaccacgtgaaccttcctgtcgcgtgtgtgctgaaaggccgagcagactacaatccgctgcttacctctgttctgttctgtctcgcgattacttgcactagagagagagatttgtttcgccttgctgtgctggttcgatgcgattctctcggactccgctaaatcattttagttaaaaaaataccgcgctccctttccaagatgcgatttgatttggtgcgatgcagctgaacaaaatccttgtgctgattcatttttgtcgttccgcgcgtgtcgactcgagccaaaactcccgggaaacattattccgctttcctgatccggtggtaccgatgagatgtgaatgtgattatgccaatgcaggtaagtctctgatccggtccgacgatcctgagtggttcttcttggcgcccaaggaccgcaagtaccccaacggtagcaggtcgaacagggccaccgtggccgggtactggaaggctactggcccggacaggaacatcaagtccaagggcgacaagagcaaacagtttaccatcggcaagaagaagacccttgtcttccaccgtggacgcgccccgaagggcgagcgcacagggtggattatgcacgagtaccgcaccaccgagcctcagttcgagtctggcaagaaaggggggttatgttctttatcgcctcttctggaaccagaggagaaactgagcgctccagcccaaggaaatggattagagtggcactcccctactactattcgttctttccg

SEQ ID NO: 3145 - DNA, 3048 bp, Zea mays
  Clone ID: TF_ZmC151_1
cattgggggcgctcccggttggccgggccgggacacccacacccacacccacccacacaaccgcacctcgcacccattgaccagacggcggcgctcatctcctcccccacggttctccccatcggcctgctggcttctccccggcttccccgatactgatcctcatcactcatgtctgctgaagttgctggaggacacccttatttcctctcgtgctacttctggttcatatactgcataaaattccgagattttacttgatacaagtggaacactcagagttttgtgcgaatacttcctaccatgtgaatcagttgtagctggtgaatttggcaagactcaatttctctcatctgagttcagaaacgtttgcttggtctcctgcttcccttgagtcttgccaaccatagttttctctcatctctttctgtgacttgaccaacatctcttttggtcctgtcagtctcgcaatactcccttccaaagacttgtctagaggttggattgccctgctctctgctggcactgcagcctgctgaagtctttacttgctgcattctgtgctcacttttgaaagctgctctcttctgctctgcgttgttgatttctgcactcaagcttctcttgcctgtgcactcaagcttctctcttcctgggcaactagtgatctccttgaagcatttcagcttttacctagagatctttctgttgttgctgaaggcaagagaggctttagggtgatggcgcaaactagcctgcctcctggttttcgtttccacccaaccgatgttgagctcgtttcctactacttgaagaggaagatcatgggaaagaaacatatcgtggatgctatagcagaggttgatctgtacaagtttcctccctgggatctatgtgaaaagtcctctcttcgaagtaaagatcttgaatggttctttttttgtcctcgtgacaagaagtatcctaacgggtctaggacaaatcgtgccacaccaaatggttactggaagactagtggaaaggatagaataattatgcttaactcccgcaccgttgggatgaagaaaacattgatatttcatgaaggcaaggcccctaagggcgacagaactgattgggtgatgtatgaatacagaatggaagatgaggatttggtttctgctggtttctcaaaggatgcttatgtactctgcaaaattttcaagaaaagtggccttggtccaagaatcggagagcaatatggggctccatttaatgaagacgaatgggataatgcagaagtcgaaacttctctgtttcctttgacttgttcagaagtgaatccaacagagggacaacgtgctcagcctactgtcctggctggtgctcttctggaacccgaaccacctctacataattcatcttctacatgtgctggagaggaatcatcatttggtcatgccactgctgaggacttaacttttagctatactgttgctagctctgctatccaagatacacctgctcggatgtcaggagacggtgtggtttctgtgaacaacatatccaatgtggccaatgacatgcgtagtcctcgtgactgtgatgaatttctatcggagttgtctagatttatgaatgattctcctctgcgtaacactcctcttggagagtgctctggtcttcctccgatgtctgaagctgaggctcatgcttttgaagtcaactcttttggcctctacaatgaattatcagagcttgttgagttaggaggcgcggataacaacttaaacaccagcaatgtggaaactacagattacctcatgttgccacctgacagagaactgtcggctaatgattacatggaactaaacgatctccttgctcctgacccaagcttccccagtgaattttctgctcaggacaatcaatatatgcagcatcctcttgctcagtacaatggacattatgatctgtcaggtccttcggagccaacaatgcctagcattttcgatgtttttcctcccaataatggagtcctcgcaacagatgatccagccaactacttggacccagccatgcagttccctttctcatgattggttaccatttgtcatggaggtacggatgtttatacctgctctttttgtgcttgaacttgtctggactgcttcggtgttgcaacttgcagctcgctgttgctacaactctatccaccctgaacgtcaaggacgtcattgatgtcatgcctgggcccatgaaatcgtctgttgctcttctgaaccaagccgaccttggctggtatttcttggaagcacggtgcttggaacaatctgcatcgactgctgtatgctcccaactggttgagctaacggccaatctcggctcactctgctgaggagatcatagcctgtaaatctttgattatgctgttacttgtgtgtatcgcaacctgcctgattaccattgtcttgtgtttgagttttgacaatatgcaaaccataataatgtcgtaatatggaactcgtttatcatgtttattccatactcccgttatgtgagcttttggatggtctttctagaaggtgcacaaggccaaccggccaaaagaaaggacatcaagtgccaccaccggtagaagacggagccgaacttgcttgactgcatcgacgagcgcgcttcgtgacatgatggctttctcaagaaatataaaggccggagggagaatttgagtgtccacctaaattttaagaatttagtaggtgtcttattttgttttttgtctggtggtctatatttagctacgaggggttgaatagggacgtagagagtatcctttttttgtttaaagtgcggtctgggcctgccacgcgttcgaatattatgggaatcagcaagtagtaagtaaatattggactgccaactgcttctgaaacttttacttcctgtttgatccttgatataaatgttttatcctaaaaaaaaaaaaaaaaaaaaaaaaaaaaaaaaaaaaaaaaaaaaaaaaaaaaaaaaaaaaaaaaaaaaaaaaactcggagaggggcccgtac

SEQ ID NO: 3146 - DNA, 881 bp, Zea mays
  unsure (1)..(881): unsure at all n locations
  Clone ID: TF_ZmC545_14
gggtcgacccacgcatccgcccacgcgtccgggcacaaccgaagccaccgcttctagttctcgggttcatcgccagcaatccagaccacataatgggacagccggtgacgaggaggagggagagggacgcggaggcggagctggacctgccgccggggttccggttccaccccacagacgacgagctggtggagcactacctgtgccgcaaggcggcggggcagcgcctccccgtgcccatcatcgccgaggtggacctgtacaggttcgacccgtgggacctgccggagcgcgcgctcttcgggacccgcgagtggtacttcttcacgcccagggaccgcaagtaccccaacggctcccgccccaaccgcgccgccggcgacgggtactggaaggccaccggcgccgacaagcccgtcgcgccgcgcgccgccgcccgcacgctcgggatcaagaaggcgctcatcttctacgccggcaaggcgccgcgcggggtcaagacggactggatcatgcacgagtacaggctcgctgacgccggccgccgcgccaagaaggggtcgctcaggttggatgactgggtgctgtgccggctgtacaacaagaagaacgagtgggagaagatgcggctggggaagggggcagccgccggcacagtcaaagaggaggaggccatggacatgagcacctcccactcgcagatcacccactcgtggggcgagacgcgcacgccggagtcggagatcgtggacaacgacctgccgttcccggatccggcgatgatggtgcccaagaaagagcgggtggacgacggcggcagcgccaggaccagcgacctgntcgtggatctcagctacgacgacatccaaagcatgtacagc

SEQ ID NO: 3147 - DNA, 292 bp, Zea mays
  Clone ID: TF_uC-zmflb73187e11b1
gtttgcttaatttcatgtcctgcctaccttttcctaccggtatccaggcctcccccagcccggctcgggcgtcgcccatacatgaaccatccgtcctaggagcaatactacgtccagccggcgccaggcccggcggtggcggacgatgccacctgcctcgcgccggactaacggttacacccgaccgatgaggagctggtatcctactacctgaagcgcaaggtcctaagacggccgctcaaggctgatgccatcgccgatgtggaccttgacacgctcgagccctgggacc

SEQ ID NO: 3148 - DNA, 1319 bp, Zea mays
  Clone ID: TF_ZmC198_10
agaaaatgaaccttgactagtttattatgactttcatgtcagaggccccgtaccaacatcacgcagaaataaaaagagcatatacgagtactcaactcttcttctacttccaacttgctcgtgcagtatatctacaaccgaattcacatctaagctagcatcgcggctcgccgttgcagagctgaaccgcatttcggtgatacagttcaccacttcttccaagttgcgcgtgcaccttcctcacttcagagttcagacttcagtatagcaggtgggctaagggagagaagaagaggtggtcctgccacgggctgcgcagctgaaacgggtcctgcatctgcgtccagtcggcgactccgaggtgcgttggcacctgcagggtgggcaggtcaccgtgcctcaccgccgggccggcaacgctcgcggcatgcagtagggaggacgacgtcgacgctaccgtgaccgtcgtggcgtccgcggcctccgtcttggcctccctgggcgcgccgtagctgtcgcccgacagcgcgggggaggacgaggactgggaactgcaggaagcttgtgtcgtccgacgacaggtagtcgtcgccggtggagccgtcggcctggaccagggatgttgctctagccccgccgatgcgcgtctgcatctcctccatggcagaggccctctgctcgagctccttcagtggcgtggccttcctgtagatcttgcagatcaccatgtcctccttgggaggcggcggcggagcggcgcggccggcggcggagtggtcgggtaggcggtactcgttcatgacccagtccgtcttggtgccgcgcggggcgcgcccctggtagaagacgagcgtcttcttgagcccgatcacccgcttggcgtcgccggagctccggatggccctgtccgaccccgtggccttccagaacccgcgctccgtcgtccggttcggccgcccgccgctgccgccttgcggtcgcgcggcacgaagaagtaccactccctctcgccgatcttcgccatcgcaggaaggtcccaggggtcgtagcggtagatgttgaggctgccgatgatgtcgaagtggagctgcttgccgtggaccacgcgggagaggtagaagccgaggagctcctcctcggtgggatggaaccggaagcccgggaggtcctgctccacctccatggacgccgccccggccatcactgccatcgatcggtgctcgttctgctctcgtgagtcgtcttcttctcggacgcacgacgctgctctgctctgctctgcttgttgccccacgcgtccgcccacgcgtccgcgaaca

SEQ ID NO: 3149 - DNA, 471 bp, Zea mays
  Clone ID: TF_LIB3151-013-Q1-K1-H9
tacggctggagaagacgacagaaggggacccttttgctttctttatccaataataataaccccggttttccctctccatacccttttgcttttctttatccaataataagaacttcccacgagtggctttaactggtctggtctggtctggtcggacacacaaaaatattagtatggagaaggtgagttttgtgaagaatggagagcttagattgcctccggggtttcgtttccacccgactgatgaggagccggttttgcagtacttgaagcgcaaggtcttctcctgccctctgccagcctctatcattcctgaggttgatgtttgcaagtctgatccttgggatttgccaagtgatttggagcaagagagatacttctttagcaccaaagaggccaaatatcccaacggaaatcgctctaacagagccacaaattcgggttattggaaggcaactggcttggacaaac

SEQ ID NO: 3150 - DNA, 538 bp, Zea mays
  Clone ID: TF_LIB5117-072-A1-PF1-G4
gattccctctcggaaacggacggtacaatcataccgatcaggagccagctgctgcttcctgtgttggtcccactgccgagatcagcagcagaagcagccgtcggtcctctgcgcctctcgttgatcgcttgatccgaggggatccaaggcgagctgcgtacgtggcggcggcgatgagttcgctgagcatggtggaggcgaggctgccgccggggttcaggttccacccgcgggacgacgagctcgtgctcgactacctgtccaggaagctcggcggcggcgccggaggggccgcggtggcgagcatctacggctgccccgccatggtcgacgtcgacctcaacaagattgagccctgggacctccccgaaatcgcatgcattggcggcaaggagtggtacttctacagcttaagggacaggaagtacgctacaggccagagaacaaatagagcaactgaatcaggctactggaaggccaccgggaaagaccgtgcgataagccggaaaggcttgctagctggcatgagaaaaaccct

SEQ ID NO: 3151 - DNA, 224 bp, Zea mays
  Clone ID: TF_700029568H1
tgaggaggccatggagctgccgccggggttccgcttccaccccacagacgaggagctcatcacgcactacctcgcctccagcagtagcagcctcgtcgcgtcgtcggtcagagctggcgcgtcgtcaaagcaggacgagtgggtgctgtgcaggggtgtcaagaagagcatcgagccgccatccgtgctcggcagcaagagggtctcgtcggttgcgtgcatgg

SEQ ID NO: 3152 - DNA, 1412 bp, Zea mays
  Clone ID: TF_ZmC12224_2
ctcgaggccggccgggaagagtcaagatacatcagagtagctcattgcatagtttcagtgtgtaattatatatttgtctcctctagtgcagtactagagtctagtctagctagtttagattgagtctgcttgttcatctagcgcgtgttttggggtagctagctagctagacacgcgcacccggacaaacgcacgcagcagacaccaagcaggaatcatcggcggcaggcggagggatggggctgagggagattgagtcgacattgccgccggggttcaggttctatcccagcgacgaggagctggtatgccattacctctacaggaaggtggccaacgagcgctccgtgcagggaacgctggtggaggtcgacctgcacgagcgcgaaccatgggagcttccagcttcagggaccgcaagtacgcgaccgggccgcgcacgaaccgcgccaccaagacgggctactggaaggccaccggcaaggaccgcgaggtgcgcgacccggccgcccgcgccgtcgtcgtcggcatgcggaagacgctcgtcttctaccagggccgtgcccccagcggcgtcaagtcatgctgggtcatgcacgagttccgcctcgactcgccgcgtacgacgacgacgccaccgaaggaggactgggtgctgtgcagggtgttccagaagcggaaagtcgacggcagcgagcaagacaacggcgtctccccctcgccgccggtctttgccagcgcatcgcagtcgcagggggtcgtcctgccgccggaccagccctgcgtggtggacgcgtacgtcgtggtagaccagccgggctcttcttccgtcggcctcgcgccgccgcaggagaacctcggtagcggcctggacgcgttgctgacgaacggagcgatgtggcagtacacctcgtcggtcttcggtcacttgttgccgcaggaggcgaccaactccccgccggtgatggacctaggctccaggggaggaggaggaggaggagactacgggtgcagcttcttctacgacagcagcttcgaggacatggccaacatcgggttccgacaagggtggatgggctgatccaggaccaggaggcacacgtacgtgcgtgcagtcatgcgatatggaatgtgcatttgtgaaggaagtgattgaattgattccattagtagtagcaccctctagtgttgtacagtaggtacgtatagtgtgagattggattattgggaattgttagagtgcacgggcctctcaaatccaaagaagtaacagcggaaagaaaagctagtagctagagcacacatgtatatttgcacaaggtagatggtttgatcaaccgcatgacacggcaattgtatatatctctccacccctactaccatgtttgtaaataaattaatataaatcaatc

SEQ ID NO: 3153 - DNA, 717 bp, Zea mays
  Clone ID: TF_ZmC38242_2
catcctctccagtgcctaggtggtactggtggatcacccaattggtcttctcagcctttccacccttcaacgggcttatataaagcaccattattttcttacaaccaaggtgttttccatcaactagtactggctttgtgttgcctgtcttgtgccaacggacatcagcatcgtcagtgtttatccttcgacgcttcctagtcccagtgttgtaagccttaaatgttctgtggaagaaatgtgatacacttccattttgtttaacacctggaagtttctgtggatgagtgtaacagatgccttcatcttcctcaactgttggaatgaattcatcaatgaacggatgtggttttattccagattttccatgttttgccattaagtgccagattaattcctggtcagaaggatcaaattttacacctttaggcaaaccgggccactggtgaacaacatcactgttatcaatcacatgactgcactttgggcactctttacttgggttgccgatccatttctgtttacttggatctgaagacccagaagcattttttattttggtggcaaatctttggctgtcaattatccaagttgtccctgtcatggctgcggcagcgcttcctaccacggccgcagggtcctagggttccggcgagcacgcggcgacggagtgagaacggggtggagcagggagaactttggtttgaacgagggcta

SEQ ID NO: 3154 - DNA, 1892 bp, Zea mays
  Clone ID: TF_ZmC512_1
cctcgaggccggccgggccgggacacaccaggccgagcgcgcgcgcacgcagcagccaacaggggctcgccggggtagcttttaacagggacaagcctcctccccccggccggccctctttttctctttgttctcttcccggccgctttgttccctctcgctcgccctcttcttttgcgcggccctgtcattcccctggggatcagccttagcgttgcctcatatgggggcgagctagctagctgctgagcaaagcggcgggacaacaagaggctttccatctctctccctccctctctctgatctgctatcgtccccttccctgcttccctccccctcttcttgtagagaaagaggaggcgagggctgccggccggccgggacgtggtgacaagctaggctagctgggggccggacgagcgagagggcgagatcgtcgattcgcgtaatacgtcccgtcgccggccatgacatggtgcaacagcttcaacgacgtgcgcgccgtggagaacaacctggccaccgccgccgccgtggccgccgccgccgccaagaaacagcagcagcagcaggcatcctcgcacgtcaacctcatcaggacctgcccctcctgcggccaccgcgcacagtatgaacaggtgcaggcggcggcgacgatccaggacctgccggggctgccggccggcgtgaagttcgatccgacggaccaggagctgctggagcacctggaggggaaggccaggccggacgcccgcaagctgcaccacccgctcatcgacgagttcatccccaccatcgagggcgagaacggcatctgctacacgcatccggagaggcttcctggtgtcggcaaggatggcctcattcgacacttcttccaccgtccgtctaaggcttacacgaccgggacgaggaaacgacgaaaggtccataccgacgaacagggtggcgagacgcgatggcacaagacgggcaagacccgtccagtgttcaccggtggaaaactcaagggctacaagaagatcctggtactctacaccaactacgggaagcagcggaagccggagaagacaaactgggtgatgcatcagtaccacctagggtccgatgaggaggagaaggacggcgagctcgtcgtctccaaggtgttctaccagacgcagccgaggcagtgcggcagcggttcggcgacggctaaggacgccatcccgctcgctgccaacgcagcgactgaccaccaccaccaccaccaccatgacggtggcaatggcggcggcaacaacatgttgaaggaggcaggcattgtagatttctacagcccagcagcactaattagctacaaccaggcagcttctaacagcagggttgccgcttctgctcacctggtgcctaactttgaggtgcacactacatcgggggctgctggctttggtccctgaccaagacgcgcaagaggaactattcgactgatataggttagaggggagggaaatgcaggcagataatggcaacttcatgaatgcaataacttactacaaatggtcgacgagtttactgaaccgtaatggtggacaataagaggatgagtacgtgttgagtgagtggttggacatacaaatactgaagtgtaggaatccatacaactatacattgttcattaattgttacacatatatgtaacttgatgctatcaattttttgtttaatgatctttgttccataataagaatggagtttaatattgtacatcagttctttattacctaaaggacttgtatatgtatacaaatcattgtacacctttttttggaagaacatatctgttgtatcattttgttgattgttgctcaacccttccagcaaagtaaaatgaagcatatataactttgaat

SEQ ID NO: 3155 - DNA, 1455 bp, Zea mays
  Clone ID: TF_ZmC545_5
cgtccgttctcggacgcgtgggatttccctcacctcccgcagcagctagccgccagccaacaaccgaaccaaccaaccaacccacagcgagcgagtaaagcgtccaatggtagcgatggcggccgtgcagcagaagcagcagcagcagcgccgcgacgcggaggcggagctcaacctgcccccgggcttccggttccacccgacggacgaggagctggtggcgcactacctctgcgcgcgcgccgcggggcgccgcccgccggtgtccatcatcgccgaggtcgacctgtaccgcttcgacccctgggacctgccggagcgcgccctctttgggcgccgcgagtggtacttcttcacgccgcgggaccgcaagtaccccaacggctcccgccccaaccgcgccgctgggtcgggctactggaaggccacgggcgcggacaagcccgtggagcacgggggccggacggcggggatcaagaaggcgctcgtgttctaccacggcaagccgtcgcgcggggtcaagacggaggggatcatgcacgcacgctcgggatccagaaggcgctcgtcccctacgccggcaaggcgccgcgcggggtcaagacagactggctcatggctgagtacaggctcgctgacgccggccgccgcgccaagaaggggtcgctcaggttggatgactgggtgctgtgccggctgtacaacaagaagaacgagtgggagaagatgcggctggggaagggggcagccgccggcgccggacgcgtgggggaggccatggacatgagcacctcccactcgcagatcacccactcgtggggcgagacgcgcacgccggagtcggagatcgtggacaacgacctgccgttcccggatccggcgatgatggtgcccaagaaggagcgggtggacgacggcggcagcgccaggaccagcgacctgttcgtggatctcagctacgacgacatccaaggcatgtacagcggcctcgacatgctgccgccggccggcgaggacttgtactcctcgctcttcgcgtcgcccagggtcagggggaaccagcccaccggacccgcggggttgggccccttctgagtgagctcaggcgaggatggaggcatggagatcaggagagaagacggacggcgttgccaactctgtaaatacagcataggacgaggagtcgaacctgactgaacctggtcggggttacaagtcgagtgtgtcggtgtttcgtacatgggaaccgggccttacatgggagccggcccggtcttggtttggcgctggctcattctttagtttcacttcctgcgcagacggtagatgtgtatgcatagctgttcactatcacttcctcttcaacagaaccgattcactccgaaacacaaaaaaaaaaaaaaaaaaaaatttataataattaatttttttttaaattttattgtatttaatttt

SEQ ID NO: 3156 - DNA, 872 bp, Zea mays
  Clone ID: TF_ZmC594767_1
atgccggccgtcgaggccggccgctaaacccaaggcggaccatggtcatggtcatgccttttactcctttctcgtctgccagcgcgcgggggaaggagggacgaaagtgatgcagccgccgccgcagctgccggcggctttgccggtagggttccgcttccgccctacggacgaggagctggtgctacactacctcaagcctaagatcgcgggtcgcgcgcacgcggatttgctcctcatccccgatgtcgacctctcggcgtgcgagccttgggagctgcccgctaaggccctcatcaggtccgacgatcccgagtggttcttcttcgcgcccctagaccgcaagtaccctggaggccaccgctccaaccgctccaccgcagccgggtactggaaggccacgggcaaggaccgcctcatccgctcgcgcccagcaggcaccctcatcggcgtcaagaagacgctcgtcttccacagaggcagggcaccccgaggacaccgcaccgcctggatcatgcacgagtaccgtacggccgagccccagctcccacaaggccaaaacggtagcttcgtgctctaccgcctattcaacaagaacgaggaggaatccgaagcctcagacgctgccgattcaccgtccacgtcgtctccgcccatcgcgccggaggtgaaaactgagaatttgagccaaccgacttctgccaaaatgtctccccatattgcaactgtcagtagcaatgagccaacgtctaatcagggagacgttaatcttctggatgtgttaacccagcttccagacctacatcctgagcaagcattcgatggattccctaccatcacctcttctatgcgcccttacactgatcatccat

SEQ ID NO: 3157 - DNA, 849 bp, Zea mays
  unsure (1)..(849): unsure at all n locations
  Clone ID: TF_ZmC1378_2
attgattccctccacctttcttgtttcccacaagcagcagcagcaccgtagttcttggcatcatcatcaattgaagagattatcgatcgatcggccatggtggagcctagtgtgaaatcgtcagatcagcatggtggtggaggagtcgacgtgctgttcctgccacctggcttcaggttccatcccacggacgaggaggtcatcaccagctacctcctgcagaagctcctcaaccctagcttcgcgccgcatgccatcggggaggtggacctcaacaagtgcgagccatgggatctcccaagcaaggcgaagatgggggaggaggattccaaggagtggtacttcttctgccgcaagggcatgaaatacccgacgggcacgcgggcgaaccgcgccaccaaggagggatactggaaggcgacgggcaaggacagggagatcttcttcaagccagtagctgggcacgacgacgtcgaccgccgtgagcagctggtggggatgaagaagacgctggtgttctacacgggcagggctccaaggggcaccaagaccaactgggtgatgcacgagttccgcctcatcgagggcaggcaccgcaccaccaacgacgacctactactacgcttcaaccccaaggatgaatgggtcgtgtgcaaggtgcaccacaaagggggccaacatgatgccagcgccgccaaggccgctggcggcggcggaaaagagcagcactactcgtccgccgccggaacgcccaacgtcagctccgtcgagaccggcggcggcgacgaccacgacngagtccctagtgactcatgctgctggggatatactcagcagctgccacttcac

SEQ ID NO: 3158 - DNA, 824 bp, Zea mays
  unsure (1)..(824): unsure at all n locations
  Clone ID: TF_LIB4741-094-Q1-K1-F10
gtaccctcgnaggcnncggccgggattcctcacacccacacaaaccgcacctcatccctgttgacccgacggtggcgctcatctcctccccgacggtggcgctcatctcctccccgacggttctccccatcgacctgctggcttcccttcgtcttccccgacactgatcctcatcactcatgtctgctgaagttgccggaggaaacccttatttcttctcgtgctacttctggttcatatactgcataaaattccgagatttcacttgatacaagtggaacactaggagttttgtgcgaatacttcctaccatgtgaatcagttgtagctggtgaatttggcaagactcaagttctctcatctggtttcagaaaacatctgtcggttgattgcttggtctcctgtttcctttgagtcttgccaaccaaagttttctctcagcatcagttgtggtctacgaactctttctgtgacttgaccaacatctctttttgtcctgtcaatcttgcaacactcccttccaaagacttgtctagaggctggattgccttgctctctgctggcgctgcagcctcctttagtcttccaagttttctctcggcagcagttgtgatatacgaactctttctgtgacttgaccaacatctcttttggtcctgtcaatcttgcaacactcccttccaaagacttgtctagagcttttgtcttgagatctttcatcagtgctaaaggcaaaagaggtcttagggcgatggcgcaaactagcctgcctcctggatttcgtttccacccaactgatgttgagcttgtttcctactatttga

SEQ ID NO: 3159 - DNA, 849 bp, Zea mays
  Clone ID: TF_LIB4758-097-R1-K1-B9
ctcgagccggccagcagcccatcaccagtcgtccggcgcccgaccagccgcaccacggagcgcggcttctggaaggctacgggctccgaccgcgccgtgcgctgcgcccacgaccccaagcgcctcatcggcctcaagaagacgctcgtctactacgagggccgcgcgcctcgtggcaccaagaccgactgggtcatgaacgagtaccgcctccccgacgcctgcaataacaacaacaacaacaataatgccgtcgccggcgactcatcgacggcggcagcggcctcctccaccaccaccaccaacaactcgcctaaggaggacatcgtgctgtgcaaggtctaccggaaggccgtgtcgctcaaggagctggagcagcgagtggccatggaggagctggcgcgcgccacgccgtccgcgcccacaaacgccgggtcgcccgccgactccatgtcgtcgtccgaccaggaccaacaaacccagcttgggcagggaaggagtggagatcatgatgacgatgcccgtcggcagcatctcaccaccgcctgtgatgatgagcatgaagcaagaggaggtggccgagcccgaggcggcgccgctgccggcggtgctgacgaggccgtcgacgctgagcctgccgcagctggaggtggcgaagcagcagcaggagtggatgcaggaccccttcttgacgcagctgcggagcccatgggatggagagctggtctccctactaccccagcgtcctcaacttttaaccaatgcaatctcagaatctcagatcgaccgtcgtcctcgatcagtagctatatatatatggtcattggtcccacagactatactaatagc

SEQ ID NO: 3160 - DNA, 1313 bp, Zea mays
  Clone ID: TF_ZmC13898_1
ctaagctccagctagactgtcctgctctgcttcggcgctactgtgcagtgtgcacagccagccagctctgcagcagagcagagtccggctgtgagccctgaccagagaggattcagtgccatggagagacctgcgcaggcgcccacgcagctgccgccggggttccggttccaccccaccgacgaggagctggtagtgctgtacctccgccggaaggccctggctcgcccgctgccggccgccgtcatccccgtcgtccacgacgtcgccgggctcgatccatgggacctccctggggcaagcgaaggggagggttacttctttagcctgcggcgagcgccggcgaccggccgtggcagccgcaggaggagagctgggagcgggtactggaaggccacgggcaaggaggagccggtgttcctacagtgcggcggcggcggcgtaggcggcaagaggcagctgctcgtgggcggcaagacggcgctcgccttccaccgcagtgagccgtcgccgccgtcgtcgtcgcggacaggctgggtcatgcacgagtaccggctcgccgccgcgtcccgcggcgtggccgagcagaggaagaagaatgcgagccacggttgttgcgatgctgagccgggagagtgggtcgtgtgccgggtctttctgaagaagggagcaagaagaagcaggccgggccgggatggtaaccacagcagagctctgagacaccgcgcatccgctgcgccgccgcagctccgggaaggtgtgggaggacggcagccgttgctgttcccggcgccacagtcgccgtcctcaagctgtgtcaccggcgttaccgacttgtcagacgaagaagacgaagtcagcagcggcagcataacaagagttgcacctcagagagaggcctgatggggattttaagtgttccctcccccctctctcatggtcccgtagcccaacctttttctggtaccatataatgatgatgagttaagcacgagataatcaggtttaaggcatgtccagcgcaggagtgatcccgaaatatcatgtcaaatggatctggcaacctgagtttaaatcaggagcaatagtttctacgcttcatctgtgaagcagcatccactttgatttggaactagaaaatgggcgctgcaacggcccaatggtgtgtaaaacctaaaaatgggatggtagccaaggcattctttaagatgtaatgtccccatcccaaaatataattcgttttatattaaacacatttttattaagcaatatatgagtatgattctcatatatacctatattcattatcattt

SEQ ID NO: 3161 - DNA, 484 bp, Zea mays
  unsure (1)..(484): unsure at all n locations
  Clone ID: TF_LIB5117-061-A1-PF1-E7
tcgagcncggcggccgggataacctactctcggtagactgtgcttgcctcactcgatccctccacccacccggccatcggcggctggttgctgctgcttcttgtgtgggttcttccactggcgtgcagggtcgagatcggcagcagcagccgtcgttcctctcttctagctcccgacaatcgattgatctgtctgagggggaaacgagctgcgtggtggtggcggccgccggggaggcgatgaattcgctgagcatggtggaggcgaggctgccgccggggttcaggtcccacccgcgggacgacgagctcgtgctcgactacctggcaaagaaactcggtggcggcggcggaggggcggcggctgcggttgcgagcatgtacggctgccccaccatggtcgacgtcgacctcaacaagatcgagccctgggacctccctgaaattgcatgcattggcggaaaggagtgctacttctactgctt

SEQ ID NO: 3162 - DNA, 910 bp, Zea mays
  Clone ID: TF_ZmC3684_1
gcccccaagggacagaagacgcactgggtcatgcacgagtaccgcctcgagggcgcctacgcctaccatttcctccccagctccacaagggacgagtgggtgatcgcgagggtgttccagaagcccggcgaggtcccacctgcagcccgcaagcaccgcctcggcgcccttagcagcactaccggcaccgccgcgggcgattcctgcttctcggactctacctcggcctccatcggcggcgcgtcgtcgtcatccacgcctggcccgctgttcgcgtcggcggccgccgccgtggccaatgccggcgccgccgacggcgacaccagctcctactgcggcggcgctgccaaccatggcaacctggtcaccggccgtgagctcgtgccctgcttctccactgccaccattaacggccccctagttgccgccgcgctcggcatcgggcagccgtacaacgcagccccgctgccgttcgagcagcagccgccgcctccggccttcctgccgagcctgcgttcccttcaggacaacctccagcttccaccgttcctctcagcaggcggtctgggcggcggcggggctctccactggctccccgccggcggcatggaggtcaaggtcgagggccgctcggcgccaccgcagatggctgtcggccccggccagctcgatggcgctttcggctggagcttctagttcttcgctgcactacatggttgtgcccatctatctagctagtagtggtttcttcatgcgttgtacgttaagcttggttaatcaactgctagtaagtgactgggtcgtcgttctaagtaatgtagtaactgtgttgtagtctctcatctaactgcagtagcagctttatttgttaaaagattaaaaaaaaaaaaaaaaaagggcggccgcaaaa

SEQ ID NO: 3163 - DNA, 657 bp, Zea mays
  Clone ID: TF_LIB3912-048-Q6-N6-H8
gcccctcacggccagaagaccgactggatcatgcacgagtaccgcctcgaggacgccgacgacgacgacgcccagggcggcaccagcgaggacggatgggtggtgtgccgcgtgttcaagaagaagtgcttcttcaagattggcggaggcgaagggagcaccaccagcagccagggcgcggatgccggcggccacctggccaccatgtcgccgccgctcggcggacaccacgacctggcgtacatgcacccgcacccgtactaccaccacgccgcctcctactactcccagatgcaggccccggggccgcatgccaccgcatactcgcaccacgtgcaggtccaggacctcctcaccaaccaccgacccacggacgacgacggcgccggcaccggctacgacttctccggcctgcccgtcgagaatcaacccggcggcggccttgacgtcggcagcagcgatggcgtcgccacagacgacggtggccagctggctggcgaaaggagggatcagaccaccggtacagccgcagatcatcagtggcaggcgatggatggtttcagcaacggcgggagcgccgaggtgcagcaaatgaccggcgcccaacgaggcgggggagatggatttgtggggttacggaaggtaaaaacttgatga

SEQ ID NO: 3164 - DNA, 639 bp, Zea mays
  Clone ID: TF_LIB4738-096-Q1-K1-A4
aagcctcttacatcttttagatatgcttgcttactagctcactttgctgtgctgtaccgaactacaggggtaggtaggtatgtaggtggagttacattgccgagcaagcgagcgatgccgccaagacaacacgcatcgatcgccatgcccataagcggcgacgctaatggcgacggtattagtagaagaagtagactgatgaccaacctcccgtgcggactccgcttccaccccacggacaaagagctcatgatgcactacctcatgaggaactacggctccttgccgggccccgtccccttcatctgacagtacaacatctaccatagcaaccgctgcaagctccctgcctacgcattgttctgccacaaggatcggtttttcttcaccccctgctacagatggtacaccaacggcgccccccccaaccgcgccaccggatccgcgaactggaaggccaccgcatgcgactaaggcatcctgtctgcgtccacgtccacgattactgctcgcgccagcatcgctaggcggctattggactccgctcgaacttctactcaggtacgacgcccacagcgacctttatggactggatctggccgtagccaccacctctagctatatcgcggaacactactg

SEQ ID NO: 3165 - DNA, 824 bp, Zea mays
  unsure (1)..(824): unsure at all n locations
  Clone ID: TF_LIB4739-110-Q1-K1-D7
atcctttctcggccttttggctaagatcaagtgtagtatctgttcttatcagtttaatatctgatatgtgaaccatgtgttcacttcgatattaaatttattttttgtgggggaggactcactacagtagcttgctgctggggtcctcatgtgtcgcttgggcgttgcactactgcccaagcctggcgcgccccaaaaaaatttcaatgcctctctagatctttcaagctatccttgctttctagctccctttggcgtgctgtaccggacgacaggggtaggtaggtaggtaggtgtagctagctcggcgagcgagggagcaatccggccaacagcacacgcgtcgatcgccatgccgagaagcggcggcggcggcaatggcggtggcattagtagtagtagtagggtgatgcccaacctcccggccgggttccgcttccaccccacggacgaggagctcatggtgcactacctcatgaggcaggccgcctccatgccgtgccccgtccccatcatcgccgaggtcaacatctaccagtgcaacccctgggatctccctgccaaggcattgttcggcgacaagggagtgggtttttcttcagcccccgggaccgcaagtaccccaacggcgcccgccccaaccgcgccgccgggtccgnggtactgggaggccaccggcaccgacnaggccnatcctgtcgtcgtccacgcccacgagccacggcggcgccaacattcgtcgtcgggcgtcaggaaggcgctcgtcttcctaacgcggcaggccgnccaaggggcacagnacggactggatcatgcacgagtac

SEQ ID NO: 3166 - DNA, 2881 bp, Zea mays
  Clone ID: TF_ZmC12473_1
gcgagtattcttccacaccacgtctcctccgtctgcgtctgcgtcccttcctccgcggacgccctcctaaaatccccaaaatccgatccgaccacgaaaccctaaccccatcccgcactctcccctcccctcccccaacacgcgcgcgctttcttagccgctaagcatatccctccccgccacgatctcgatggtggagatggctgtggtggagctcaggacgctgccgctcggcttccgcttccaccccaccgacgaggagctcgtcacccactaccttaagggcaagatcaccggcaggatcaactccgagtccgaggtcatccccgagatcgacgtctgcaagtgcgagccgtgggacctcccggataagtccctgatccggtccgacgatcccgagtggttcttcttcgcccccaaggaccgcaagtaccccaacggtagcaggtcgaacagggccaccgaggcgggatactggaaggctactggcaaggacaggataatcaagtccaagggcgacaagcgcaagcagcataccatcggtatgaagaagaccctcgtcttccaccgtggtcgtgcccccaagggcgagcgcacggggtggattatgcacgagtaccgcaccaccgagcctgagttcgagtccggcgagcagggtggttatgttctttatcgcctcttccgtaagcaagaggagaaaactgagcgctccagcccagaggaagtggatagaagtggctactcacctactccttctcgttcttcacctgacaacctagaggcgaatgaggaagctaatacaccattaaataaggaatctccagaatctgctctgcatgaaagcccgattgagctgccaaaatctgttgaaaccaatggtggttcaatgacaaggtggctggcggacagaaatgataacttgatggctactgcaccagatgtttcccatatacctttccacggacatgctgctggtgtagctaaggttgatccttctgttggtgcttcaggccacttagttaatccccacaatggaaatgatgattataacaaatttgtgtctgatttcactcccattctaccacttgaaaatgcattcttcactgatatacaacaaggagcttttggttttgatggcatcatgaatcctcttgatccccttgatgctttcttgaatcaaacacttgttgatcctgatgaacattcatcaacaacatcaaaagttcagtatgattctgacattccaacagaatttgagaaccattggaatatgaaggttgagcctcaagatgatcaatgctggtgggcaaacataggttttgagccagacgaaccaaatcctctgcttccttgtgacaccactgaccaagacatactttctgttgactctggtgctgattccttcaatgagcttttcaatagcatggaagagactggaattactgttaggcctcaacagttggactccactgtgcaaccaaaccatgtgttcgctagccagggcaatgcaacacggaggctgcggctacaggttgagtgtagggagatcataactaaagatgagagtgaagatgaagtatcatgtgttctaactccagactgtttgaacgattctgttgaggagtccactgcagagaaggatgtggcttctgatggggatgaggctgagtcaacagggattgttattagaagccatcaccctgctccaagatcaagctcagagagttcattcactcaacagggaactgctatgcaaaggctgcggctacagtcaggccttaacaaaggccagcgtcctagtactgatgattcatcaagctgcattatagacgaaccaggaagtcagcacaaagcagaaaaagcagagattgaagaggatgcgagtacaaacctcgctggaagtgctgatgatctacctggtaatatccatgatgatgagcaaaagaacatccctgaacatggtgctgaaatgacttctccagaagccaaatctgttctgaggttgcggaagacttctgaggaaggcaacaaggatgtcaagcaggagagttgtctcgagccacacgtgagagcaccaatgcagaagggaggcttccaatcatacatcatctggctggttcttccggtggctctgctcctgcttctctgtgttgggacatatggatgggtatgaaatctatcctggtgcggtgcaaggcatgacattttgcgcacatgggttcctggcgtcaacctggtgtgcggtcttctgtacataacctgtggcatcctttcaacagccgtaccctgcagtaagacatcccggcattgccaaggcagctgaaaaataaataaaaaaacaagtggtagaaatgacaaggtggaaaagagcgaggtgtgttattgttggttttagtacatcgtagtcttcttttgctgttgttgtagatgtcttgctaatgttgtcgctgttgtgtagttgcaattcaagcccagggctgccagttttatttcctaatgtaatgtagcaagagcgagaccctgttagacgggtgcgctgaaattctgaacctctgtaatatctgatgttcttgtggatacctgtttcagaattttcggttcctgaacccagttactgatggcttgttgatcaaaaaaaaaaaacggaaaaaaaaaaagtccctgtcaccaatagcgggcttcttaattcctgttctgtatggcttagactccgaactatggatgctataagggcactcccttcttcctgtagccgctgtctgtctacgtttgctacagtttgtggatggtgtgctgctgatgggttgtgtggccttcctagttactgttgtgtactgcttagactccaatttatgggtaatgtgaacacacttccttcttc

SEQ ID NO: 3167 - DNA, 665 bp, Zea mays
  unsure (1)..(665): unsure at all n locations
  Clone ID: TF_ZmC5878_2
ttgggtacctcgaggccggccccttgccttctatccctttcttctatcccctccttccccccctctccctctctctctctatcttcctgcctgaggcagcgccatttccgcttccgatcgtggaggcttggtgtggaaggaggaaaggaggccagctgctggttttcggtgcggcggagatgtctgaggtgtcggtgataaaccaggcggaggtggaggatgcgggtgccgggcagctggacctgccgccggggttccgcttccaccccaccgacgaggagatcatctcgcactacctcgcccataaggccctcaaccaccgcttcgtctccggtgtcatcggcgaggtcgacctcaacaagtgcgagccatgggacctgccaggcagggccaagatgggggagaaggagtggtacttcttctgccacaaggatcgcaagtacccgacgggcacgcggaccaaccgcgccacggagaccggctactggaaggccaccggcaaggacaaggagatcttcaggggccgcggcgtcctcgtgggcatgaagaagacgctcgtcttctaccgcggncgcgcgccgcgcggggagaagaccggctgggtcatgcacgagttccgcctcgagggcaagcttcccgagcgggtcccgcgctccgccaggacg

SEQ ID NO: 3168 - DNA, 541 bp, Zea mays
  Clone ID: TF_LIB4720-015-R1-K1-G2
gctgagcacgttgtccctctgttggattcacttctgaacaagtcaaaggaaacagagaagtttcgacttctgcattatcccattcgtcttcattaaatggagccccatattgctctccgattcttggaccaaggcccctaagggcgacagaactgattgggtgatgtatgaatacagaatggaagatgaggatttggtttctgctgggttctcaaaggatgcttatgtactctgcaaaattttcaagaaaaggggccttggtccaagaatcggagagcatcatgggagctcctagaatgaagacggatggaatattgcagaagggcggacctcgaaattttatagtgagctgagaagatgagacctgcgggagacaggctccaaggcaagatgaccagtgtggctgaggggtaacctggtggcgaaaacgggatacgccaagctatggaataatctgttgcgattctagcagatgggaaatcaacccaagaaaagaggttggtcgggtggcattttgaagagatcagtcgggatacctgcg

SEQ ID NO: 3169 - DNA, 1009 bp, Zea mays
  Clone ID: TF_LIB3136-019-C9_FLI
ccgcgccacgacggcggggttctggaaggcgactgggcgagacaaggccatcttcctcggcaacgcctccaggaggatcggcttgaggaagaccctggtgttctacatcggcagggcgccacacggcaagaagactgactggatcatgcacgagtaccgcctggaccaagagaacgttgagattcaggaagatggttgggtggtgtgtagggttttcaagaagaagagctatcaccagagaggcctcaatccggctgaaatggccgccgcactggacgacgacgagctccagcctttccctgttcctatccccggcagctccctgcagccaacagagcacaagaccaaccctactcacctcatgcaatatgactatccttccttcgacccttccatgcagctcccacagctgatgagcgatgaccaggaacaggaacagcccgtgcggccaaccctcctccccggccatcccggcgttgctatggcctccatgagctcactcaacattgagtgctcgcagaacctgacgaagctcacatctaacggcagcgacgagatgctccacgtcggccacggcggtggggctggaggtggtgtagtcgtcgaccgcttcgctggcacgacgacagattggtcgatcctagacaagctcctcgcctcgcaccagaacctcgaccggctcttccacggcaaggtcgtcaccacggcatctgcctccccaatggcggtaccggtataccatcagcagctcatggaactcggtggctcgtcgtcgtccttgcagaggcttccactgcagtacctcggcggcgagacggccgatctcctcaggtaccaccccaagtaattggatcgacctcaagtttagctacctctcttgttgagcagtgaccagatcagggtttttggttgactactagatcgatcgactgcttaattaattcggtctactttgtatggagagtttagggctcctaaatgtatatatatggtgcaactgttttggggc

SEQ ID NO: 3170 - DNA, 647 bp, Zea mays
  Clone ID: TF_LIB4574-005-Q1-K1-F7
aaaaaaaaacaaaaaaaaaaaaaaaaaaaaaggaattttaaaaaaaaaaaaaaaaaaaaaaaaaaaaaaaaaaaaaaaaaaaaaaaaaaaaaaaaaaaaaaaaaaaaaaggggcctccttcttaattaaggaacacacacccccgcaaacggaaaacctccccaaaccgttttttttccctccttggttttttgtaaaatctttgggttcgccatggacgctccaagaaattgcacccttcctgggcgccccaagggaccaaaaaagctgagctttgttgttacagttgtttgcccctggcccaaactggcaggaggtaggtagttaataaaaaagcagttagggctaacctggggggcgaaggggaagttaaagttagtttgggcacccccaggggcgggctaactagttagcttgtaagctggggacaacctgggaaccagcagcagcagcacagtaccagtagtcggggaaaaaaggaatttttttggggacatgtcgggggaaaaagccccggtcctggtaaggcacgggggcggcggcttgaaggccctccggcagttcccgccggggttccggttccgccccacggacgaggagctcgtggtgcataacctccggggcagggccatgggggggccgttccc

SEQ ID NO: 3171 - DNA, 873 bp, Zea mays
  Clone ID: TF_ZmC198_11
tagtataggtctgtgaccaatgcccatatatatatagctacttgatcgaggacgacggtcgatctgagattctgagattgcattggtaaaagttgaggacgctggggtagtagggagaccagctctccatccatgggctccgcagctgcgtcaagaaggggtcctgcatccactcctgctgctgcttcgccacctccagctgcggcaggctcagcgtcgacggcctcatcagcaccgccggcagcggcgccgcctcgggctcggccacctcctcctcttgcttcatgctcatcatcacaggcggtggtagtggtggttgtggtgagatgccgccgacgggcatcgtcatcatgatctccactcctccctgcccaagctgggtttgttggtcctggtcggacgacgacatggagtcggcgggcgacccggcgttgtgggacgcggacggcgtggcgcgcgccagctcctccatggccactcgctgctccagctccttgagcgacacggccttccggtagaccttgcacagcacgatgtcctccttgggcgagttgttggtggtgcatgtggaggaggccgccgccgccgccgatgagtcgccggcgacggtattattgctgttgttgttgttattgcaggcgtcggggaggcggtactcgttcatgacccagtcggtcttggtgccacgaggcgcgcggccctcgtagtagacgagcgtcttcttgaggccgatgaggcgcttggggtcgtgggcgcagcgcacggcgcggtcggagcccgtagccttccagaagccgcgctccgtggtgcggctggggcgggcgccggacgactggtggtggtgctgcttggcaggcctcgaggtacccaatg

SEQ ID NO: 3172 - DNA, 765 bp, Zea mays
  unsure (1)..(765): unsure at all n locations
  Clone ID: TF_ZmC13898_2
cagtgcggccctcgaggccggcgggatcaaaatctctctcgctcgctcgctcgctctccaggctccagctagactgtcctgctcttcttcggtgctactcgctgtgcacagacagccagcttcagcagagtccggctcggctgtcggctgcgagtcctgcagtgcaacaatggacaggcctgcgcaggcgcccacgcagctgccgccggggttccggttccaccctaccgacgaggagctggtcgtgctgtacctccaccggaaggccctggctcgcccgctgccggccgccgtcatccccgtcgtccacgacgtcgccaggctcgatccgtgggacgtccctggggcgagcgaaggggagggctacttcttcagcctgcggcgagcgccggcgaccggccgcaggaggagggctgggagcgggtactggaaggccacggggaaggagaagccggtgttcctgcagtgcggcggcgagcagaggcagctgctcgtgggcgtcaagacggcgctcgccttccaccgccgtgagccgccgccgccgtcgtcgcggacaggctgggtcatgcatgagtaccggctcgccgtgccccgcggcgtggccgaccagaggaagaagaatgcgagacatggctacgttgctgaaccgggagaagtgggtcgtgtgccgggtcttcctgaaagacaggncgaaccgggacgccggcagcaaaactttgcgacacggcgcctccgctccgcggcggcggcggcagcagcagcccg

SEQ ID NO: 3173 - DNA, 1617 bp, Zea mays
  Clone ID: TF_ZmC13658_2
gccggccggttctgggtacccggcttccctcgtcaccggctccggctccggcaccggctcaatacaatcccatcaccaatcattcattccctttgcctactactgctaccttctcctccttccatcttcgatagacgacgaaataatggcggtattcgacgtctgaatcctcgtactcttatactgcatacatacagacagacccttcttcttccttagttccctatagctctagctaggcgaccgatcatgagcatctcggtgaacgggcagtcggtggtgccgccggggttccgtttccacccgacggaggaggagctgctgacctactacctgaagaagaaggtggcgtcggagcgcatcgacctggacgtcatccgcgacgtcgacctgaacaagctggagccatgggacatccaagagaagtgccgcatcggttcgggcccccagaacgactggtacttcttcagccacaaggacaagaagtacccgacggggacgcgcaccaaccgcgccaccgccgccgggttctggaaggccaccggccgcgacaaggccatctacgcctcgccgggcgcccgccgcatcggcatgcgcaagacgctcgtcttctacaagggccgcgccccgcacgggcagaagtccgactggatcatgcacgagtaccgcctcgaggcgcccgtcgacgccggcgccggcgccgcgcaccacctgctgctccccgccgccgaacatcctccctactacacctcgccgccgcaggcgccttcttctactactaccgcagaaaggaaattaaaggagggggccccggctgggctggggacggacgaggccaagcaggttgcttggacgatccgtggcgcggcgggagaccaagcggcgcaggagcaggaggggtgggtgatctgcagggtgttcaagaagaagaacctcgtgcaccacggccagagcagcggcgtgaagcagcaggcagaaggagacgaccacgcggcgtcccatacggcggcggcggcagcgcacatggacgagagcagcccgagccagtgctcgtcggtgaccgtcatcagcgaccacgtgcacgccaacgttaacgacaagcagcagcaggcgcaggcgtcgttgctgatgatgcacacgcaccactccgccagcagcgacgacgacgcgctggaccacatcctgcagcagtacatgggcggcggcaggcaggcgcccgcggcggacgccaagccggcgctgctggagctggaccatcgtctgcaccaccaccaccttgccgcagcgcctactaatactagggccgccgccggcttctacgggaagttcatgaagctcccgcccctcgagcacgccggcctgccgccaagcccaccaccaggagcgcgcgagtacggcgccgccgccgccgccggctgggacgacgacgacgacgcgctggaccgcctcgccgcctacgaccacctcaacggcctctccaacgacgcgtccaagaacatggccgcgttcttcgacgtcgagcctagcgccgccgccgccgccgtggacggcgacctgtggagcctcgcacggtccgtgtcggcgctgcacgcggacttgaccatgaacaacgtctag

SEQ ID NO: 3174 - DNA, 725 bp, Zea mays
  unsure (1)..(725): unsure at all n locations
  Clone ID: TF_LIB4759-043-Q1-K1-B4
ggtaccctcggagcggccagcagaaataaaggcacagccggagctagctagcaggcagaggagcaggacgtacggctgctgctgtgctacgtacgtactcatctgctagctagctactgcagatccaagagtaacaagagccagcagattagctatatatacgtagcatagcatagcagctatcatcatcagcaaggatccccaagcattaatttggtgtggtaaaacatacactacatacatatatatatatagagtacatggcgccaataaaagagatcatggctggtgaccatggcggcggcgaagggaaggaagtagtggtgcttgtgggagactacgactacgagctagaggaggaagacgaagacatgctccccgggttccggttccaccccaccgacgaggagctggtcaccttctacctccgccggaaggtggccgggaaacgccttaccatcgagatcatcaaggacttgaacatctacaagcacgacccatgggaccttccaaagtcgagctcgacgatctcgggagagacgaaggagtggtacttcttctgcctgcggggnaggaagtacaggaacagcatcaggcccaacagggtcaccggctccggcttctgggaggccacgggcttcgacaggcccatccattcggccgcgtccggccgcgccggcgaccccatcggcttcaaaaagtcgctcgtcttctacccgcggcag

SEQ ID NO: 3175 - DNA, 633 bp, Zea mays
  unsure (1)..(633): unsure at all n locations
  Clone ID: TF_LIB4743-075-R1-K1-G11
ggtaccctnccgagcctggccgggctgccaccagcaattcccttccattcctcacatcgtcttcctcctctggccttcccatcttcttcctctcgtcctcgatcgatcatcctgctaactagctagaggtctggcactagctgctaactagaaaaaaggaagaaagcaagcaagctaagaaggaattgaagatcgtatcatcaatgagcatctcggtgaacgggcagtcgtgcgtgccgccggggttccggttccaccccacggaggaggagctgctcaactactacctccgcaagaaggtggcctcccagcagatcgacctcgatgtcatccgcgacgtcgacctcaacaagctcgagccatgggacatccaagagagatgcaagatcgggtcgggtccccagaacgactggtacttcttcagccacaaggacaagaagtacccgacggggacgcgcaccaaccgcgctacggccgccggcttctggaaggccaccggccgcgacaaggccatctacagcgccgtcaggcgcatgggcatgcgcaagacgctcgtcttctaccggggccgngcgccgtacggacacaagtccgactggatcatgcacgagaattgactggacaaccctgact

SEQ ID NO: 3176 - DNA, 297 bp, Zea mays
  Clone ID: TF_LIB3088-025-Q1-K1-E9
ttcacgtaccaaccatatgaccctacacacatctagtgaactgaagaaagacacaagaggggatagcgaacattcctactgcctatggtatacctacatatatatatctgaacaagtcccaccggcgagcacacacactgccacccgttcacagcaggcgaacctatcaatatattccgattccatactactgataccgaactaggcttacactacctcaagaaaaaatctagctccactcctttttcggatgcaatcatagctgacgttgatatgtacaagtttgatccatgcaaa

SEQ ID NO: 3177 - DNA, 828 bp, Zea mays
  Clone ID: TF_ZmC198_7
ggccgcttttttttttttttttttcgaatcaaaataaacggtgttcaacgatcggcacattataagttagtatatcgttaatatgattggagtcatccacgagaagctgctgatccatggcgccctctctctagctcgctcccatggaagaacgaagaagataggtaaaggtcccgagtcccgagcagggagataaggtggagagatccttgggctgccgcggtgcgtgcccgcgcttggtagctcttgggccgtgcggcccagcgcgcggcgcacgggcatcagttgggccgacgactgtgagcgtgggccttcgctttacatataaagctgttggattgtgtggattttggttagaagttgaggacgctggcgtagtaggcagaccaccagctctccatccgtgggctccgcagctgcgtcaggaaggggtcctgctgctgctgattcttcgccgcctcctctctcttcatgctcatcgcagctgacggtgagagcgagacgccgcccacgggcaccatcacgatctccgacgacgacatggagtcggcgggggagccggtgctgtgggacgcggacggcgtggcggtggcgcgccaggctcggcagctcccaggggtcgtgccggtacaggtgcaccgtggggatgatgtcgaacttgagcttcctcccgcgcgccgcctgcttcaggtaaaactccagcagctcctcctccgtcgggtggaaccggaaccccggcagatccagctgatgctgctgctccgccgccatgatggatggatggatcgatgttgatggatatagatgagggtgcgtgtcgcccggccg

SEQ ID NO: 3178 - DNA, 812 bp, Zea mays
  Clone ID: TF_LIB4759-074-R1-K2-C8
cattgggtacctcgaggccggccgggcagcttccattaggccccgtcgtcatgcatgttagcagcaatcaagccctagaaacctcgagctcgtcatagaaaccaagaaagaaccatccaagccatggaggatgatgaggagaagccatcacaaaggatcaccaacaagcaggaggaagacgaagaggatgacttggtgttcccgggcttccggttccatccaaccgacctggagctcgtggggttctatctgaagaggaaagtagagaagaagggtttcagaattgacatcatcagggagatcgacatctacaagcatgacccctgggatcttccaaatgaagcacggcatgtggtgcaaggcgcaggaggagacaaggacgactggtacttcttctgcctgcgtggccgcaagtaccggaacagcatccggcccaaccgcgtcaccggctccggcttctggaaggccaccggcatcgacaagcccatacacgacggtggtgccggcgagcgcgtcgtcgggctcaagaagtccctcgtctactaccgcggcagcgccggcaggggcaccaagacggactggatgatgcacgagttccgactcccctccgcagagttggtcgagctccatgatgctgggatctggacgatctgccgcatcttcaagaagaacacgtcgtacacccggaggtgccagcagcagaagcaggaacacggcagcaagcgaagccaccaccagcagcaggaggagcaggagttgcagtactactacgactactaccgctaccaccacaccatcagcaccgttacttc

SEQ ID NO: 3179 - DNA, 2685 bp, Zea mays
  Clone ID: TF_ZmC545_1
ggtaccttcgggacccgcccgcattcggagcgcagaacccgcccacaggacaggacacacagagccgagccaccccacccaccatcggcgaccagcagccagccgcgggagcgagctgtttaaagacaccgagtcggagtcggacggaggactggcaggcacaaccgaagccaccgcttctagttctcgggttcatcgccagcaatccagaccacataatgggacagccggtgacgaggaggagggagagggacgcggaggcggagctggacctgccgccggggttccggttccaccccacagacgacgagctggtggagcactacctgtgccgcaaggcggcggggcagcgcctccccgtgcccatcatcgccgaggtggacctgtacaggttcgacccgtgggacctgccggagcgcgcgctcttcggggcccgggagtggtacttcttcacgcccagggaccgcaagtaccccaacggctcccgccccaaccgcgccgccggcgacgggtactggaaggccaccggcgccgacaagcccgtcgcgccgcgcgccgccgccgccgacgcccgcacgctcgggatcaagaaggcgctcgtcttctacgccggcaaggcgccgcgcggggtcaagacagactggatcatgcacgagtacaggctcgctgacgccggccgccgcgccaaaaaggggtggctcaggttggatgactgggtgctgtgccggactgtacaacaagaagaacgagtgggagaagatgcggctggggaagggggcagccgccggcgcaggtcaaagaggaggaggccatggacatgagcacctcccactcgcagatcacccactacgtggggcgagacgcgcacgcccggagtcggagatcgtggacaacgacctgccgttcccggatccggcgatgatggtgcccaagaaggagcgggtggacaacggcggcaacgccaggaccagccaccgcttcgtggatctcagctccgacgccatccagggcatgcagaccggcctcgacctgctggcgccggccggctaggacttgttctgctcgctcctccggagaccaagggacagagggaaccgctaaactgggcatgcggcggtgggccctcacggaatgaactcaggctaagatggagacttgtacatcaagctagatgtcgggcggtattgcagaagctgcagattgagtaattgaagagccgttgtagttgtgttgtcctgggtgcggttttatatgtgggatgtgacgtctttctttcgtgtcataggagcctaacctgcgcccgaccctggtcttggttcagaggtgtctccgactgtaggtaaaaatcacacgcaggcgggcggcgcggccgggcagctcttttcaattccctccatttccctcacctcccgcagcagctagccgccgccagccaacaaccgaaccaaccaaccaacccacagcgagcgaggaaagcgtccaatggtagcgatggcggccgtgcagcagcagcgccgcgacgcggaggcggagctcaacctgcccccgggcttccggttccacccgacggacgaggagctggtggcgcactacctctgcgcgcgcgccgcggggcgccgcccgccggtgtccatcatcgccgaggtcgacctgtaccgcttcgacccgtgggacctgccggagcgcgccctcttcgggcgccgcgagtggtacttcttcacgccgcgggaccgcaagtaccccaacggctcccgccccaaccgcgccgccgggtcgggctactggaaggccacgggcgcggacaagcccgtggagcacgggggccggacggcggggatcaagaaggcgctcgtgttctaccacggcaagccgccgcgcggggtcaagacggagtggatcatgcacgagtaccgcctcgccgaagccggcggcgcccgcgccaagaagtccggcgccggcacgctcaggctggatgactgggtgctgtgccgcctgtacaacaagaagaacgagtgggagaagatgcagcagcagaaggagaaggagaaggagaagaaggcgatggagtcggaggcgtcgctctcgcactcccactccgacacgcggacgccggagtcggagatcgacgacgacacgttcccggagctgggctccctgccggcgttcgacgacatgggcccagccccagcagcagcagccactgccggcgtcgtcctgcccaaggaggaggtggaggacttcggcgacctcggcggcgacgactggctcgcgggcatcaacctcgacgacctgcagatgccgggggacgccgccgatttctacggctccatgctcgtctcgccgatggccgccaagatggagccggacggcggcttccccttcttctgagatccttcggcgactccggggacgaccggatgcagcgcaacgcaaactgtgtatagttcagattttcttcatggaaccaacaacaacaacaaaaaaagttctgctaatatcttgttctagtggtgtagtgcagaagtagcagcaggcatgattgaagttccattgtagtactgatgttcatcgccacttgatctgtgacaagtgacggcattctttcgtttcttggctgcaaattcttcgttgttcagaatataatttcagatgggtaatgccaattcgggcccgtctttagcggtt

SEQ ID NO: 3180 - DNA, 1389 bp, Zea mays
  Clone ID: TF_ZmC545_10
ctgtgcggcgctcgagccggccgttccgaaagaccacaccactccactccctccatttccctcacctcccgcagcagctagccgccagccaacaaccgaaccaaccaaccaacccacagcgagcgagtaaagcgtccaatggtagcgatggcggccgtgcagcagaagcagcagcagcagcgccgcgacgcggaggcggagctcaacctgcccccgggcttccggttccacccgacggacgaggagctggtggcgcactacctctgcgcgcgcgccgcggggcgccgcccgccggtgtccatcatcgccgaggtcgacctgtaccgcttcgacccctgggacctgccggagcgcgccctctttgggcgccgcgagtggtacttcttcacgccgcgggaccgcaagtaccccaacggctcccgccccaaccgcgccgctgggtcgggctactggaaggccacgggcgcggacaagcccgtggagcacgggggccggacggcggggatcaagaaggcgctcgtgttctaccacggcaagccgccgcgcggggtcaagacggagtggatcatgcacgagtaccgcctcgccgaagccggcggcgcccgcgccaagaagtccggcgccggcacgctcaggctggatgactgggtgctgtgccgcctgtacaacaagaagaacgagtgggagaagatgcagcagcagaaggagaaggagaaggagaagaaggcgatggagtcggaggcgtcgctctcgcactcccactccgacacgcggacgccggagtcggagatcgacgacgacccgttcccggagctgggctctctgccggcgttcgacgacatgggcgcagccccagcccctgccggcgtcgtcctgcccaaggaggaggtggaggacttcggcgacctcggcggcgacgactggctcgcgggcatcaacctcgacgacctgcagatgccgggggatgccgccgatttctacggctccatgctcgtctcgccgatggccgccaagatggagccggacggcggcttccccttcttctgagatccttcggcgactccggggaccggatgcagcgcaacgcaaactgtgtatagttcagattttcttcatggaaccaacaacaacaaaaaaaaagttcttgctaatatcttgttctagtggtgtagtgcagaagtagcagcaggcatgattgaagttccattgtagtactgatgttcatcgccacttgatctgtgacaagtgacggcattctttcgtttcttggctgcaaattcttcgttgtccagaatataatttcagatgggtaatgccaattcgggccgtgttaaaaagaaaaaacacatacattctagataaacaaacacgaacaatgagcagacacaa

SEQ ID NO: 3181 - DNA, 1385 bp, Zea mays
  Clone ID: TF_ZmC545_3
aagacaacaccactccactccctccatttccctcacctcccgcagcagctagccgccagccaacaaccgaaccaaccaaccaacccacaggccacagcgagcgagtaaagcgtccaatggtagcgatggcggccgtgcagcagcagcagcagcagcagcgccgcgacgcggaggcggagctcaacctgcccccgggcttccggttccacccgacggacgaggagctggtggcgcactacctctgcgcgcgcgccgcggggcgccgcccgccggtgtccatcatcgccgaggtcgacctgtaccgcttcgacccctgggacctgccggagcgcgccctcttcggccgccgcgagtggtacttcttcacgccgcgggaccgcaagtaccccaacggctcccgccccaaccgcgccgccgggtcgggctactggaaggccacgggcgcggacaagcccgtggagcacgggggccggacggcggggatcaagaaggcgctcgtgttctaccacggcaagccgccgcgcggggtcaagacggagtggatcatgcacgagtaccgcctcgccggcgacgcgaagaagtccggcgccggcacgctcaggctggatgactgggtgctgtgccgcctgtacaacaagaagaacgagtgggagaagatgcagcagcagaaggagaaggagaagaaggcgatggagtcggaggcgtcgctctcgctctcgcactcccactccgacacgcggacgccggagtcggagatcgacgacgacccgttcccggagctgggctctctgccggcgttcgacgacatgggcccaggcgcagccccagcccctgccggcgtcgtcctgcccaaggaggaggtggaggacttcggcgacctcggcggcgacgactggctcgcgggcatcaacctcgacgacctgcagatgccgggggacgccgccgatttctacggctccatgctcgtctcgccgatggccgccaagatggagccggacggcggcttccccttcttctgagatccttcggcgactccggggaccggatgcagcgcaacgcaaactgtgtatagttcagattttcttcatggaaccaacaacaacaaaaaaaagttctgctaatatcttgttctagtggtgtagtggtgtagtgcagaagtagcagcaggcatgattgaagttccattgtagtgctgatgttcatcgccacttgatctgtgacaagtgacggcattctttcgtttcttggctgcaaattcttcgttgttcagaatataatttcagatgggtaatgccaattcgggccgtctttagcggtttatgtttggagccttaaaaaaaaaaaaaaaaaaaaaaaaaaaaaaaaaaaaaaaacccccccccccc

SEQ ID NO: 3182 - DNA, 1192 bp, Zea mays
  Clone ID: TF_ZmC530453_1
ccggcgtcgtagtactacgcggtgatgaggtccatggagagcacggactcgtcgtccggtgagctaccgccgcagaagcagccgagctcggcgccggatctcccgccgggcttccggttccatcccacggacgaggagctggtcgtccactacctcaagaagaaggccgcgtccgtgccactccccgtcgccatcatcgcggaggtcgacctttacaagttcgatccgtgggagctacctgataaggcgacattcggcgagcaggagtggtacttcttcagcccgagggaccgcaagtaccccaacggagcgcggccgaacagggcggcgacgtccggctactggaaggcgactggcacagacaagcccatcatggcgtccggcggcaaccgcgagaaggtcggcgtcaagaaggctctcgtgttctaccgcgggaagccgccaaagggcctcaagaccaactggatcatgcacgagtaccgcctcgcggatgcggcgagctcaaccaccagccggccgccgccgccttgcaacgccggaggcaaggccacgtctctcaggctcgacgactgggtgttatgccgcatctacaagaagatcgacaaacttggagtcggcgatccgccgcggatcatggagtgcggcgaggactccgtggagaatgcggtggcagcctacccgacgcatgccgcggctgctgccatggccgtcgcagtcgcaggcggaggaggggcttaccataccggcaattacacttcgctgatccaccaccatcacgaggacagcttcctggtggatgggctgctcacagcagaggacgcgggcggcagctccctgagccagctagccgcggcagccagggcagctgctccaacagacaccaccaagcagctcctcgtcccgtcctccaccaccccgttcaactggctcgacgcgtcggcactcacgattcttccgccggcaaagaggttccatgggtacaacagagacaccactgacggcggcggcacgtccctcccgtcgccgtccgagaggaataacctgcaggcggctgtcggcgccgtcgatagtggcgccagcggtggcactagtgccgtcattccatcattcctcaatccgctcggcgtgcaaggtgcgacaacctatcaccaccacgccattttcggcacaccggtgacgccggaagccgcca

SEQ ID NO: 3183 - DNA, 1525 bp, Zea mays
  unsure (1)..(1525): unsure at all n locations
  Clone ID: TF_ZmC545_4
cctcgaggccggccgggacgggggccacaccgcgcgcgcaatacacgggacacacgcagatccgagctaaccaccgcagatccgagattatccagccggagcgaccttttcttttttcttttacacagcgggacagagaaaggagtcaggcagccaaagccacccaccgcttttaccgatcggcgttgccgccaccgctagcattgtcggcttcagctccatccaaatccaccgccagcaagcaagccggcgccatgggtctgccgatgaggagggagagggacgcggaggcggagctgaacctgccgccggggttccggttccaccccaccgacgacgagctggtggagcactacctgtgccgcaaggcggcggggcagcgcctccccgtgcccatcatcgccgaggtggacctgtacaggttcgacccctgggacctgccggagcgcgcgctcttcggggcccgcgagtggtacttcttcacgcccagggaccgcaagtaccccaacggctcccgccccaaccgcgccgccggcaacgggtactggaaggccaccggcgccgacaagcccgtcgcgccgcgcggccgcacgctcgggatcaagaaggcgctcgtcttctacgccggcaaggcgccgcgcggggtcaagacggactggatcatgcacgagtacaggctcgccgacgccggccgcgccgccgccgccaagaaggggtcgcttaggttggatgactgggtgctgtgccggctgtacaacaagaagaacgagtgggagaagatgcagctggggaagaccgccgtcgccggcgtcggcgccaccaaggaggaggcgatggacatggccacctcgcacacgcactcccactcccaatcacactcgcactcgtggggcgagacgcgcacgccagagtcggagatcgtggacaacgacccgttcccggagctggactcgttcccggcgttccaggacccggcgatgatgatgacggtgcccaaggaggagcaggtggacggctgcagcgccaagagcggcaacctgttcgtggacctcagctacgacgacatccagggcatgtacagcggcctcgacatgctgccgccgcccggggaggacttctactcctcgctcttcgcgtctcccagggtcaaggggaaccagcccgccggagccgccgggttgggacagttctgagctgaggcgaggatggagccatggatcaggagatgaagacggttgcgaactctgtaaatacagcataggagtcgaacctgaccctgacccttgttggggttacaaggttttccgagtgtcggtgtagcgtacatggagccggcggcgcggccgggccggctcattctttagtttcacttccaaagcagacgggtagatatatgtgtagctgttcacttaaactctcttcgacagaacaaccgacgaaattttgctcttgtttataagaactaccttgactgtcgcttccaaaaacaccaaaaaaaaaaaaacggacgctggaaaagnctggg

SEQ ID NO: 3184 - DNA, 1386 bp, Zea mays
  Clone ID: TF_ZmC545_6
aatgacagcgcagaacccgcccacaggacaggacacacagagccgagccaccccacccaccatcggcgaccagcagccagccgcgggagcgagctgtttaaagacaccgagtcggagtcggacggaggactggcaggcacaaccgaagccaccgcttctagttctcgggttcatcgccagcaatccagaccacataatgggactgccggtgacgaggaggagggagagggacgcggaggcggagctggacctgccgccggggttccggttccaccccaccgacgacgagctggtggagcactacctgtgccgcaaggcggcggggcagcgcctccccgtgcccatcatcgccgaggtggacctgtacaggttcgacccctgggacctgccggagcgcgcgctcttcggggcccgggagtggtacttcttcacgcccagggaccgcaagtaccccaacggctcccgccccaaccgcgccgccggcgacggatactggaaggccaccggcgccgacaagcccgtcgcgccgcgcggcgcccgcacgctcgggatcaagaaggcgctcgtcttctacgccggcaaggcgccgcgcggggtcaagacggactggatcatgcacgagtacaggctcgctgacgccggccgccgcgccaagaaagggtcgctcaggttggatgactgggtgctgtgccggctgtacaacaagaagaacgagtgggagaagatgcggctggggaaggagggcgccgccaaagaggaggccatggacatgagcacctcccactcgtggggcgagacgcgcacgccggagtcggagatcgtggacaacgacccgccgttcccggatccgccggcgccggcgatgatggtgcccaagaaggagcgggtggacgccggcggcagcgccaggagcagcgacctgttcgtggatctcagctacgacgacatccagggcatgtacagcggcctcgacatgctgccgccgcccggcgaggacttctactcctcgctcttcgcgtcgcccagggtcagggggaaccagcccaccggagccgcggggttgggccccttctgagtgagctcaggcgaggatggaggcatggagatgaggagagaagacggacggcgttgcgaactctgtaaatacagcataggactaggagtcgaacctggtcggggttacaagtcgagtgtgtcggtgtttcgtacatgggagccggcccggtctttggcttggcgctggctcattctttagtttcacttcctgcgcagacggtaggtagatgtgtatgcgtagctgtgcactatcacttcctcttcaacagaaccgattcactccgaatggcaatgtttgaagtgaaatcagcgaacggaaaaggttggttc

SEQ ID NO: 3185 - DNA, 1589 bp, Zea mays
  Clone ID: TF_ZmC13658_1
cccacgcgtccgcccacgcgtccgcccacgcgtccgcccacgcgtccgcccacgcgtccgcccacgcgtccgcccacgcgtccgcggacgcgtgggatcgtcttcctcccctcacatcctctggcctctggtcctccaccgtcctgctagccagagctgctcttgtacgcgcagctggcctctgtgcatatcaccagcacaccgcgcaggggaaggaaattaacaagagaaaaggcaaggagagcaggcaggcaaggaagctgcagaagccaaggaaggagaaggaggatcatcaatgagcatctcggtgaacgggcagtcgtgcgtgccgccggggttccgcttccaccccacggaggaggagctgctcaactactacctccgcaagaaggtggcctcccaggagatcgacctcgacgtcatccgcgacgtcgacctcaacaagctcgagccatgggacatccaagagaaatgcaagatcgggtcgggtccccagaacgactggtacttcttcagccacaaggacaagaagtacccgacggggacgcgcaccaaccgcgccacggccgccgggttctggaaggccaccggccgcgacaaggccatctacaacgccgtcaagcgcatcggcatgcgcaagacgctcgtcttctacaagggccgcgcgccgcacggccagaagtccgactggatcatgcacgagtaccgcctcgacgaccccgctgctgctgctgctgctggatccggtgatgccgtggccaacgacgacgcagccgccacggctgctgctgctgccgccgcgtcgtcggacggcgggcaggaggacggctgggtggtgtgcagggtgttcaagaagaagcaccaccacaaggagtcaggtgggggcgggggcaacaagcacggcagcagtaacagcgagcatgggcacggcggcgccggcaaggcatcggctgcggctgcggctgcggcgcaccagcaccagcaccatggaggcctgcagtactcctccagcgacgaggcgctggaccagatcctgcagtacatgggcaggtcgtgcaagcaggagcacgagctggtgtcgccggcgccggcgccgccgggacgggcggcggcgtccaggtacctccggcccatcgagaccgttctgggcgggcacgcgttcatgaagcttcccgcgctcgagagcccgtcccagcgccaagcccaccaccaggagcgcgcgagtacgccgccgccggctgggacgacgacgacgcgctggaccgcctcgccgcctacgaccacctcaacggcctctccaacgacgacgcgtccaagaacatggccgcgttcttcgacgtcgagcccagcgccgccgccgccgccgtggacggcgacctgtggagcctcgcacggtccgtgtcggcgctgcacgcggacttgaccatgaacaacgtctagctcccgagtcccgaccaacaacaacagggccccgaatccccgatacacatccatggcgtgtgcacgcatgcatgcatgcattgcatgccgcgcgcaccactaaccactcgaccagcatgcatgcatacgtgcgcaccccaccggcgccc

SEQ ID NO: 3186 - DNA, 2141 bp, Zea mays
  unsure (1)..(2141): unsure at all n locations
  Clone ID: TF_ZmC27_10
ccgggaagctctcctcccctcttcctaccattagcagcagcactgcagcagtagccacagccagcaccagcagacagcagggaggaacacgatgagcggcgccggtccggatctgcagctgccaccggggttccggttccacccgacggacgaggagctggtgatgcactacctctgccgccgctgcgccggcctgcccatcgccgtccccatcatcgccgagatcgacctctacaagttcgacccatggcagctccccaggatggcgctgtacggcgagaaggagtggtacttcttctccccgcgggaccgcaagtacccgaacgggtccaggcccaaccgcgccgccggggctgggtactggaaggccaccggcgctgacaagcccgtgggcacgcccaagccgctggccatcaagaaggcgctcgtcttctacgccggcaaggcgcccaagggcgagaagaccaactggatcatgcacgagtaccgcctcgccgacgtcgaccgctcggcgcgcaagaagaacagcctcagggtaagaacaagcgcgctccgccgccgtccgtccgtccgtccgttggcgtcgtcaccgtccaaatcaaacaaaaagaactcggcgataatgtgtcgctttcgtaatgaacgcggggataagcgtggcccatggttttgggccgctgaattttttttacgtgggccatgctaggtggggtgcgtggggggctgcaccgtgcccaatgattcgaccgcgtcgcagtcctcggcgcgcaagtattcgatgcccatgggtcatggtgtacagatcattttcgcccgtcgcgcccctgcgactgcgacggcgacggagagccagtggggtctgggattagacatcgaaatgacgctttgtgattcttaagctcatccatttcttgtcagctgcacggatgacaaactaagttctctattgtgttgacgggtgcagttggatgactgggtcctgtgccgcatctacaacaagaagggcggcgggctggagaaggcgccggcggccggcggcgaccacaagcctgtgttcgccacggcggcggtgagctccccgccggagcagaagccgttcgtggcggcggcgggcgggctgcccccggcgttcccggagctggcggcgtactacgaccggccgtcggactcgatgccgcggctgcacgcggactactccagctgctcggagcaggtgctgtccccggagcagctggcgtgcgaccgggaggtgcagagccagcccaagatcagcgagtgggagcggaccttcgcctccgaccccgtgaaccccgcgggctccatgctcgaccccgtcgtcggccacgccggcggcgacccgctgctgcaggacatcctcatgtactggggcaagccgttctagacgacgccgcccatcatgtcctgagggcgaggggaggtgggggtggcgaagcatgcatgcaaacacccatcctcggctgcggttggttggttggttgatctgtcttgggcagcgcaatgcaatgcaaccgcgcggtgtgggctttgactcaggcgagccgccattgttgacttgcaaggaggatataatatgaaaatatagctggattacatggagaggcggcaatgagacccnctcccccccnccggaagggagacggagacggatggtgcagtgcatcgggtgtggtggntcgngcgcggcatgtgtgtgtggctgtacatatacatactgtacatgattggttcagtgcagggtttctgttccttcattgattagttattatactaataagtactagtaattttgtaagggcttgtagttgcagtctccgtactggtggtaggtagtgcaggccatattcgtcatcgccaagcttcgagtgtacttactcctacaatatatattttacagtatatattgtagctgtgttggctcttcggaagaaaaaaaatggaaggggaaaataacataatccctattttccccaaaaacactgggcttgatttggacgttaatgtgtgcattgtaactggtgtgccctatctgctgacagtgttgcacatcacatgtttggtgttaataaggacagactatgtatcatctgccagattgttgtacatatacattgtggtgatat

SEQ ID NO: 3187 - DNA, 1554 bp, Zea mays
  Clone ID: TF_ZmC27_18
ccggccgggaagctctcctcccctcttcctaccattagcagcagcactgcagcagtagccacagccagcaccagcagacagcagggaggaacacgatgagcggcgccggtccggatctgcagctgccaccggggttccggttccacccgacggacgaggagctggtgatgcactacctctgccgccgctgcgccggcctgcccatcgccgtccccatcatcgccgagatcgacctctacaagttcgacccatggcagctccccaggatggcgctgtacggcgagaaggagtggtacttcttctccccgcgggaccgcaagtacccgaacgggtccaggcccaaccgcgccgccggggctgggtactggaaggccaccggcgctgacaagcccgtgggcacgcccaagccgctggccatcaagaaggcgctcgtcttctacgccggcaaggcgcccaagggcgagaagaccaactggatcatgcacgagtaccgcctcgccgacgtcgaccgctcggcgcgcaagaagaacagcctcaggttggatgactgggtcctgtgccgcatctacaacaagaagggcggcgggctggagaaggcgccggcggctggcggcgaccacaagcctgtgttcgccacggcggcggtgagctccccgccggagcagaagccgttcgtggcggcggcgggcgggctgcccccggcgttcccggagctggcggcgtactacgaccggccgtcggactcgatgccgcggctgcacgcggactactccagctgctcggagcaggtgctgtccccggagcagctggcgtgcgaccgggaggtgcagagccagcccaagatcagcgagtgggagcggaccttcgcctccgaccccgtgaaccccgcgggctccatgctcgaccccgtcgtcggccacgccggcggcgacccgctgctgcaggacatcctcatgtactggggcaagccgttctagacgacgccgcccatcatgtcctgagggcgaggggaggtgggggtggcgaagcatgcatgcaaacacccatcctcggctgcggttggttggttgattgatctgtcttgggcagcgcaatgcaatgcaaccgcacggtgtgggctttgactcaggcgagccgccattgttgacttgcaaggaggatataatatgaaactatagctggattacatggagaggcggcaatgagaccgtctggccccgccggaagggagacggagacggagacggagacggatggcgcagtgcatcgggtgtggtggatcgtgcgcggcatgtgtgtgtgtggctgtacatatacatactgtacatgattggttcagtgcagggtttctgttccttcattgattagttattatactaataagtactagtaattttgtaagggcttgtagttgcagtctccgtactggtggtaggtagtgcaggccatattcgtcaccgccaagcttcgagtgtacttactcctacaatatatattttacagtatatattgtagctgttggctcttcggaaaaaaatggaagttattttgatt

SEQ ID NO: 3188 - DNA, 828 bp, Zea mays
  Clone ID: TF_ZmC27_2
ccctcgaggtcggccggtattccaaagctctcgagacttcctcagcaatctatcagctttccagcgatcggcaggtcctcgatcgtttcgaagctccaatccgcccggccgcctgttgccactagctaggtgatcgatcgaatggactgcggtggcgcgctgcagctcccgcctgggttccgcttccaccccaccgacgacgagctggtgatgtactacctcctccgcaagtgcggcggcctgccgctcgccgcgccggtcatcgccgaggtggatctctacaagttcgacccatggcagctcccagagaaggcgttcggtggggagaaggagtggtacttcttctcgccgcgcgaccgcaagtacccgaatggctccaggcctaaccgggcggccgggacagggtactggaaggccaccggcgccgacaagccggtagggtcgccgcgccccgtggccatcaagaaggcgctcgtcttctacgccgggaagccgcccaagggcgtcaagaccaactggatcatgcacgagtaccgcctcgcggacgtcgaccgctcggccgccgcacgcaagaagaccaacaacgcgctcaggctggatgactgggtgctgtgccggatctacaataagaagggcgttatcgagcggtacgacacagtgaacgacgacgacggcgacggcgccgtggccgaagacgtcaagccggtgccggcgccggcggcgtcgaagaacccgcgtgccagtgcccgcgtaggggcagcagcggcggcgccgaatgaagtggagctccccgagtacggcggcggctactacgactacgacgacctg

SEQ ID NO: 3189 - DNA, 1544 bp, Zea mays
  Clone ID: TF_ZmC27_21
aagctctcctcccctcttcctaccattagcagcagcagtagccacagccagtaccagcagacagcagggaggaacacgatgagcggcgccggtccggatctgcagctgccaccggggttccggttccacccgacggacgaggagctggtgatgcactacctctgccgccgctgcgccggcctgcccatcgccgtccccatcatcgccgagatcgacctctacaagttcgacccatggcagctcccaaggatggcgctgtacggcgagaaggagtggtacttcttctccccgcgggaccgcaagtacccgaacgggtctaggcccaaccgcgccgctggggccggctactggaaggccaccggcgctgacaagcctgtgggcacgcccaagccgctggccatcaagaaggcgctcgtcttctacgccggcaaggcgcccaagggcgagaagaccaattggatcatgcacgagtaccgcctcgccgacgtcgaccgctcggcgcgcaagaagaacagcctcaggttggatgactgggtcctgtgccgcatctacaacaagaagggcggcgggctggagaaggcggcggcgccggcggccggcggcgaccacaagcctgtgttcgccacggcggcggtgagctccccgccggagcagaagccgttcgtggcggcggcgggcgggctgcccccggcgttcccggagctggcggcgtactacgaccggccgtcggactcgatgccgcggctgcacgcggactactccagctgctcggagcaggtgctgtccccggagcagctggcgtgcgaccgggaggtgcagagccagcccaagatcagcgagtgggagcggaccttcgcctccgaccccgtgaaccccgcgggctccatgctcgaccccgtcgtcggccacgccggcggcgacccgctgctgcaggacatcctcatgtactggggcaagccgttctagacgacaccgcccatcatgtcctgaggggaggtgggggtggcgaagcatcctcggctgcggttggttggttgattgatctgtcttgggcagcgcaatgcaatgcaaccgcacggtgtgggcttgagtcaggcgagccgccattgttgacttgcaaggaggatataatatgaaactatagctggattacatggagaggcggcaatgagaccgtctggccccgccgcggaagtgagacggagacggagacggatggcgcagtgcatcgggtgtggtggatcgtgcgcggcatgtgtgtgtgtggctgtacatatacatactgtacatgattggttcagtgcagggtttctgttccttcattgattagttattatactaataagtactagtaattttgtaagggcttgtagttgcagtctccgtactggtggtaggtagtgcaggccatattcgtcatcgccaagcttcgagtgtacttactcctacaatatatattttacagtatatattgtagctgtgttggctcttcggaagaaaaaaaatggaaggggaaaatagggattatgttattttgattattc

SEQ ID NO: 3190 - DNA, 687 bp, Zea mays
  Clone ID: TF_LIB4759-095-Q1-K1-D5
ccggccggggctactcaatactcatgcatgcgcactgcctcccggtgcggcgtatgaaccagacatgaacagggagcacagcagcagcagctccaagctcatcaacgagaagctcgaggaacaccggatctccaccgcgaagcactgcccccactgcggcgagaaaatcgacagcaaaccagattgggtggggttgccggcaggcgtcaagttcgatccaactgaccaggagctgatcgagcacctcgaggcgaaagtgaaggacgaaggctcgagatctcaccctctcatcgacgagttcatacccacaatagatggggaggacggcatatgctacacccaccccgagaaacttccaggtgtgacgagggatggcctaagcaagcacttcttccaccggccgtccaaggcctacacgacgggcacgaggaagaggaggaagatacagacggagtgcgacgtccacaagggggagacgaggtggcacaagaccggcaagacgcggccggtgatggtgagcggccggcagaaggggtgcaagaagatactggtgctgtacaccaacttcggcaagcaccgcaagccggagaagacgaactgggtgatgcaccagtaccatctcggtgacctagaggaggagaaagagggggaagctggtgggtgtgcaagatcttctaccagacgcag

SEQ ID NO: 3191 - DNA, 1531 bp, Zea mays
  Clone ID: TF_ZmC21043_1
atcgaattctcatcttgtagaaaagaaagagtgagagtgagattggcaagggtatagggttcttggtcgatcaaatatctttcccctcttggattctcctcttcctgcttcgttctcgccagatcgatctcactacgtgcctgcgtagctagccactctgtatgcaccatcaccaccaggaccaggccatgggcgacgcgctgtgggacctgctcggggaggagatggcagcggcgggcggggagcacgggctgcccccggggtttcggttccaccccaccgacgaggagctggtcaccttctacctcgccgccaaggtgttcaacggcgcctgctgtggcatcgacatcgccgaggtggacctcaaccggtgcgagccgtgggagctccccgacgcggcgcgtatgggggagcgcgagtggtacttcttcagcctccgcgaccgcaagtaccccacgggcctccgtaccaaccgcgccaccggcgccggatactggaaggccaccgggaaggaccgcgaggtgctcaacgccgccaccggcgcgctcctcggcatgaagaagacgctcgtcttctacaagggccgggcgccgcgcggcgagaagaccaagtgggtcctgcacgagtatcgcctcgacggcgacttcgccgccgctcgccgcccctgcaaggaggaatgggtcatctgcaggatactgcacaaggcaggcgaccagtatagcaagctgatgatggtgaagagcccctactacctgcccatggcgatggacccttccagcttctgcttccaggaggacccaaccgggcatcccctcccgaaccctagtggctgcacccccttccaccacggccacccccaccatagcatgcagccgccgcctccattgccgccgagcaaccatgctggcaaggccgtcttcaccggagcagcagcagcctgctgcatgcaacaagagccggcagacggcagcaacagcgccgtgctgcccatgccgccgttccctcccttcaccaccatcgtcgccggcaagccggcggtcccggcgccgccgccccaggttgtcaacgccggtccacaggagccaccgccacctacctggctggaggcctacctgcagcacactggtgggatcctttatgagatgggtgtgggtccaactgcagcgcccaggggcgcgtgatccggaccgtcggttccttagggttacccccctacgtacgtactgaaacactgatgatccatcgatttacctggtctgtaatgtgcggtgaagcttagtatttccaagtgacatatttcgacaagcacttgtagttattaaaaaagagttatcttgtattcggtggcatcattagtcgtcgttgttatgaaatcatgtgtgcttataacatgcatgaatgcatgcatttggatcatcgatcagagctgtcctctcctgggacgtgctacgtactgtgctcatgcatccatccacatgcaagtggtgcctgctaaaatgtacatccaatgtctatttgtttagcatgcatg

SEQ ID NO: 3192 - DNA, 1495 bp, Zea mays
  Clone ID: TF_ZmC328_1
cccgccccccatcgcctcgcgccccatccgcgcccccgggcgccgctgttgcccacgcgtccgcaggcctgccagccagccgcctttcgaaaccgagcaccagggagcagacgcggtctctggaacccaggttccagcgagcaaaccatctaaccaggcgctgagaattctgtgcggaggaggcggatggcaatggtggcggcggcggaggggagcgggcgcagggacgccgaggcggagctcaacctgccgccagggttccggttccacccaacggatgaggagctcgtggtgtactatctctgcaggaaggtagcgcggcagcaggtgcccgtgcccatcatcgcggaagtggatctttacaagttcgatccgtgggatctgcccgagaaggcgttgtttggtcgcaaggagtggtacttctttacgccgcgggaccgcaagtacccaaacggctcgcgccccaaccgcactgccggaaaggggtactggaaggcgactggggccgacaagtcgatcgtgcccatgggcagcaccagggcggcggggatcaagaaggcgctggtgttctactctggcaaggcgcccaggggcgtcaagacggactggattatgcatgagtaccgcgtcgctcaagcggaccacaccctggggaagaagggctcacataagctggacgagtgggtgttgtgccggctgtataacaagagaaacaattgggacaaggtgaaggtcgaggagcaggagttggaggcggcgccgcgccgacagcatcacttgcagagcgcggaggattccatgtctaacagtttccagacgcacgactcggacatcgacaacgtcttcgagctacaaaattgctacggtaacaacatggtgcaagggcaggccatgacccccaggaacgacattggcgtcgtgacggtgaaggaggacaacgactggttcaccgacatgaatctggatgatttgcaggcatcctacaacatggcccatacggtgaatccgaacccggcccaaaccgcgaacctggtggcagggcaaggccatggctacttgcaaggctatggctacttgcagtacatgaactcaccgtcgatgaagatgtggcagacaatcttgcctccgttctgagtgtccacgatgaagatgagtgtccacgatgaagagatgctcttgtacataaggggacataggagtgactagactggaatagaaacaacagggtatgattctgtatctataggcttgtaacgtttattcattcgttagataatacgtatgtggttggtaataccaaaaaaatgcatctccctttgcactacttgaagaaagcacaaagttgtagttctcgtatctcatatggtcggtctaaatcgattctgatcttcatgtgatgtgatatatattatatgttcgcacatttatttaaagatgatgaaatggtaggggtaacattcagtggacggatataaataaaaccatgtgattctac

SEQ ID NO: 3193 - DNA, 748 bp, Zea mays
  Clone ID: TF_LIB4759-059-R1-K1-C5
ccggccgggaatttctcttctatgatcaggggtaggagaaggaggaggaggagtagaagcagctccacacctgtacgtagctgccgcgcgccggtgagcgaggtcgttcttgagagctgtatatatatatatatagctccgcgacgacgccgatgatggccatcaagtcgctgagcatggtggaggccagcctgcctccggggttcaggttccacccgcgcgacgacgagctcgtgctggactacctggccaagaagctcggcggcggcggaggccctgtggtggtgagcatctacggctgccccaccatggtcgacgtcgatctcaacaagtgcgagccctgggaccttcccgacatcgcgtgcattggtggaaaagagtggtatttctacagccttagagatagaaagtatgccactggccagcgtacaaacagagcaactgattcgggatactggaaggccacagggaaagaccgtccaataagccggaaagggttacttgttggtatgcgcaaaacccttgtgttttatcaaggtagagccccaaagggaaagaagaccgagtgggttatgcatgagtttcgcatggaagggcgagatgatcccatgaaattacctttcaaggtaataattaattacgacgacttgatttcatcattgtgcatccttcttttttcagttgtttgtgttgattcattttattcacagttttccaataatatatgatagatacaatcataaatcat

SEQ ID NO: 3194 - DNA, 2582 bp, Zea mays
  Clone ID: TF_ZmC16461_1
ggaaatgcgaaaggcagccgaggccgcgagccgacgcacgcggctcgttgcttcctccatcccctttcctcacgccgacgccaaagtataccaacgaattcctcctcgggctcccacctaatcgtgttcgccgcctgcctctcccaaaccctagcaacccacgatcgaacccaaatccgctcctcccacccgaggaattatgcgaaattccccgagatcctagcccagcactagcagatcgatccatcgcttgcccacctgccggccaccaacccttgtagtctcagtcaatctgtagattgagactacgatgagcctgtcaccgctcgactcctcctccccgccggccgcggctgcggctgctgctacggaggtgcccctcgccccgggcttccgcttccaccccaccgacgaggagctcgtctcctactacctccgccgccgcgtcctcggccgccgcctccgcgtcgacgccatcgccgagatcgacctctaccgcctcgagccctgggacctcccctccctctcccgcatccgcagccgcgacgcccagtggtacttcttcgcccgtctcgaccgcaaggtcgccggcgctggcgccgggggccggggcggtcccggcaacaggaccaaccgcgctacgccgagggggtactggaagaccacgggcaaggaccgcgaggtgcaccaccgcggcaagcccgtcgggatgaagaagacgctcgtcttccacgccgggagggcgcctaagggcgagaggaccaactgggtcatgcacgagtaccgcctcctcgatgcagacggacctcaggatctgcatgtggtttgtagaatcttccagaagcatgggtctggaccacagaacggtgcgcagtatggtgcaccatacatggaagaggaatgggaagaggatgatgatgctattgagaatggttctacccacgatgcatctggtcaaattgctgcaaccacctgtgctgtagatgaggagtcaaatgaggacgatgagaatgcatattgtgaaacaaacagacctgctcgagtagaaccatctcatctgccttcggtccatgaaatgctcaatccaccagagatggctcctctccaaggtcaagattctaaagagacaagcgatggaagttgttctgatgttgctatttctctggaagagattttgcaggaacctttgtcaaatattagtgtggagaatatgcatagacttgaagggcagaatgccactgatgataacatcagtgttgataacttgttatcagcatatcccacgaaagataatggctacgtaggccagtataacactatgaatgggagtgctccagcagatgaagctcacgcacgctggcctttgagaacatatagtaatcagaattatgtcaatggccctcttgctgatgagttctttgacacagggaatgataccaatggggttgcatattccaggcagcagcaagctgatggcttcccagcacctcgccaagttgatgaaagtatggtattttatgatgccccatctgattacaacttggtggatggaaaagatgacttcgtatatctgaacgacattctgaatgagccacttggaaatgaatcgctctttgatggagatgatatgatggcttactttgatgccacagagaatgatttcaagtatgacattttgggctctggtcagggtttggattatccacttgcagacatgccgttgaactttgcccaaaagagtgacaaggaagacaagtttacattcgaagggatctctgaggttccggaagcaaatcctcagtacggtgcatcctcatctggttcacatgaagatctgtatactgatactgaatttctaggtgtgccaacagatgacactgctgataaaacttacggaaatcgcctggccagcatgttaggctctatcccagctccacctgcaatggcctcagaattcccgccgtcaacagggaaatctgctgggatgctttcggctgtcagctcgagctcaattcgttttactgctggtatcatccaacttgatggcctcactttcagcagcggctccggtcagtggcccttgcagaagaatggagacttgagtttgcttgtctcttttgctgtggagggcgacgtggcatccaagctccctgttggtcttgggcgtgctactcggattagcaccgttcccatggtgctgcgcagtggtttttaccttttctttatgtcggccatgattctcttgtttagctacaaagtagggtcgtgtatctacagcaggtaagttgaagttgatggcgcctcttgtccggccagacctgtgggctgtttattttagttcaacacgtggatcattccctcagtgatgggggtatagcagtcgttcgacaccttttttacacatttaccattttgacctgtcaaaacatacagcaataaactttcgaactggtggtggtgatcaaaaaaaaaaaaaaaaaaagccactaaaagcagtgcactgtgaatttggtgctctgctcttattattgtaaccaaaattaactgcaatatgttatattctgtcctgtagaggaaaagct

SEQ ID NO: 3195 - DNA, 793 bp, Zea mays
  Clone ID: TF_LIB4729-016-R1-K1-B12
atccaatagcagaggacctacgttcaccctttggtccgcgtccgtgcgcgcgccctctctcactcctggcgcaactggccgacgaccgccgccgccgtactcctggttctctggtgcccaggtctagcaacgtcagtcccttcgccaggtcttcgttggggccttcactggcgacgagcacccaccagttattgggtgtacatctgtatgctcatgtcctttgctgggtccgctcctgatcctaccatattgatgtattctgagagttggccaggtctaccaaggggtgtagaatttaatcccagtgatagtgatcttctgtggcatctagcagcagaagttgggaacgctctagctgagcgccatccatttatcaacgagttcattaaatttgttgatgatgttagagaatttatttgcactcatcctcaacatataccaggtgttaggcaagatggtcgtgcatcatacttcttccatagaagttttgagccctacatcaatgagaatgatgtaaataactgctggaagaaaattggaagccctagatccatcatcctggatggaacactgacgggttgcaaggaagtgtttgccctgtatgcagacatgccgagtgataaaagatctcaggaaactgattggagattacatcagtatcatttacaaaacacagtgaaggcagagtcagagatagtggcgtcaaaaatattccttgcatcacggaacagtctgtgtgaattggccgaggaaactcatattgaatccgaatgggatgtttccacacataaag

SEQ ID NO: 3196 - DNA, 1205 bp, Zea mays
  unsure (1)..(1205): unsure at all n locations
  Clone ID: TF_ZmC79048_1
ctcgaggccggccgggccgggaacgactctcggcaacggatatctcggctctcgcatcgatgaagaacgtagcaaaatgcgatacctggtgtgaattgcagaatcccgcgaaccatcgagtttttgaacgcaagttgcgcccgaagccttctggcggagggcacgtctgcctgggcgtcacgcactcctggcgcaactggccgacgaccgccgccgccgtactcctggttctctggtgcccaggtctagcaacgtcagtcccttcgccaggtcttcgttggggccttcactggcgacgagcacccaccagttattgggtgtacatctgtatgctcatgtcctttgctgggtccgctcctgatcctaccatattgatgtattctgagagttggccaggtctaccaaggggtgtagaatttaatcccagtgatagtgatcttctgtggcatctagcagcagaagttgggaacgctctagctgagcgccatccatttatcaacgagttcattaaatttgttgatgatgttagagaatttatttgcactcatcctcaacatataccaggtgttaggcaagatggtcgtgcatcatacttcttccatagaagttttgagccctacatcaatgagaatgatgtaaataactgctggaagaaaattggaagccctagatccatcatcctggatggaacactgacgggttgcaaggaagtgtttgccctgtatgcagacatgccgagtgataaaagatctcaggaaactgattggagattacatcagtatcatttacaaaacacagtgaaggcagagtcagagatagtggcgtcaaaaatattccttgcatcacggaacagtctgtgtgaattggccgaggaaactcatattgaatccgaatgggatgtttccacacataaagattcaagcgtggaatgggccaaaggctttaatcctgaaatctgtactgaaaccgatgagcttgatcatatatctctgaaagagcgctacaggatccttctancagacaaaaggctggggcttactacagtatcaggtgggaaatctataatgcgtgtggaaactagcagagcatctcccaaaagaaatcatgagggaaaaataagcaaagaagatatattcagcatgtggcangaaatttcttctgcaccttctattgatagagagtaatcccatgggtgatgacagcaa

SEQ ID NO: 3197 - DNA, 783 bp, Zea mays
  Clone ID: TF_LIB4725-023-R2-K1-H9
cggtcccggcaacaggaccaaccgcgctacgcctatggggtactggaagaccacgggcaaggaccgcgaggtgcaccaccgcggcaagcccgtcgggatgaagaagacgctcgtcttccacgccgggagggcgcctaagggcgagaggaccaactgggtcatgcacgagtaccgcctcctcgatgcagacggacctcaggttgttttacccttccttccaaatcaatcaaccagcccagccatcctcagtcgatatcaattagagtgttcatctaatcaattagggtgtgtatctaaattatagtgtgtatgtatgtactacttatgatccgatccccaaacacaccacctcccatctctgcaggatgatatccgccccaattcagctacagtgcacgcgcttggctgactgcccagttagctatttgcatacaccaagcggcagtgtatatatattttttgtcggtttaaggacgatctgcaatacaatagatcgatcatcagccgcttaagaggagaagctccccttatggttttgtgttctcacaatttatggatctgcatgtggtttgtagaatcttccagaagcatgggtctggaccacagaacggtgcgcagtatggtgcaccatacatggaagaggaatgggaagaggatgatgatgctattgagaatggttctacccacgatgcatctggtcaaattgctgcaaccacctgtgctgtagatgaggagtcaaatgaggacgatgagaatgcatattgtgaaacaacagacctgctc

SEQ ID NO: 3198 - DNA, 832 bp, Zea mays
  Clone ID: TF_ZmC1120452_1
ccgtaccgcccccaagtgcttcagagaagccggccggccggcaaagaagttaatttagctgatcgagctctcgacctctcgtgccgtgtgtgcagtgtattcttcttcctcctcctgtcgtcgcctagagctagctctttatcaaattaaacactttttgtcaaatcagttcgttctggaatccgttatagttgcctgctgccgtcctcttcaagtagtgcaacaagaaacagggagctttctttatcttttctagcagttggatagggttagggttttccgttctggccttatagatcatcggtcccgattgatctgggtaagtgatcgagtagtagtagtatggaagcgtcagtaggagcagctggtggtggaggggggaagtctaagaaggaggaggagagcctgccgccgggcttcaggttccacccgacggacgaggagctcatcacgtactacctgcggcagaagatcgccgacgccagcttcacggcgagggccatcgccgaggtcgacctcaacaagtgcgagccatgggatctcccgggtaaggatcggaggaaaccaactgtatatatatgtacacgcacatgcatgcatacagcatactcagttcgtcagttattcacgatcaaatctcaattaataaactccaccaatgattcatcgccaatttttataacggggggcaagacctttgacttaaattatattacaagaggtaaaaagagaaattagaggaaccacaattcatcatcaaattaaaagctatggtttttttcttaacaataacatccgcgttttatccacttcaaaaaaaaaaaaaaaaaaa

SEQ ID NO: 3199 - DNA, 753 bp, Zea mays
  Clone ID: TF_ZmC7355_2
cattgggacctcgtcgcggccggccgggaaaaaaggagagcctccctcctcaccctggaaaacacacgcacgcagacctcccccaaccgctctcagtctctccctccctgtctctctgttcaatctctcggctcgccatggacgctccgagcaactgcacgcgtcctgcgcgcgccaagtgaccgaacaagctgagctctgctgctacagttgcttgcccctgtgccaaactggcaggaggtaggtagcttatagcatagcagctagagctaagctgtggtgcgtagcggcagctagagctagcttgtgcacgcgcaggtgcgtgctagctagctagcttgttagctgtgtactagctgtgtagcagcagcagcagcacagtagcagtagtcggtgataaaaggaatttctttggggacatgtcggcggagagagccccggtgctggtgaggcacggcggcggcggcgtggaggcgctccggcagctcccgccggggttccggttccgccccacggacgaggagctcgtggtgcagtacctccggcgcaaggccatcggcgtgccgctccccgccgccgtcatccccgtcttccgcgacctctacagccgcgacccctgggacgtcgtcgccgtctctgcccctgatacgaggagcgagggggagaaatacttcttcgcggtgcggccggcaagcggcggcaagagcagcggcgctggtactggtagcagggcggccgccgacaagtgagctc

SEQ ID NO: 3200 - DNA, 825 bp, Zea mays
  unsure (1)..(825): unsure at all n locations
  Clone ID: TF_LIB5117-019-A1-PF1-G7
ctcgatcccttcccttttcagcccccctcgctgcgtctgcgtctgcgtctgctggaagagacacagcaccacgccgcggccgccccacccacccgccagccagccagccctcacaaagacttgacctgttcctgcgaccgcctcggcctcttcgcctccaccgcctcttccgcgatccccttccgcccgccgtcttccgtccgcagccccagcaccggcttccccctgctggttaccgctctcctctccggtcgatcggtcgggggtacgtcccggcgccgtcgcggcttctgctctccgcaccacagatcatatactatggaaactctacgtgacatggctctgccaccaggatttggattccatcccaaggacactgaactcgtttctcactatctgaaaaagaaaatactcggtcaaatagggcaacggttgctgggtattggaagtctactggaaaagaccgggctattaaggtggataagcggaccataggaacaaagaaaactttagtttttcatgaaggtcggcctcccactggaaaacgtactgagtggattatgcatgaatactacatagatgagaacgaatgtcaagcctgccctgatatgaaggatgcctttgttctatgtaaagttactaaaagaattgactggacatcagagaatggtaacgaggtgggcaataataaccctcagccacaacaagcaaatgttgctgctattttagctgtcagtgttgaacaaccagatactgctgcatcatcaatttattgggtgatgaacttnccaagtgatgctgctaccgtagatatccctgctcaca

SEQ ID NO: 3201 - DNA, 577 bp, Zea mays
  unsure (1)..(577): unsure at all n locations
  Clone ID: TF_LIB3607-017-Q6-K6-E4
cagcactataaaacttggcttcctccttctcctttctcccctttctattgattccctccatctttcttgttcccacaagctagctagcagcagcagcagcagtaccgtagttcttggcatcatcatcatcaattattgaagatattatcgatcggccatggtggagcctagtgtgaaatcttcagagcatggtggaggaggaatcgacctgctgttcctgcctcctggcttcaggttccatcccaccgacgaggaggtcatcaccagctacctcctgcagaagctcctcaaccctagcttcgcgccgcacgccatcggggaggtggacctcaacaagtgcgaaccatgggatctcccaagcatggcgaagatgggggaggaggattccaaggagtggtacttcttctgccgcaagggcntgaaataccccgcgggcacgcgggcgaaccgcgccaccaaggagggattctggaaggcctcgggcagtgtcagggtgatcttcttcaagccagctgctgggcacgactctcttcgccgccgtgtgccgctggtggtgttgtagtagacgctggtgttc

SEQ ID NO: 3202 - DNA, 1066 bp, Zea mays
  unsure (1)..(1066): unsure at all n locations
  Clone ID: TF_ZmC12224_6
aaaccatccggctacagcaagcaaccgtagcagtcgtagatgtgcagcgcgcgcagccaattccttcttactcccccgggccttccctctgtctctctcctcttctcttcagatcgacgtgctggttgcagagtgcaaactgcgtatataatatacagttcgttgttcttccagctccgcacataaagatagatagatatacagggaaaaagtgtagtagctggagcagaagctagctagcatggggctgcgggacatcgagctcacgctgccgccggggttccggttctaccccagcgacgaggagctggtgtgccactacctgcacggcaaggtggccaacgagcagctcgcaggcgccggcgcagccatgggtggaggtggatctgcacgcccacgagccgtgggagctccctgacgtggcgaagctgagcaccaacgactggtacttcttcagcttccgcgaccgcaagtacgcgacggggcagcgcacgaaccgcgccaccaggacgggctactggaaggccaccggcaaggaccgcgccatgcgcgacccggccgcccgcgccgtcgtcgtcggcatgcggaagacgctcgtcttctaccagggccgtgcccccagcggcgtcaagtcatgctgggtcatgcacgagttccgcctcgactcgccgcgtacgacgacgacgccaccgaaggaggactgggtgctgtgcagggtgttccagaagcggaaagtcgacggcagcgagcaagacaacggcgtcttcccctcgccgccggtctttgccggcacatcgcagtcgcagggggtcgtcctgccgccggaccagcccagcgtggtggacgcgtacgtcgtagtagaccagccgggctcttcttccgtcggactcgcgccgccgcaggagaacctcggtagcggcctggacgcgttgctgacgaacggagcgatgtggcagtacacctcgtcggtcttcggtcacttgttgccgcaggaggcgaccagctccccgccggtgatggacctaggctccagnggaggaggaagaggaaggagactacgggtgca

SEQ ID NO: 3203 - DNA, 1684 bp, Zea mays
  Clone ID: TF_ZmC99_1
gcgtccgtgaaagcgctcccctcgattgggcggcacgtaacccatcaccaccaccaccaacccggacccgtcaagcgctgcgtcgtcccgtgcaaagaccgcgcattccgtgcgtgccgtgtccacgcgcgcgcgcgcggtggcgttaagttgtcgagcgccagaggagcgccactagtcgtcgatcgatttgacccaggcgaggaggcgtaggcgcgtaggggagtgagtctagctagctactggtgttgggtccattattcgctagcttccgacgatggaggtgaagaaggaggccacgaaggcgacgctgccgccggggttcaggttccggccgacggacgaggagctgatcgtgcactacctgcggcggcgcgcgctggcctcgccgctgccggccgccgtcgacatcccggacgtccgcatcctggcgcacgacccgtccgacctgctgcccccaggggggctggcagggttcggcgagcaggagcgctacttcttcacgtgcaaggaggccaagtacgtgaagggccggcgcgcgaaccgcgccacgggggccgggtactggaaggcgacgggcaaggagaagccggtggccgtggcggtccggggcgtgcaggggcagagccagagccagagccaggccgtgctggtgggcatgaagcgctcgctggtgttctaccgcggcaagccgccgacgggaagcaagacggagtgggtgatgcacgagtaccggctggcgggcgccgggctcgcgccgtgccgccgccgccacgccgacgccgacggagacggcgtggcgcgggcgccggccgagggctgggtgctgtgccgcgtgttccggaagaagggctccgccgccgtcgcgaggcggcccggcgaccgcagcgacggcgagggcgacgagagcgcgtgcggcggcggaggaggcggcgggcgcgggttcatcgacttcttcgcgcgcgcggacgccgccgggcgaaggcgccgcgctccgtcgcccgccgtgtcgagccggtggcttgcggacgcgtcgccccagccggagcaggaggccaccagcagaggcccgtgacgagacaagggccggccggctggctggcgtgaagcgatcaagcaaggtaagagagagagagagagggaagcttttgctgcattggcagtacccaatgagggagggtccagtacagtaggtgcaggtaggagcaaagtgaattcgttttagcaacgcgagagagagagaggcccgatagtcagtcagtcagtcaaccagtgcagtatcagttgttgagcgtagatggtgaaactaatgtagcagctcagttgtactcctcccgaccacctgatgaatcctacacaattgtagagtggctgcagcaaaatcacggccatggcaccggagctcctccaaggaacgcaagtccaccagctgctgctgctgctggccatggcggtcgcgcggattgctagtgctaatgttccacaggctgttgattgctgagaagcaagtagcggtggtggtggcgggcagcagacggaagatggcgggtgtctgatactggtggtggtggtagtagtcgtgcgtaatctgttgcctggacttggacttggtttctttaatgcaattatgatgatgaagtgaatgcattctgcgtgctggtgttggaacgccgggcaagaaaaa

SEQ ID NO: 3204 - DNA, 582 bp, Zea mays
  unsure (1)..(582): unsure at all n locations
  Clone ID: TF_ZmC519245_1
nacccaatcttcccccccaagctcgagccgccgccgccgccgatcagtcgaaccagccccctcactaaccaatctcccgagcgcccgctgccccccgacctcaagcccccgttcgtgaatggaccacggcttcgacggcgcgctccagctgcccccggggttcaggttccaccccacggacgaggagctggtgatgtactacctgtgccgcaagtgcggcggcctgcccatcgccgcgccggtgatcgccgaggtcgacctgtacaagttcgagccgtggcggttgccggagaaggcggcgggaggagggccggacgccaaggagtggtacttcttctcgccgcgcgaccgcaagtaccccaacgggtcgcggccgaaccgcgccgccgggactgggtactggaaggccacgggtgccgacaagcccgtggggtcgccccgccccgtggccatcaagaaggccctcgtcttctacgccggcaagccccccaagggcgtcaagaccaactggatcatgcacgagtaccgcctcgccgacgtcgaccgctccgccgccgcccgcaagaagtccaacaacgcgct

SEQ ID NO: 3205 - DNA, 601 bp, Zea mays
  unsure (1)..(601): unsure at all n locations
  Clone ID: TF_LIB4727-007-R1-K1-G5
catcgagatactagggacttcgacatctacaagcacgacccgtgggaccttccaagtcgagctcgatctcgggggagaaggagtggtacttcttctgcctgcgggggaggaagtacaggaacagcatcaggcccaacagggtgacaggcaccggctccggcttctggaaggccaccggcatcgaccggcccgtccactcatccggccgcgccggcggcggccccgtcgtcgtcgtcgggctcaagaagtcgctcgtgttctaccgcggcagcgccggcaagggcaccaagacggagtggatgatgcacgagttccgcctcccgccgcgcgctgacgacaccgcccacgccacgcccgccagcgagcgagaggcagaggtgtggaccgtctgccgggtcttcaggaggaacttcacctacaagaaacacccncagcagcagcagcagcagcagcagatggctgcaggcggcagcgaggtgtccgccggcgccggcgcggccaccgtcgcgcagcccggcgagtcgagctccgtcaccggcggcgtcgaatcggacaccggngacgagtacactaatacgatcccgtgaataatacgatcgac

SEQ ID NO: 3206 - DNA, 1665 bp, Zea mays
  Clone ID: TF_ZmC38242_1
ggcatggaaaaagaagactcaaatattaatccctgaaaaatccgaaaattagcagagcaatacgtcagtaccaattccaaacaagcaactggtctgccaactaaaatgagcatattcattacaaaatgtacaagctgatgcaaccaagaaaggccaatctcacactgaacaacactccacagttggtacagcatgattcctcagcctttcatatttcatataaatcatttcatgtgcaccagagctactcaaagcaaaagcgagaccactgttgttgcatacttcactgccgtcccacaaaaaacagatcagttgtttcttcatgtaccaaaatggtgccgagagtgcactagggcagcgtcagtcgtcagtaatcttttcagctgcccatgtcataaagctatcctgtgaaaattcaatttggctgagtcgaaactcatcagtgttgtcaagctcaaggtttgtgttatctgtgggctccaaccgctggcactcctctaaatccttcttgaagtcctctgctgacagatgggcataagcagccaggcagggtttggtctctctaggttcatctccacctccacaagaggtctgagactgactcaggaggaactcgtcacagagagcgagtccttctgccagctgctgagagtctaacaattcaaactgggaatcgccttcccacaacttctgatcttgtgattggagattatctccgtcctttgttgtttttacagagggtgggaggacaacagtctcttcaatgcttatttcacagtttctattaagctggtaaagattatgctcaggattatgaacaacttcttggactgtaccaacatgtttgtcagtgggcaatgtagtaaaatctgggagatttgattcagcagccattgattccagatcatcggatgtagttagctcttgagcattcttgtccccaggtttaaactgttgctgaaaaaatagtttggagacaacatattcaccatctctctcatcctctccagtgcctaggtggtactggtggatcacccaattggtcttctcagcctttccacccttcaacgggcttatataaagcaccattattttcttacaaccaaggtgttttccatcaactagtactggctttgtcttgcctgtcttgtgccaacggacatcagcatcgtcagtgtttatccttcgacgcttcctagtcccagtgttgtaagccttaaatgttctgtggaagaaatgtgatacacttccattttgtttaacacctggaagtttctgtggatgagtgtaacagatgccttcatcttcctcaactgttggaatgaattcatcaatgaacggatgaggttttattccagattttccatgttttgccattaagcgccagattaattcctggtcagaaggatcaaattttacacctttaggcaaaccgggccactggtgaacaacctacagcaagaaaacagtcatgagctgatcacactttaacggaattgtcaggcctgcagctgaccacactttaatatctgaagacccagagatattttttacaaaagccccaaatctttggctgtcaattatccaagttgtccctgtcatggctgcggcagcgcttcctaccacggccgcagggtcctagggttccggcgagcacgcggcgac

SEQ ID NO: 3207 - DNA, 617 bp, Zea mays
  Clone ID: TF_ZmC545_12
aaaaacgggctcgggcccggcgtgggacaccgcgcgcgcaatacacgggacacacacgcagatccgagctaaccaccatcgacgagcgccagccgccagcagccgagccggagcgaccttttcttttttcttttacacagcgggacggagaaaggagtcaatcagccaaagccacccaccgcttttacccaccgatcggcgttgccgccgctagcattgtcggcttcagctccatccaaatccaccgccagcaagcaagcaagcaagccggcgccatgggtctgccgatgaggagggagagggacgcggaggcggagctgaacctgccgccggggttccggttccaccccaccgacgacgagctggtggagcactacctgtgccgcaaggcggcggggcagcgcctccccgtgcccatcatcgccgaggtggacctgtacaggttcgacccctgggacctgccggagcgcgcgctcttcggggcccgcgagtggtacttcttcacgcccagggaccgcaagtaccccaacggctcccgccccaaccgcgccgccggcaacgggtactggaaggccaccggcgccgacaagcccgtcgtgccgccgcgccgcgcggcc

SEQ ID NO: 3208 - DNA, 1444 bp, Zea mays
  Clone ID: TF_UC-ZMFLMO17204B05_FLI
ttgagtggaagactgcatgcttgttgctagctgcatcaagagcatccagacatatcgatcgagctcctactcctggcggtggcgggaaatataatattgtatactatacgtccacagccacagtttcttggtagaaagatcggcagatcatggtagtcaaggagttcggaagagaagtagtaatgagcatggacaaggtgaagaggggtggagaagcgctcacggccgccggagccggagatgaagagaaagatgacgcggtgctccctgggttccggttccacccgaccgacgaggagctcgtcacgttctacctccgccggaaggtggccaggaagccgctcagcatggagatcatcaaggagatggacatctacaagcatgatccatgggacctccctaaggcgagcacggctgctggtggcgaaaaggagtggtacttcttctgcctgagaggaaggaagtaccggaacagcatcaggcccaacagggtcaccggctccggcttctggaaggccaccggcatcgaccggcatatctaccctgccaccgcgaaccccgtcgagtccgtgtccgtcgggctcaagaagtccctcgtgtactaccgcggcagcgccggcaagggcaccaagaccgactggatgatgcacgagttccgcctcccgccggccgccgccgcctcgccgacgccgacgagcatgcaagaagctgaggtgtggaccatctgcaggatcttcaagaggaacatcgcctacaagaggcagccgcagctgccggcgtggaggcagcagcagtccagctccaacacggggagcttcgagtccgacggcggcggcggcggggacgagtacatgaaccgctgcctgccggtgccggccacggccaccgctcatcagatcggcggcatgctgaacggaggaggcgtcgtcagtgccactcgcagcagcagcagcagtttcttcagggacagggagagcgtgcacggcggccagcagttccacttccacgagcagtggctgagccgcttccccgccgcgccagcagtcgagcagaagccgcagctcctggacccgtcggcgatggccatcgcgttccatcagaacgacgaccagagcgtcgccaccgctgccgctgcgagcgagtgctgcaaggacgggtactactgggacgagatcgcgaggttcatggaggtcaacgatccaacggtgcttcacgactgtagatacgcttgatcggtagcaagttcagacagatcgtagacagacacccaggttaggtaaccaaggaacgatgatgcaagcatgagagactggcaatgcaggagccaggaggggctgccccagtgaggctaggttttgcgcacccttctgcgtctattttctacctgatcgaatgtattgtatacaggacgttgttgtgaccaaaataaacacatagttcagcc

SEQ ID NO: 3209 - DNA, 1811 bp, Zea mays
  Clone ID: TF_ZmC1440_1
gccggccgggccgggatgtagtcatgtactgtaaggacgaccatgtatttgtaagcagcttccattcagccatgcatccaaacatattaatacagcggttaaccaagtccgtacatcagcttccattaggccccgtcgtcatgcatgttagcagcaatcaagccctagaaacctcgagctcgtcatagaaaccaagaaagaaccatccaagccatggaggatgatgaggagaagccatcacaaaggatcaccaacaagcatggaagactgcatgcttgttgctagctgcatcaagagcatccagacatatcgatcgagctcctactcctggcggtggcgggaaatataatattgtatactatacgtccacagccacagtttcttggtagaaagatcggcagatcatggtagtcaaggagttcggaagagaagtagtaatgagcatggacaaggtgaagaggggtggagaagcgctcatggccgccggagccggagccggagatgaagagaaagatgacgcggtgctccctgggttccggttccacccgaccgacgaggagctcgtcacgttctacctccgccggaaggtggccaggaagccgctcagcatggagatcatcaaggagatggacatctacaagcatgatccatgggacctccctaaggcgagcacggctgctggtggcgaaaaggagtggtacttcttctgcctgagaggaaggaagtaccggaacagcatcaggcccaacagggtcaccggctccggcttctggaaggccaccggcatcgaccggcatatctaccctgccaccgcgaaccccgtcgagtccgtgtccgtcgggctcaagaagtccctcgtgtactaccgcggcagcgccggcaagggcaccaagaccgactggatgatgcacgagttccgcctcccgccggccgccgcctcgccctcgccaacgccgacgagcatgcaagaagctgaggtgtggaccatctgcaggatcttcaagaggaacatcgcctacaagaggcagccgcagctgccggcgtggaggcagcagcagcagtccagctccaacacggggagcttcgagtccgacggcggcggcggcggggacgagtacatgaaccgctgcctgccggtgccggccacggccacggccaccgctcatcagatcggcggcatgctgaacggaggaggcgtcgtcagtgccactggcagcagcagcagcagtttcttcagggacagggagagcgtgcacggcggccagcaattccacttccacgagcagtggctgagccgcttccccgccgcgccagcagtcgagcagaagccgcagctcctggacccgtcggcgatggccatcgcgttccatcagaacgacgaccagagcgtcgccaccgctgccgctgccgctgcgagcgagtgctgcaaggacgggtactactgggacgagatcgcgaggttcatggaggtcaacgatccaacggtgcttcacgactgtagatacgcttgatcggtagcaagttcaggcagatcgtagacagacacccagacccaggttaggtgaccaagggatgatgcaagcatgagagactggcaattttgcgcacccttttgtgtctattttcctgatcgaatgtattgtatacaggacgttgttgtgcccaaaataaacacatagttcagccatgaagaatcgtgactttagcacctgctctggtctctgttccgaaaattataggcaagatttgagttggcctaaagtcaaacgatgttgatatttggtgtctgaatatcagttctctttttctat

SEQ ID NO: 3210 - DNA, 281 bp, Zea mays
  Clone ID: TF_ZmC176741_1
cgcactgatctatctaattaaccgccgctctagctagcacacaacctacaaaagcatctgctgcctgaaatatttgcttggcagagttgacatttacattcgatctctcggttactagtgtagtagtagtgttggatcggcagcatttatttgcttcccctgcccctgccggccatgggcaccatgaccctgccgcccggcttccgcttccaccccaccgacgacgagctggtgagctactacctcaagaggaaggtggacaacctcaagatcgagctcga

SEQ ID NO: 3211 - DNA, 1598 bp, Zea mays
  Clone ID: TF_ZmC13154_1
ttgacgcgtgggcggacgcgtgggttcacacgtaccgccggcggagaaggaaggaattggtcgccgccgcctgcctctctcctcctcctcctccgtcagtggctgtggccacgccgtgctaagctaagctaagctaagctaagcttgcgcaagtgacaagttctttggttggttggaggcagagccagatggcatcgtcgtcgcggctggatctcccgccggggttccgcttccaccccaccgacgaggaggtggtgtcgcactacctgacccacaaggcgctggacagccgcttctcctgcgtcgtcatcgccgacgccgacctcaacaagatcgagccgtgggatctcccaagcaggcaaggctaagatgggcgagaaggagtggttcttcttctgccacaaggaccgcaagtacccgacggggatgcgcaccaaccgcgccaccgccagcgggtactggaaggccacggggaaggacaaggagatcttccgcggcagtagcagtagtccccgccgcgtgctcgtcggcatgaagaagacgctcgtcttctacacgggccgcgcgccgcgcggaggcaagacgccgtgggtcatgcacgagtaccgcctcgagggcagcctgccgcccaacctccaccgcggggccaaggacgaatgggctgtgtgtaaggtgatcaacaaagacttggcgggcaaggctgggcaacaacaaatggcgccgccgccgcacgccgtgtccgtgggcatggagcgcagcgactcgctggccttcctcgacgacctggtgctcgacaacgccgacgacctgcccccgctcgtcgactcgacaacgtacgccgccggctccctcttcgccgcggcggggacgaccacgacgacgaacgacgacagcggcgggtaccaacaagccaccaaggcggagccgcagccgcagctgcccgcgccgagcaacagcccgtaccagcaccagcagcaggccatacggaggcactgcaaggcggaggcgccggcgccggcgatggtgctgagcccgtcgcgcgagacgccgggcgcggacatgttccagctccagcatgtggacgagctgctccagctggacggcggcttcatggaggactactacaacatgaacatgtggaaggtctagttaggctgggatcgaccggccggccggacactagtactatacgtaattagttccatttagtccctatttaatttgggtccatcggtttgccgggcggatggattgattagttggttgattggatatattaacctgttattagacgcagaagagtggaaggaaaggccggccgcgccgattggcatggacgaggtctgtctgacgaagatgtgtcgagacctcgccggcggtgtggtttgtgatgattggttagttggctaatcttcagtagctagctacgtactgagtaattagaacagctagcagtagtgtgtaaccgcgcgcgtgtcgttgcctctggtcgacaggattgaagcacgcattgtgtacataataataggtaggagtcgtcgtcgtcgtcgttgagtgatgagaaaaatggatgaaacatactatatatgctgttgatt

SEQ ID NO: 3212 - DNA, 2280 bp, Zea mays
  unsure (1)..(2280): unsure at all n locations
  Clone ID: TF_ZmC17732_1
cctcgaagccggccgggccnggaagagaaagagggcggcggcacggcagagccaaagccgaggcgagccgagcagtacatgcatcccgcttcccgcattcctcatcgaggtccggtccagcagccttttgcgccttcgtgtccctcccctccactccctcaccgggggctgggctggtggggagtggggactgggggcagtcgccacgccgcagtccattctttcgtcacccatcgcagctccaacacctctcgctagtcgtcatggcggcttccgcggcagcgttccccctcccaccgccgacgcctcctcttcgactttcacatgtcttttgatatcacagaaaaggattgcccctgccttcactgctgtgaatgccagggacgtttctgtcgccctacaatatatggacattggacttgatagttggcaaactttcttctatatactggacgttccagctttcgccaacctgctgctttaaccacatcttttccttctttcccgattttgcctctcactatcatcaattaccgctaaaagtgaaacaagtgttctccctatggccaagacatcacttcctcctggattccggtttcatccaactgatgtagaactcacagtctactatttaaagaggaaactactgggaaaacacttacgctgcaatgctatcactgagattgatctatacaagttcgccccttgggatcttccagagagagcttccttggagagtaacgatctagtgtggtatttcttttgcccgcgcgataggaaatattctagtgggttaaggactaatcgctcaactggagttggatattggaaagctaccgggaaggacaggccggtggtatataattctaggactgttgggatgaagagaactttagtgtttcatcttggcaagccaccacgaggtgatagaactgactgggtaatgtatgaatataggctggaggacgaggaaatagctgcttctggtgttaaactggatgcctgcgttctatgcaaaatctttcagaaaagtggcccagggcccaagattggcgcacagtatggtgccccattcaatgaagaagactggaacgatgccagtaatgtagagtgttctccatgtgtgccttctgtggccccttgcgcacctgaatcaagtcgtggtgggttgaattctgctggtcaacgcctggctgtgagttatgatgtcaaggtttccttgggctcctcggcagaaggtatcaacagacctgctgtcaatggagttcatcctgtcagaccttctcctgatgctcctaatgactgcatacacattcaattgctggctgaggttatgagatgttcctcaacctcaatgcatgttttacgtactgctggtgacgatggtttgctggctgattcaactgctgactacagtagtgataatagaatatctttggatgctattgaaactatattctgtgaagtggatgagcttgggccccaggctatggtgaacaatactaaccattgtgactcatgcggtgagtatttgattcaccctacgatggtggcacgaggagctgaacagtacttagagctaaatgacctgtccttttcgctcaccgatggtcctgattcctgtggcgtgcttttctctaatggtgtatctgttgagcaactaccggatcttgagctcaggtttgagcagttctctcctgaccacatctccaataccgctattgcttccacatcaacaacggttggttcatctgcttcagtgcccttattggaggatcacaggacctgattcagaattggagtcatctggcgcacatgttaattgaatctaggaggatctgcaggacaaaggcataatgctccctttttttcaattttcatgaagttagaatttttttttggatgaaggcacggattagtgaccacttggcacagaaatatgtttgtgttgcggcttgtgaatccaggaccatttctctgcctgtagttttgcatggtagaactagatgggcaacaacaaaatgtgttcagtattgaataacgcactcactgcattaactactttgcctagcttagtatagtattctggatcttgaggcagggtagaagtgggggtgtgggacaatgtactcacagcttgttgtcatttagcagcaatatcttgtttcggtaacctgtggcaatatcttgtttggttacctggatttgctagtgcccatgcaagatgatgttttcgttgacgccataataataaatagcaatcgattttaaaggaaaaaa

SEQ ID NO: 3213 - DNA, 2605 bp, Zea mays
  Clone ID: TF_ZmC12473_2
acgtctcctacactcctccgcctgccgtcctgtcctgcgcccttactcctcggacgccccccacgccaccaatccccaaccccccattccgcactcccctctccctgccccgccgcgcttccttcgctgctaaagcggctgcgatggcgctctgggcgctgccggtcggcttccgcttccaccccaccgacgaggagctcgtcagccactacctcaagggcaagatcaccggccagatcaactccgaggccgaggtcatccccgagatcgacatctgcaagtgcgagccgtgggacctcccaggtaagtctctgatccggtccgacgatcctgagtggttcttcttggcgcccaaggaccgcaagtaccccaacggtagcaggtcgaacagggccaccgtggccgggtactggaaggctactggcccggacaggaacatcaagtccaagggcgacaagagcaaacagtttaccatcggcaagaagaagacccttgtcttccaccgtggacgcgccccgaagggcgagcgcacagggtggattatgcacgagtaccgcaccaccgagcctcagttcgagtctggcaagcagggtggttatgttctttatcgcctcttctggaaaccagaggagaaaactgagcgctccagcccaaaggaaatggatagaagtggcaactcgcctactactattcgttcttcacgtgacaaccaagaggcgaatgaggaagctaatacaccattaaataaaaaatctctagaatctgctctgcatgatccgattgagctgcccaattctgctgaaacccctgctgggccaaggaaaatgtgcctggcggacagaaatgataatttggtggctactgcaccggttgtttcccatatacctttccagggacatgctgctggtgtagctaaggttgatccttcagctgctgcttcagcccacttcgttaatccccagaatggaaatgacgactgcaacaattttatgtctgatttcacccccattctaccgcatgaaaatgcattcttcactggtacacagcaaggagcttttggttttgatggaaatggcatcatgaatcatcctgatgccctggatgctttcttgaaccaaacacttgttgatactgatgaacattcatcgacaacatcaaaagttcagtatgattctgacattccaacagaatttgcgaaccattggaatatgcaggatgagcatcaagactggtgggaaaagttagattttgagccatatgaaccaactttgcttccttatgacaccactgacctagacgtactctcagtagactctggcgccgattccttcaatgacctcttcaatgtgactggcattactcttaggcctcaacggttggactccactgtgcaaccagactgtgtgttccctgatcagggcactgcactaaggaggctgaagctacaggttgttgagtgtggggagagcataactaaagatgagagtgaagatgaagtatcatgtgttgaaagtccaaactattttgatgaatctgtcgagttcgctgcagagaagggtgtggcttcttatggggatggggctgactcaactgggattgttattagaagccgttaccctgccccaagttcaagctcagagagttcattcactcaacagggaactgctatgcgaaggctacggttgcagttgggccttaacgaaggcacatgtcctagtagtggtgattcatcaagctgcatcgtagatgaatcagaaagtcagcagaaagcagagattgaagaggatgcaagcacgaacctagctggaagtgttgataatctacctggcaatagccatgatgatgagcaaaaggacatccctgaacatggagttaaatctgtcctgaggctgcggaaaacttctgcggaaagtctgaaggatgtgaagcaggaggattgtctggagccagacgggagagcaccgatgcagagggtaggcttccaatcatccatcatctggctggttctttcggtggctgtgctgctgcttctctattgtggcgtatggatgagtatgatatgtatcctggtgcggtgttttgcgcacatgggttcctggcatcaacctgatgtgtgaacttctgtcataacatgcgtttgacagcagtaagacatcccgacatatgccaatgcagctaaaaataaaaaaaagaggtagcaagtgaagagggagaaaaaagagatgtgttattgtaggtcttagtacatcctagtcttgccaatgcagctcaaaagaaaaaagaggtagcaagtgaggagggagaaaaaaaaagaggtgttattgtaggtgttactaatgttgtagctgttgtgcagttgtaaatcccccttcggcagctggttttatttcctgatgtaatgtaagcaagagcaaggtcctgtcagatgcgtgcgctgaaagtctgaacctccgataatatctgatgcttcttgtagatagctgtttcagaattttcggttaatgaacccagttactgcttgcttgttgatctattttctaaaaagctatctgatgggattgttgtggtgaattcgagttcattgggaatacatgacagaattgtg

SEQ ID NO: 3214 - DNA, 362 bp, Zea mays
  unsure (1)..(362): unsure at all n locations
  Clone ID: TF_LIB3354-108-Q6-K2-B3
gcgctccatttccctcacctcccgcagcagctagccgccgccagccaacatccgaaccaaccaaccaacccacagcgggcgattaaagcgtccagatggtagcgatcgccaccgtgcaacatcatcgccgcgactcggaggcggagctcaacctgcccccggccttccggttccacccgacggacgaggatcttttggcgcactacctctgcacgcgcgccgcggngcgccgcccgcctgtgtccatcatcgcctacgtcgacctgtaccgcttctacccgtgttacctgcccgagcgcgccctctttagtccccgcgagtattacttcttcatcccgcgagaccgcatgtaccccaacgtc

SEQ ID NO: 3215 - DNA, 2021 bp, Zea mays
  Clone ID: TF_ZmC603_1
gccggccgggaatcctcagtcggcctttgactgctccttgacttgaacttcgcgcagcaagacggagaaacaagaaccatccctccccctaccgctgctactcatgcacgcgcgcactgcctcctggtgccgccgcgtatgatccagacatgaatagggcgcacagcagcagctccaagctcatcaacgagaagctcgtggaacaccggatctccactgcgaagcactgcccccactgcggcgagaaaatcgacagcaaaccggattgggtggggctgccggcaggcgtcaagttcgatccaactgaccaggagctgatcgagcacctcgaggcgaaagtgaaggatgaaggctcgagatctcaccctctcatcgacgagttcatacccacaatagatggggaggacggcatatgttacacccaccccgagaaacttccaggtgtgacgagggatggcctaagcaagcacttcttccaccggccgtccaaggcctacacgacgggcacgaggaagaggaggaagatacagacggagtgcgacgtccacaagggggagacgaggtggcacaagaccggcaagacgcggccggtgatggtgaacggccgtcagaaggggtgcaagaagatattggtgctgtacaccaacttcggcaagcaccgcaagccggagaagacgaactgggtcatgcaccagtaccacctcggcgacctagaagaggagaaggagggggagctggtggtgtgcaagatcttctaccagacgcaacccaggcagtgcagctggtcctccgaccggggcgccgccgccactgccttggcagcaacggcggcggcagcggcggcgcaggagcagcataggagggatagtggcagtggcagctgctcgtctagggaccacgaggtgtcagccacatcgttcccagccggatacacagtcaccacggccgtcgagatgcagcagcatatgaagcagcctgcggaccatttcagcttcgcgcctttcaggaaaaccttcgaccaggaggttggtataggtggtgatcaggtgccatctaatcagcttggacgttcagagccgcatcatgccggcctggggcagcagccacacggcccggtgctcgcgacgaagacggctgtgcctgctacagctttcctgatcagtaggccatcgaaccctgtctcgactatagtgccacctgcaatgcagcacgcatcagttgttctcgatcatgatcagttccatgtgccagcaatccttctccatcaccatgacaaatttcagccacaacaaaagcttgaccgcagatctgccggcttggaagaactgataatgggctgcacgtcgtccacaagcacaaaaggagatgcttccattgctcacccccaagagacagaatggccttacacgtactggccacctgacaaccaagatcatcatgggtagtagcaacagggacctggtaaatagtggcgatgtgaatgctgaaggaacactaaccgcaaccactttcactggaatggtttttgtctgcttgaatatgcagcgttgctttcttggagaatgtacacctacaatagtggggaaagaacagagaaaaaaaacgtatctctgtagatctccctcaataaagaaatgaggataaaactagttaacagtgtgagctctccaagacagaagagacaaaatggccaacgaaaagagaagggggaaagaccgatgggaggaaaggtactgtgtgtgctgacattgaagggatcatgtgtggacagtttagatgtattagaacaccttaatcaagtataactataatcagtttacggtttatcacagttttttattcgtgctacctgttttccaattgtaaaaactagtggcattgtttgcatgtacattaacccttttaatttcttttagtttctaaattgatgctgattttcctttggttagttcatgctaatatgcatcacgaagaaataaagttagtaagaagcgcaaaaaaaaaaaaaaaaaaggccccta

SEQ ID NO: 3216 - DNA, 1376 bp, Zea mays
  Clone ID: TF_ZmC12224_1
tttaagagtgtgtcccttggcttgggtccagcagccttcagaggcaaaccgtcggccggcatgcagtagaggcaggctagctgcaagagagttcatcgatctagctagctagctagcgtgtgtttagggtacctagctagctagcttcaacatatatatcttagttgcacacacagctcaaaagaaaggaaccatcgatcgatcggcagggagggatggggctgagggagatcgagtccacattgccgccggggttcaggttctatcccagcgacgaggagctggtgtgccactacctctacaagaaggtggccaacgagcgcgccgcgcaggggacgctggtggaggtcgacctgcacgcgcgagagccatgggagcttccagacgcggccaagctgacggcgagcgagtggtacttcttcagcttccgggaccgcaagtacgccacggggtcgcgcaccaaccgcgccaccaagacggggtactggaaggccaccggcaaggaccgcgaggtgcgcagcccggccacccgcgccgtcgtcgccatgaggaagacgctcgtcttctaccagggacgcgcacccaacggcgtcaagtcctgctgggtcatgcacgagttccgcctcgactcgccgcatacgccaccaaaggaggactgggtgctctgcagggtgttccagaagcggaaagacagcgagcaagacaacggcggcggctcctcctcgccgacgacctttgccggcgcgtcgtcgcagggggtcgttctagatctgccggacgaccagcccagcatgacgatggccggcgcgtacgtagcagtggaccaccaccagccaggctcttccgccgtcgggttcgcactgccgccgcatgcgcaggacaacggcctcggcgatggcggcctggacgcgttgctgatgaacggagcgaccatgtggcagtacagctcatcggccctcgccgaccacttcccgccggaggaagtgaccgccgcgcccatgatggggctaggctccaggggaggaggtgacgggtgcagcttcttctacgacagcggcttcgacggcatggggttcccgcagggatggatgggctgaggaggcaaggcaccaactacaacgccatgggatgatggattgtgaaggaaacgattgaattgattccattagtggtagtattgtacagtaggtacgtagtgtgaggttaggtaattggaaattattagagtgcacctccccaatccaaaaaaaaaaacacaacggaatgaaaagtagatcgagcgcatgacgacaattgtatgtatctattcactcttactactatgcttgtacattaattaattagtataaacgaatccaagtacgtaccccccccaa

SEQ ID NO: 3217 - DNA, 1365 bp, Zea mays
  unsure (1)..(1365): unsure at all n locations
  Clone ID: TF_ZmC12224_4
acctcgaggccggccggngatgacttttaagagtgtcgacccttggcttgggtccagccttcagacttcagaggcaggctgcaagagagttcatcgatctagctagctagctagcgtgtgtttagggtacctagctagctagcttcaacatatatatcttagttgcacacacagctcaaaagaaaggaatcatcgatcgatcggcagggagggatggggctgagggagatcgagtccacattgccgccggggttcaggttctatcccagcgacgaggagctggtgtgccactacctctacaagaaggtggccaacgagcgcgccgcgcaggggacgctggtggaggtcgacctgcacgcgcgagagccatgggagcttccagacgcggccaagctgacggcgagcgagtggtacttcttcagcttccgggaccgcaagtacgccacggggtcgcgcaccaaccgcgccaccaagacggggtactggaaggccaccggcaaggaccgcgaggtgcgcagcccggccacccgcgccgtcgtcgccatgaggaagacgctcgtcttctaccagggacgcgcacccaacggcgtcaagtcctgctgggtcatgcacgagttccgcctcgactcgccgcatacgccaccaaaggaggactgggtgctctgcagggtgttccagaagcggaaagacagcgagcaagacaacggcggcggctcctcctcgccgccgacctttgccggcgcgtcgtcgcagggggtcgttctagatctgccggacgaccagcagcccagcatgacgatggccggcgcgtacgtagcagtggaccaccaccagccaggctcttccgccgtcgggttcgcactgccgccgcatgcgcaggacaacggcctcggcgatggcggcctggacgcgttgctgatgaacggagcgaccatgtggcagtacagctcatcggccctcgccgaccacttcccgccggaggaagtgaccgccgcgcccatgatggggctaggctccaggggaggaggtgacgggtgcagcttcttctacgacagcggcttcgacgacatggcgaacatggggttcccgcagggatggatgggctgaggaggcaaggcaccaactgcaacaacgccatgggatgatggattgtgaaggaaacgattgaattgattccattagtggtagtattgtacagtaggtacgtagtgtgaggttagtttattggaaattattagagtgcacctccccaatccaaaacaacggaatgaaaagtagagcgcatgacgacaattgtatgtatccattcactcctactactatgcttgtacattaattaattagtataaacgaatccaagtacgt

SEQ ID NO: 3218 - DNA, 883 bp, Zea mays
  unsure (1)..(883): unsure at all n locations
  Clone ID: TF_LIB4764-075-R1-K1-G10
ttgggtacctcgaggccggccgggacccttcgtcttcgtcgtccctatccctgcctgcccagcgactccaattaagtttgcaccgcgagcatgggaggaggagccaccaacctacctccgggcttccatttcttcccttcagacgaagacctcgtcgtccatttcctccgccgcaaagccgccaacctcccgtgccgccccgacatcgtcccgacgatcctcctgcaccgctacgacccgtgggagctcaacggcacggcgctgcaggctgggaaccagtggtacttcttcagtagccacgcccacgcccacgcccacgccgcggcggggcagaccagaacatctccgtccgggtactggaaccccgccggcgccgatgaaacagtagtactagcgagcagcggccgtgtcgttggcctcaagaagacgctcgtcttctgcaccggagagcctttcagagggttcagaacgaactgggtcatgcatgagtaccaccttcacgacgggcccgggtgcaatgtcggcgggagcagcggcgccaccaccccaagtagctccagcagctccgccagcagcaggagatcgcagaggaagagagttcactcgagcacggagtcaaacagctgggtgatatgtagagtgttcgaatcaagctgcggttcgcaagtgagcttccatgacgagggcacagagctttcgtgcttggatgaggtgttcttgtcgctagacgactacgacgaagtgagcttgccaaataattagaaccctagctagcgcgcaggccatttgattagtaccctgtgatggtgacgtcgccgtctgcgtaagcttaagtggttgcaagntgcattgtgcatgatgcanatggcctgatgataggcat

SEQ ID NO: 3219 - DNA, 539 bp, Zea mays
  Clone ID: TF_700048290_FLI
cttgccttctatccctttcacacacgcctctccttccctctctctctctctatcttcctgcctgaggcagcagccatttccgcttccgatcgtggaggcttggtgtggaaggaggaaaggaggccagctgctggttttcggtgcggcggagatgtctgaggtgtcggtgataaaccaggcggaggtggaggatgcgggtgccgggcagctggacctgccgccggggttccgcttccaccccaccgacgaggagatcatctcgcactacctcacccacaaggccctcaaccaccgcttcgtctccggtgtcatcggcgaggtcgacctcaacaagtgcgagccatgggacctgccaggcagggccaagatgggggagaaggagtggtacttcttctgccacaaggatcgcaagtacccgacgggcacgcggaccaaccgcgccacggagaccggctactggaaggccaccggcaaggacaaggagatcttcaggggccgcggcgtcctcgtgggcatgaagaagacgctcgtcttctacc

SEQ ID NO: 3220 - DNA, 860 bp, Zea mays
  unsure (1)..(860): unsure at all n locations
  Clone ID: TF_ZmC175915_1
cattgggtacctcgaggccggccggaattcggcacgcgagagaaaggggtcgaatcggcggctgatttgacccggctcgctattagagctgcgaaagtgatccgagcagtcacggtttcggaagcggcgcgtcggccggaggagaaacgcaaccagctgtcgaggagctatgagcagcggtggcggaggcagagtgccggcggcggcggcggcgcagtcgcaggagctgcagctaccgccggggttccggttccacccgacggatgaggagctggtggtgcactacctctgccggcgctgcgccgggctgcccatctccgtgcccatcatcgccgaggtcgacctatacaagcacgatccctggcagctcccaaggatggcgctgtacggcgagaaggagtggtacttcttctccccgcgggaccgcaagtacccgaacgggtcgcggccgaaccgcgccgccggcgccgggtactggaaggccaccggcgcagacaagccggtgggcacgccgaagccggtggccatcaagaaggctctcgtcttctacgccggcaaggcgcccaagggcgacaagaccaactggatcatgcatgagtaccgcctcgccgacgtcgaccgcaccgcccgcaagaagaacaacagcctcaggttggatgattgggtgctgtgccgaatctacaacaagaaaggcgcgctggagaagccgaccggagccggcggcagggccgaggccagcagccagggcgcgctggggtccatgtccatgggctcgccgccggagcagaaaccgtccgtaaacacgtctgccacggcaacggccgcggccgccgactngagtgctcgtcgaaccaggaatt

SEQ ID NO: 3221 - DNA, 377 bp, Zea mays
  Clone ID: TF_ZmC145568_1
ctacaacttctgagagatcaagaactcatatatgcgcacaacactcttcctctgacaagagtttgttctgcaactaaccactatatatatagatcgatcctctatctgacaaggtgcaggtgcaggtgatcatatgaactccatggaatcatgcgtgcccccgggtttcaggttccaccccaccgacgaggagctcgtcggctactacctcaggaagaaggtggccgcccagaagatcgacctccacgtcatacgcgacatcgacctctaccgcatcgagccatgggatctccaagggcattgcgggatcgggtacgaggagcaaaacgagtggtacttcttcagctacaaggaccgcaagtaccccacggggacgc

SEQ ID NO: 3222 - DNA, 1795 bp, Zea mays
  Clone ID: TF_ZmC3782_1
ccggccgggaaaaaaaaaaaaaaaagaggttcagttcagcagccagtcagtcagtcctcgatctgatatcctctcctccctgcagcgactccagctccgatcgattccattccatccatcgagctgcagcagggccatgacgatggcagctacgacgacgatgatgtcagcagcagcgcaggcggcgacgtcgcagctgccgccggggttccggttccacccgacggacgaggagctcatcctgcactacctccgcaaccgcgccgcgtcggcgccgtgccccgtgcccatcatcgccgacgtcgacatctacaagttcgacccatgggacctgccggccaaggcgctgtacggcgacggcgagtactacttcttcagcccgcgggaccgcaagtaccccaacggcatccgccccaaccgcgccgccggctccggctactggaaggccaccggcaccgacaagcccatccacgacgccgccaccggcgagggcgtcggcgtcaagaaggcgctcgtcttctacaagggccgcccgcccaggggctccaagaccaactggatcatgcacgagtaccgcctcgccgccgtcgccggctgcaccagccccctcgccgcctaccgcccgccctccaagttcaggaacgtctccatgaggctggacgactgggtgctgtgccggatctacaagaagtccggccacgcgtcgccgatggtgccgccgctcgccgactacgagcacctcgaccgcgacggaccttctcccggcggcttcttcgacgactacttctgcggcagcaccagcttgtacgccgccgccgcgccggccatcggcggcggtgctgctgctgctggtactacaaacactactacgacgccggccgtcgtcatgcagcagcaccagcagccggcggcgctgccgaggctccccaagatcccctccatctccgagctgctgtgggacgagtacgcgctcgcgcagatcttggaccccccggccgacgtggccgccgaccacgcctcgttcgccgtgcacccgtccctcaaccagctcctggccgtcggcgacgacggctccgatctcatgatgttctcgccgcccccggccgccgcagcaggcgggaagcgcaaggcgatggtggcgatgaacatgagcccagctgacgagtgcgccgccactgcccaccagcaccagtctccggcggccaagcggctcaacggtggctcctgcttcgacgacgcgccgcagccggccagcggcttgccggcgacgatgtcgtccgtgcttggcggcggcctcaaccaccacatgctcccacagttctagatagacgacttctggtagctgactttgttgggggcacatcttccgtgcatgtactgcgtcatcaactgatcaatatggtggatcgtctacgcggaatagctagcaacctgcggcgacatggaaagcaaggatcgagctcgtggattggaggccattaataaagatgggtcgtgcggtgaagaacaattgtagcagtacgtagcactatttgtactggagccagtgttgatcaacgttaggcgtaaccatggtatgtatcccatttttttccctccgttgtagagtacaggtactctatattcatttcaggcgcagtgcgaaggtagctggagcttgatgggtccatgtactactacactagtactcttatttattattcaatatgaagtatatattatattgtcttgctagataaaaaaaaaaaaaaaacagcggaattttaattccagatatatagacagattattaagt

SEQ ID NO: 3223 - DNA, 493 bp, Zea mays
  unsure (1)..(493): unsure at all n locations
  Clone ID: TF_LIB4759-100-A1-K1-D3
attgggtacctcgaggccggccgggatgactttccggcaggccgccgtcgatcgatggggggagcatccggaggcgaccacccgcagcagcacggcggcggcgacgatgggcacctgcagcaaggcggcggaggtgacatggtgatgccggggttccggttccaccccacggaggaggagctcatcgacttctacctccgccgtagggtggagggcaagcgcttcaacatcgagctcatcaacctcgtcgacctctaccgctacgacccatgggatctccctggtaaccataagccgccgctgccgctaaggatgtgaaccgctgctagctagctcctgctcataaggggatctgctggcatatgtgatttcatgcatgtgactttgttttcttttggnttccatctcgtgtgtgcctttatatctagcctgctttttgctctcttgctttactttacgtggatgctatgatggagaggatgttgtcctgaat

SEQ ID NO: 3224 - DNA, 982 bp, Zea mays
  unsure (1)..(982): unsure at all n locations
  Clone ID: TF_ZmC21253_4
cccagcgtccgggnagagtggtacttgtactgcctccacgaccgcaagtacccggcggtcctgcgcaccaaccgcgccacggcggctggctactggaaggccaccggcaaggaccgcgaggtccgcaatggccgcaacggcgtgctggtgggcatgaagaagaggctcgtcttctaccgggggcgcgcccctaggggccagaagaagagttgggtcatgcacgagtaccgcctcgacggcatctacgcccaccatttcctcctcgtctctacgaggttaaacttgggaattaccattcatccgtggccgctgttgtaaataatgatacttctgctcaagaggctgaatggcgcactattcgaagtatacttgatcagggcaagacaacaactacattgggaaaagtaaataatgataaagcaagaatcttgaagtgaaatttgatgtaagcctgtaaccactgatgtttcaagtttacctgaaaatgtcgctgaaatggaggaccaagttaaacgtaagaattgggagaacgaaatggttcttgaagatatgaaaagggaggaagatttgctgaaacaagttaaggaattatacaggaagcagaagcaagagctcatggattatgtcactcaaccagcagtgacacagacgtcacgtgattcgccagcaactcattcacccgcaactcctgggagtaatccgtttggagccaagctctccaacaagtggcgataacattttggtggcgtacatccctattttgttggggcttattgcctgttctggcatcagcacgacgtaactagcatttgccacaagcttggtgttagtttgtgagggtgataggctagtgaaattgttctgctgcttagcattgttggccctatggataccaattgatctatagacagccgggaacttggctaacttattatgactatggatgagacttttgtgatgtaattgatgagactattgattt

SEQ ID NO: 3225 - DNA, 1132 bp, Zea mays
  Clone ID: TF_ZmC7355_1
acctcactcgcgcgcacacccccccccaccccgctcaccccccccctccccgccccccccctccctctctcgccgcgccatcgccccgcgggccccgctcgacccgcgcggggacagacgcgtgggcacgcgcgcagtcactcacgcacgcccccagctctctccttctccctgctcgctcgctcgccatggacgctccgagcagctggaagagtcctgcgcgcgccaagtgaccggagaagctgcgagatcagagtagttgcttgccgctcccgtgccaccaaattagattggacgtagctagcagctagctgagccgtagtgcgtagcggcagctaggctgctagctcgatcgttatagctgcgtactagtggtgtcgcagcagaagcagtagccagcttcagtagccgatccggtggtaaaagcaactttttttggacatggcggcggagggagccccggtgctggtgaggcatgctggcggcgtggaggagctgcggcagctcccgccggggttccggttccgccccacggacgaggagctcgtggtgcagtacctccggcgcaaggccttgggcgcgccgctccccgccgccgtcatccccgtcgtccgcgacctctacagcctcgacccctgggacgccgtcgacgtgccggccgcccctgatgcgagcagccaaggcgagagatacttcttcgcggtgcggccggcgggcggcgtcggaagtgctaggagggcgaccgcgagcgggcggtggaggccggcggggaaggagaagccggtggccctgccccgcccgtgcggcggcgggagcctcctggtgggcgtgaagagggcgatggcgttcgttccccggcggaagaagaagaaggcggcggcggcggcggccctggcgatcggctgggtcatgcacgagtaccgcctcgccgcgccgctgcacaagcacggctgcagcctggcccaggctcagggagagtgggtcgtctgccgcgtcttccagaagggcagcggcaggccgaggaggaggaggcaacgaccggtgtcaccgtcaccgtcgtccgctagcagctgcgtcacggacgggtcgtcgtcgtcgagctcggacatggacgaggtcagcagctagctaa

SEQ ID NO: 3226 - DNA, 545 bp, Zea mays
  Clone ID: TF_ZmC7355_3
tgcgcgcgccaagtgaccgaacaagcttgagctctgctgcttcagttgcttgcccctgtgccaaactggcaggaggtaggtagcttatagcagctagagctaagctgtggtgcgtagcggcagctagagctagctagcagtgcacgcgcaggtgcgtgctagctagctcgttagcggtgtagcagcagcacagtagcagtagcctagccggtgataaaaggaatttctttggggacatgtcggcggagagagccccggtcctggtgaggcacggcggcggcggcgtggaggcgctccggcagctcccgccggggttccggttccgccccacggacgaggagctcgtggtgcagtacctccggtgcaaggccatcggcgtgccgctccccgccgccgtcatccccgtcttccgcgacctctacagccgcgacccctgggacgtcgtcgccgtctctgcccctgatacgaggagcgagggggagaaatacttcttcgcggtgcggccggcaagcgacggcaagagcagcggcgctggtactggtagc

SEQ ID NO: 3227 - DNA, 554 bp, Zea mays
  Clone ID: TF_ZmC545_18
acgctcgggatcaagaaggcgctcgtcttctacgccggcaaggcgccgcgcggggtcaagacggactggatcatgcacgagtacaggctcgccgacgccggccgcgccgccgccgccaagaaggggtcgcttaggttggatgactgggtgctgtgccggctgtacaacaagaagaacgagtgggagaagatgcagctggggaagaccgccgtcgccggcgtcggcgccaccaaggaggaggcgatggacatggccacctcgcacacgcactcccactcccaatcacactcgcactcgcactcgtggggcgagacgcgcacgccagagtcggagatcgtggacaacgacccgttcccggagctggactcgttcccggcgttccaggacccggcgatgatgatgacggtgcccaaggaggagcaggtggacggctgcagcgccaagagcggcaacctgttcgtggacctcagctacgacgacatccagggcatgtacagcggcctcgacatgctgccgccgcccggggaggacttctactcctcgctcttcgcgtc

SEQ ID NO: 3228 - DNA, 778 bp, Zea mays
  Clone ID: TF_ZmC1509_2
attgggttgcgtccccccgggcgggggtttctcttgatcgctttgtcacttgaatccgtgcctgctctaacagagagcggagacgaccacgacgacggcgaggccaggctctgcgatggagcaggagccgcaccggcccatggagctgcccccgggcttccgcttccacccgaccgacgaggagctcatcacgcactacctggcccgcaaggccgccgacgcccgcttcgccgcgcttgccgtcgccgaggccgacctcaacaagtgcgagccctgggacctgccatcgctggcgaggatgggggagaaggagtggtacttcttctgcctcaaggaccgcaagtacccgacggggctgaggaccaaccgggccacggaggccgggtactggaaggccacgggcaaggacagggacgtcttcaggggcaaggcgctcgtcggttccaagaagacgctcgtcttctacacggggagggcgcccaggggcgagaagtccggatgggtcatgcacgagtaccgcctccacgccaagctccacggccacggccacggccaaggcgcagccgtcgtcgtcgtccccaaggccgccgggtccaagaacgagtgggtgctgtgcagggtgttcaagaagagcctggtcgtaggtggtgcagctgcagcagcagcaccaaccgcaggcaagaggggcggcacggagacgtcgtccaactacaagacgggcgacgtagcggccatcgcccacctccctccgctgatggacgtgtccggctccggcgct

SEQ ID NO: 3229 - DNA, 792 bp, Zea mays
  unsure (1)..(792): unsure at all n locations
  Clone ID: TF_ZmC1509_3
ttgggaccctcgaggccggccgggggcggctcttgatcgcttcgtcacttgaatccgtgcctgctctaataggaggctctgcaatggagcaggagccgcaccggcccatggagctgcccccgggcttccgcttccacccgaccgacgaggagctcatcacgcactacctggcccgcaaggccgccgacgcccgcttcgccgcgctcgccgtcgccgaggccgacctcaacaagtgcgagccctgggacctgccatcgctggcgaggatgggggagaaggagtggtacttcttctgcctcaaggaccgcaagtacccgacggggctgaggaccaaccgggccacggaggccgggtactggaaggccacgggcaaggacagggacgtcttcaggggcaaggcgctcgtcggctccaagaagacgctcgtcttctacacggggagggcgcccaggggagagaagtccggatgggtcatgcacgagtaccgcctccacgccaagctccacggccacggccacggccacggccaaggcgcagccgtcgtcgtcgtccccaaggccgccgggaccaagaacgagtgggtgctgtgcagggtgttcaagaagagcctcgtcgtaggtggtgcagctgcagcagcagcaccaaccgcaggcaagaggggcggcacggagacgtcgtccaactccaagacgggcgacgtagcggccatctcccacctccctccgctgatggacgtgtccggctccggntcccgnngccgnncgccgcggcggcggcacacgtgacctgctt

SEQ ID NO: 3230 - DNA, 804 bp, Zea mays
  Clone ID: TF_ZmC1509_4
gggaacacgacttcttcagtgctagctctatctatctatctattggtctagtgcgctttgtaccctacttgcgtgcctgctctaacagagagcggatcagcggagacacgacgacgacgacgaagccaggctcaggctctgcaatggagcaggagccgcaccggcccatggagctgcccccgggcttccgcttccacccgaccgacgaggagctcatcacgcactacctggcccgcaaggccgccgacgcccgcttcgccgcgctcgccgtcgccgaggccgacctcaacaagtgcgagccctgggacctgccatcgctggcgaggatgggggagaaggagtggtacttcttctgcctcaaggaccgcaagtacccgacggggctgaggaccaaccgggccacggaggccgggtactggaaggccacgggcaaggacagggacgtcttcaggggcaaggcgctcgtcggctccaagaagacgctcgtcttctacacggggagggcgcctaggggcgagaagtccggatgggtcatgcacgagtaccgcctccacgccaagctccatggccacggccacggccaaggcgcagccgtcgtcgtcgtccccaagcaggccgccgggtccaagaacgagtgggtgctgtgcagggtgttcaagaagagcctcgccgtaggcggtgcagctgcagcaccggccgcaggcaagaggggcggcacggagacgtcgtccaactccaagacgggcgacgtagcggccatcgcccacctccctccgctgatggacgtgtccggctccggcgctg

SEQ ID NO: 3231 - DNA, 740 bp, Zea mays
  Clone ID: TF_ZmC1509_5
ttgggtacctcgaggccggccgggatctgtctatctatctactggtctagtgtattgattactctacttgtcggctgtggcgcacagagagcggagacgaccacgacgacggcgaggccaggctctgcgatggagcaggagccgcaccggcccatggagctgcccccgggcttccgcttccacccgaccgacgaggagctcatcacgcactacctggcccgcaaggccgccgacgcccgcttcgccgcgcttgccgtcgccgaggccgacctcaacaagtgcgagccctgggacctgccatcgctggcgaggatgggggagaaggagtggtacttcttctgcctcaaggaccgcaagtacccgacggggctgaggaccaaccgggccacggaggccgggtactggaaggccacgggcaaggacagggacgtcttcaggggcaaggcgctcgtcggttccaagaagacgctcgtcttctacacggggagggcgcccaggggcgagaagtccggatgggtcatgcacgagtaccgcctccacgccaagctccacggccacggccacggccaaggcgcagccgtcgtcgtcgtccccaaggccgccgggtccaagaacgagtgggtgctgtgcagggtgttcaagaagagcctggtcgtaggtggtgcagctgcagcagcagcaccaaccgcaggcaagaggggcggcacggagacgtcgtccaactaacagacgggcgacgt

SEQ ID NO: 3232 - DNA, 857 bp, Zea mays
  Clone ID: TF_LIB4743-023-Q1-K1-B5
cattgggtacctcgaggccggccggaatatcctttgcacctgcgctgatccgttccaatcgatcttgcacctcctcacctcctcagctcggcgcctcagctgatcatggggggagcttctgattctaaccttcttccccctggcttccacttcttcccgtcagacgaagagctcgtcgtccacttcctccgccgcaaagcctcgctcctcccatgccagccggacatcgtgcccacggtgtgcatgaatcaccacgatccatgggaactgaatggcaaagcgcttgaggctggtagccagtggtacttcttcagccacgcgaagcaaagtagggccacgccgaacgggtactggagctctgtttgtgctgacgagacggtgctgagcggcggcggcggctgcagcgtcgtcgtcggcctgaagaagacgctcgtcttctccactggagagccctctgatggggccgaaacaaactggatcatgcatgagtatcacttgctggatgggaggacggggggtagcagcagcagcagtagcgcttcatcaatccatagttcgagcaagaaatcgcatcacccaaacacagagttcagtaactgggtgatatgccgagtgtttgattcgacgggcggcgggtcgcaggcgaactgccatgacgacgagggcatggagctttcatgcttggatgagttgttcctatccctcgacgactatgatgaagtcagcttgtcaagtaattagaagcctagtatcaccagaaccggcagtactagtaggcgctccctacgaattttacagaagatcaaatgattccataggtgtgtttagcccttaacactgcgtctaattaaacacag

SEQ ID NO: 3233 - DNA, 1418 bp, Zea mays
  unsure (1)..(1418): unsure at all n locations
  Clone ID: TF_ZmC22900_1
cgcctgctttttttttttgttctctcatctcgctcatatatatcctttgcacctgcgctgatccgttccaatcgatcttgcacctcctcacctcctcagctcggcgcctcagctgatcatggggggagcttctgattctaaccttcttccccctggcttccacttcttcccgtcagacgaagagctcgtcgtccacttcctccgccgcaaagcctcgctcctcccatgccagccggacatcgtgcccacggtgtgcatgaatcaccacgatccatgggaactgaatggcaaagcgcttgaggctggtagccagtggtacttcttcagccacgcgaagcaaagtagggccacgccgaacgggtactggagctctgtttgtgctgacgagacggtgctgagcggcggcggcggctgcagcgtcgtcgtcggcctgaagaagacgctcgtcttctccactggagagccctctgatggggccgaaacaaactggatcatgcatgagtatcacttgctggatgggaggaaggggggtagcagcagcagcagtagcacttcatcaatccatagttcgagcaagaaatcgcatcacccaaacacagtaagatcaagctagctacttgtgcgtgtgtgtaggcagtaggcactactgtatttatacatgtatataactatatatacggcatgcatgattatcttgacaagggtaatataaaatacttccatgaccattacaggagttcagtaactgggtgatatgccgagtgtttgattcgacgggcggcgggtcgcaggcgaactgccatgacgacgagggcatggagctttcatgcttggatgagttgttcctatccctcgacgactatgatgaagtcagcttgtcaagtaattagaagcctagtatcaccagaaccggcagtactagtaggcgctccctacgaattttacagaagatcaaatgattccataggtgtgtttagccttaaacactgcgtctaattaaaccacagatgtggattgctctcctcatcaaattggagtcggtcgaggcacatgcatgtaacaagctgagttagttttatataaatatgggcatagtgtgtggataatctcctgtactacaaggttcgaggtatctatgttcgagcataaaaaggggatagacaaggcatgtataactctatttaatataagatctcttgagcgatctttagagagttaattaaaaaaacaagcaaataagacgacttgtttcattgattcttgaagagatcgagcttcttttgcaccacaaggtcgaggatgtcttgcaactgcggatcaagctgcggctgcggctcaagctgcaagtgcggcaagaagtaccctgacctgnaggagacgagcaccgccgcgcaggccaccgtcgtcctcggcgtggc

SEQ ID NO: 3234 - DNA, 1272 bp, Zea mays
  Clone ID: TF_ZmC1429_1
cccggccgccccaaggctccattagcagggccctgttgggcggcctctgcccacagcccctcctctctctctctaagacgggaaactgcagcacatattaattagtaactagctaggtagaagaagatgagctcgtcgatcagcatgatggaggcgagaatgcctccggggttcaggttccaccccagactggatgagctcgtgatggactacctcctacaaaagctctccggccatggccaccatgccggcgctgccatcgtcgtcgacgtcgacctcaacaagtgcgagccatgggacctcccagattccgcgtgcgtgggtgggaaggagtggtacttcttcagcctgcgcgaccgcaagtacgcgacggggcagcgcactaaccgcgccacgcactccggctactggaaggccaccggcaaggaccgcgccgtcgtcgtcggcggcgaggtggcggtggggatgcgcaagacgctggtcttctaccggggccgcgcgcccagggggaagaagacggagtgggtcatgcacgagttccgcctccacccccatgccgcgccgtgcctgctagcagcagctgcgccaaacaaggaggactgggtgctatgcagggtgttctacaagagcagaacaaccagcccaaggccagaatctgaagacgcccgggacggcaccccatcagctgaaccgcaactgccggctgccctgccgcttgcgcccctcgctgacacctacgccgccccaacggttgcagagcaggtgtactgcttctccggtctgccggcactgccattcagaagaccagtgagccttggggaccttctggagttcgacgcctccgagaaggaatctgtcacgacagcgatgaccagtgtctcgaacaacactagttcagtgctggagctggctccaaattgcaactggaaccaggaaaatggcatgtcacggatgtggagcccccttgggatatgagatagatctgtgttgtttgctggatctggatgtatggagtgttagtactgagtggccagtagggttctgctgcttagatttgattagcagtgtgacttgcagattgtgtagattagattatccgttattggactaatggcttggcgtagtatttgtacatattgctactgaaggaacagtgtccttatccttgtttggcgtagtatttgtacatagcacctgctaaacttcagacaatcagtgaaagacaaatgtgtacattgtaacatagtgttaagaaactctgagagttgctcc

SEQ ID NO: 3235 - DNA, 3798 bp, Zea mays
  unsure (1)..(3798): unsure at all n locations
  Clone ID: TF_ZmC26324_1
acgtacgcgtgggcgtacgcgtgggtttttatcgaaactagttctgacggacggtgattagtccgaactccggaaaaattttcagggaaatagaaagaaggattttggaccagtttcatttttttgaactaaagctcaacgtccaagactttaaagagaagtaatgatcttgttcaaaaatgaacagagaatgtattgccctttttttgggggagttagatgcatgagctgatcttctgggtccaggtgggctaaattctccctttcttcttcctgcattcctcaaaggcgacgtgaagttgtgagatctgggtctccttatgaattgagctggctaaccgtactttaccatttggttaagtccatcattgccaggtgagctgagctacgtactgccggcatgcacgcagccattgtgcaccgaccagtaacagtaaccatatgggctatggcatgcagcacacattcacccctctagctagcattaacatgggggacagaagcacagacgaactttagcccagagttggttggttgccactccgcttcaggggaaaaaaaaaattaagagtcagttgagacagataatcgcttctggcaaaagtactggcggcacaaacagtactgtacatggattagctgctaatcatgcagattcaggcacaggcatcgaggcagggaggcccccacctgccggcaaatctacatgggggtccgtgtgggaacgtgacgtaaaccgtcaaagggaaaaaggtgcggggaatcgagtaccaaccttgggcccctcaccctttccaacgggggagctgactaggcattgctctggtggcccacaaagcagccaatggccttccgatcctacagtcctgctgcggctacaccagctcgctttggctgccaaagacaagaagagaagattgggatatttctattctattcaccgatataaagctactgacgcaggacacagcaaaagcaaaagccaaagtttgagagagagagagagaggggtaatatagcttcatgtgaaagatgacaagaatcccagcataaaataatctcccaaactttgctataaagccacaacccctccccctcctcctttccctccctctctctccttcctcatgcgcgcgcctgccattagcccaggtctccttctccctcttgcctgtctactgcacctcctctttgttacattacatacgacgatctcggttaaatttctgcagcttacgtctctcttctatattttttttgtgtttcaggctgtgtacattatttgtagctgaccattcattcatatagagctagttgagcaggcctggttggctgtccataatttttgcttcggatagcattgctgccaggcgactgcaaagctccaagcagacttttgctgtgaggatttttttgcgaggaagggcagagggagcaatggcgccagtcagtttgcctcctggtttcaggttccaccccactgacgaggaactcatcatctgctaccttaagaggaagatcaacgggagacagatagagctcgaaatcattccagaggttgatctttacaagtgtgagccctgggatctgccagaaaaatcatttcttccgagcaaagaccttgaatggtacttcttcagccctcgggaccgcaagtacccaaatggatcgaggacaaaccgcgcaacaaaatctgggtactggaaggcaactgggaaggacagaaaagtgaactcgcataggcgtgcagttggtatgaagaagaccctggtgtactatcggggccgagctccacatggttctcgcactgattgggtcatgcatgagtaccgcctcgacgagagggaatgcgagactgacactggcttacaggacgcatatgctttgtgccgagtgtttaagaagacagcgcctgggccaaaaatcatagagcattacggcgcagtgcaccaccccatcgagcaaactcagtggatgggaagcagcgttgagcgctccccaacgctggacttgtccagtgatgttagaggcgatgacttcgacagcagcagtttctcgttcccgacagaggcgccaatggactcctccatgcatggtgggttgttcgggatgcagatgagtgcacctcacgaggatgccaaatggatgcagtttctgagcgaagacgcctttaacgcaaccaatcctttcttcacgaatccagcttcttccagcttctcatgcctcccatccaaggtggatgttgcactggaatgtgcaaggcttcagcacaggctctcattacctcccctggaagtggaggacttcccacacgacgtcagcctcgacacaaaggcgagcgtgctccgcagcagcaaccccaacaacgaggttgacatccttcaagagttcctctccgtggcgtcggcctcccaggagctaatcaacggcaccagcagcagctacgctgcagaaatgtgggcaggcgctggcacgagcagcaccagcggcacccactacgtcaacgaactatcttccctctttgagtttggggtgaaggctaaagaggaggccgacaatttctaccacatggactgcattggcacatctgcaggcttctcaccgaagccggtccgtgtcgatgaaccggttaggttggttgagatcgctgacatggaggagttcaaggaagagaagaggcgagtagagaaccttagaggagtgaggctgcacaacaatgacgacctaggagagattccaacagactgctgcatcacacaataccccatatcggacactgctgacatttcaggagaagccggtcacctgaccaatcccactagcgccggcggcctagacactgcacccatcttctcgcaatctcaacctgacgacttcgctattgggttcagtgacgacgccgaccccaacgcatctttcgacctatgcgagagggttgacgtcaagcatgggctcttcgtctcaacggtgggtgcgcccaagacgttcttccaccacgttgagccatcgaagaaggtcagcttccacctgaataataatcccgtagcaagcgacgacgacgtcagcaaggcgaccgggaagtcccgttcccccattattagtgtgatgacaaccaaagatagtggcagcagcttttctgtttttagcaagttgaaggcgctcatcagggacaaattcctggtgaagaagctgccttcatcgtgccagaggtccttgttaggcagcaaagaaacagcggcagtgagcgagctgctgcagatggtggtgtcgtcgctcctcttaacaccaacggaggtgacaggccccacgacgatgactaccgagcaagaagagttggccaggaaggcgatgaagccgggaccccgtcgttgtgatggaagccatgcgtggcttcttccactccccaaaaggagcaaaggcatttccagcatgttttttagtgggaaatgggcatttctgacatccgcattggccatccgcgctccaggtccagggtgcaatcactgaaagaaaggtcttccttctggtcatagctcgtgtaaaaattaaagtacggctctttataatgctactgcttaggaaactcgtatcgggtgccagtgcacgggacgcatagtctttcgtgcatcagacagttaacagcgggtgtataacgggagaaatgtcataattcgtatttattttttttattcgtctttgtattaacacgtctgaagtctagccccctgttgtacatcgaaacacatgcagttcataaattgaaattttaatttatccgnnnnnnnaaaaaaaaaaaaa

SEQ ID NO: 3236 - DNA, 213 bp, Zea mays
  Clone ID: TF_13150961
gcatgaaccatgggatttaccttcaaagtgyaatcttccaatcgaggrcaacaagttgcatttcttttcctctcgtkacaagaagtacccbactggstckaggkcaaacagggcaacactcgcyggttactggaaaacaactgggaakgaccsarccagaaarctgaagaagcgaacyctaggaacaaagaagactttagtctttcatgargg

SEQ ID NO: 3237 - DNA, 2962 bp, Zea mays
  unsure (1)..(2962): unsure at all n locations
  Clone ID: TF_ZmC151_2
gtgcggcgctcaggcggcggtgccggccggggccgggattcctcacacccacacaaaccgcacctcatccccgttgacccgacggtggcgctcatctcctccccgacggttctccccatcggcctgctggcttcccttcgtcttctccgacactgatcctcatcactcatgtctgctgaagttgccggaggaaacccttatttcctctcgtgctacttctggttcatatactgcataaaattccgagatttcacttgatacaagtggaacactaggagttttgtgcaaatacttcctaccatgtgaatcagttgtagctagtgaatttggcaagactcaagttctctcatctgggttcagaaaacatctgtcggttgattgcttggtctcctttttcctttgagtcttgccaaccaaagttttctctcagcatcagttgtggtctacgaactctttctgtgacttgaccaacatctcttttggtcctgtcaatcttgcaacactcccttccaaagacttgtctagaggctggattgccctgctctctgctggcgctgcatcctcctttagtcttccaagttttctctcggcagcagttgtgatctacgaactctttttgtgacttgatcaacatctcttttagtcctgtcaatctcgcaacactcccttccaaagacttgtctagaggttggattgccctgctctctgctggcgctgcagcctcctttagtcttcccttgctgcattctgtgctcactttcaaaagctgctctgttctgctctgctttgttgattggtgcacttggattctcttgtctgtgtaatcaagcttctctcttctggggcacaactagtcaccccattgaagcatttcagcttttgtcttgagatctttctatcagtgctaaaggcaaaagaggtcttagggcgatggcgcaaactagcctgcctcctggatttcgtttccacccaactgatgttgagcttgtttcctactatttgaagaggaagattatgggaaagaagcttattgtagacgctatatcagaggttgatctctacaagtttcctccctgngatctccctgaaatgtcctctccttcgaagcccccaatgcctagcattttcgatgtttttcctccccaatggggtcctcttaacagatggtccagcaacttcttgggcccagccatgcagttccctttttcatgattgggcagcttttgtcatggagctccctgttgttacaactctatcccccctgaacgtcaaggacgtcatttatgtcatgcctgggcccctgaaattttttgttgcttttttgaaccaaaccgcccttgggtggtatttttggaaacccacgcgtccgaaagatcttgaatggttctttttttgtcctcgtgacaagaagtatcctaacgggtctaggacaaatcgtgccacaccaaatggttactggaagactagtggaaaggatagaataattatgcttaactcccgcaccgttgggatgaagaaaacattgatatttcatgaaggcaaggcccctaagggcgacagaactgattgggtgatgtatgaatacagaatggaagatgaggatttggtttctgctggtttctcaaaggatgcttatgtactctgcaaaattttcaagaaaagtggccttggtccaagaatcggagagcaatatggggctccatttaatgaagacgaatgggataatgcagaagtcgaaacttctctgtttcctttgacttgttcagaagtgaatccaacagagggacaacgtgctcagcctactgtcctggctggtgctcttctggaacccgaaccacctctacataattcatcttctacatgtgctggagaggaatcatcatttggtcatgccactgctgaggacttaacttttagccatagtgttgctagctctgctatccaagatacacctgctcggatgtcaggagacggtgtggtttctgtgaacaacatatccaatgtggccaatgacatgcgtagtcctcgtgactgtgatgaatttctatcggagttgtctagatttatgaatgattctcctctgcgtaacactcctcttggagagtgctctggtcttcctccgatgtctgaagctgaggctcatgcttttgaagtcaactcttttggcctctacaatgaattatcagagcttgttgggttaggatgcgcggataacaacttaaacaccagcaatgtggaaactacggattatctcatgttgccacctgacagagaactgtcggctaatgattacatggaactaaacgatctccttgctcctgacccaagcttccccagtgaattttctgctcaggacaatcaatatatgcagcatcctcttgctcagtacaatggacattatgatctgtcaggtccttcggagccaacaatgcctagcattttcgatgtttttcctcccaataatggagtcctcttaacagatgatccagccaactacttggacccagccatgcagttccctttctcatgattggtcagcttttgtcatggagctcgctgttgctacaactctatccaccctgaacgtcaaggacgtcattgatgtcatgcctgggcccatgaaatcttctgttgctcttctgaaccaagccgaccttggctggtattcttggaagcacggtgcttggaacaatctgcatcgactgctgtatgctcccaactggttgagctaacggccaatctcggctcactctgctgaggagatcatagcctgtaaatctttgattatgctattacttgtgtgtgtcgcaacctgcctgattaccattgtcttgtgtttcgagttttgacaatatgcaaaccataataatgtcgtaatatggaactcgtttatcatgttatgtttaaaaaaaaaaaaagcccctaaaaccannnnnnggnnnnnnnnnnnnnnnnnnnnnnn

SEQ ID NO: 3238 - DNA, 398 bp, Zea mays
  unsure (1)..(398): unsure at all n locations
  Clone ID: TF_LIB4301-007-Q1-K1-B2
gtccggattcccgggtcgacccacgcgtccgcttccattagcgactaatccagccttcgttaagggtgattagaatttgattaatttcaaggcctcagatcggagattgaatggagtgcggtggtgcgctgcagctgccgccggggttcaggttccacccgacggacgacgagctggtgatgtactacctgtgccgcaagtgcggcggcctccccctcgccgccccggtgatcgccgaggtggacctctacaagttcaacccatgggatctccccgagagggcgatgggaggggagaaggagtggnacttnttctcgncgngggaccgggagtacccgaacgggcagngggcgaacagggcggnggggacggggnactggaaggcnacgggggcggac

SEQ ID NO: 3239 - DNA, 650 bp, Zea mays
  Clone ID: TF_LIB5116-032-A1-PF1-G7
gtgatcataagccgaatagcgggaaggaagaccctacaaagggagcagctaagagagctaagtgcaagtctgggacttaagctcgagcttccttctctctttaagtagctgcatgccatagttccctcatagttttgttcctcgctttggttgataaggaacaggcagtgcttagagctaggttatttaggttaggtcaatcttgtgttcaagtcgtcgagtgagatccctcttccacctccggtgatcagtagaaacccaagtcctagctagttcctgtccagtaaagtctcacctagcacatcagtcattagggtttagtacgctcctgataattagggctaaggttagcgccaccgatttgttttacggtggtaaagatatggaggagatcaggagtgatgacatggagaagcaagatgaagttatgttacctggcttcaggtttcatccaactgatgaagaactcgttcggttctacctcaagaggaaaatccagcagaagtctcttccgattgagcttattaggcagctggacatctacaagtttgatccatgggatctcccaaaactagcaagcactggagagaaggagtggtatttctactgcccaagggataggaagtaccggaacagcacaaggcctaaca

SEQ ID NO: 3240 - DNA, 1341 bp, Zea mays
  Clone ID: TF_ZmC232_1
ccaagcgcgacggatcccaatccatcttctcctcatcccccaccacgaccaaaaaaaatccggtcgccgatgccgtctgctgcctgacatcggtcagccagggtagatcgcgcaggcaggcaggcagccccacacacatacgaaacccaatcctgcttcgatcccgtcggccggcgatggagggccggcggccgggcgcgcccgtggcgggcctgcccatcggcttccgcttccgccccaccgacgaggagctgctgctgcactacctccgccgcaaggcgctggcctgcccgctccccgccggcgtcatctccgacgccgacctcgcgcgcctccacccgtgggacctcctccccgccgccgccgccgcaccaggtaccgtgcctctccatcacacccctccccgcattgccgctcgcgtcccttacctgacgagcacgcgcgaccgaattggatccaaccctgcagggggatccggagccgacgccgacggggagcgcttcttcttccaccgcccggcgacgcggtgctggcgcaagggcggcggcgcggccagggcggccggcaccggcgtctggaggccgtccggcaaggagaccctcgtcctgtccccgcgctgcaagcgccccgtcggcaccaagcggacgctcgtattctgcccccgccgcggccgcgcccgcacccactgggccatgcacgagtaccgcctcctccccgccggcctccacccctatggctgcgccgccggcgccggcgccaacgcgcctccgcccactaatgtgagctcccacggcggcgacgcggcggccgactgggtggtctgccgcattttcaggagggccaggccggcccaccgcgcccgccttggtggtggcgccagggaggaactagaagaggagcacgcggcggaggagagcccgtcgtccccgtcgtcctgcgtcaccgacgcctccgagaccctcgaccaggaagaggatgacggcgacgaagggagcagcagcagcaccgtcgcctcctctaactgagactgagtagaagagttggctaccccctgtcgatcagatcgcgggcgccatgttctaattgccgtagaagcctcatcatcagtacctagttgcaatcaatagagagacaagaagatcggcctccaacaaaccaacaaaaaaaaagagctaagcgctttggtggtatgttgctgttggagctcgtcgcgaatccatattgttaattagcgagaaattaatccgttcccccctccggcaattattaattaatcaccgttccctggttctcccacaatgtgttgctcattcgtcgaagcaaaacaatgccattcgccgt

SEQ ID NO: 3241 - DNA, 602 bp, Zea mays
  unsure (1)..(602): unsure at all n locations
  Clone ID: TF_LIB3592-100-Q1-K6-E5
ctgctctgcttcggtgctactcactgtgcagtgtgcacagccagccagcttcagcagagtccggctcggctgtcggctgcgagtcctgctcctgcaggaatggacaggcctgcgcaggcgcccacgcagctgccgccggggttccggttccaccctaccgacgaggagctggtcgtgctgtacctccgccggaaggccctggctcgcccgctgccggccgccgtcatccccgtcgtccacgacgtcgccaggctcgatccgtgggacgtcactggtgcgtactacgccgtgcgcgtgatttgcggatcgatccagagtttccctgattgcttggtgtaactaaaccgcgcaggggcgagcgaaggggagggctacttcttcagcctgcggcgagcgccggcgaccggccgcaggaggagggctgggagcgggtactggaaggccacggggaaggagaagccggtgttcctgcagtgcggcggcgagcagaggcagctgctcgtgggcgtcaagacggcgctcgccttccaccgncgtgagccgccgncgncgtcgtcgcggacaggctgggtcatgcatgagtaccggctcgccgtgccccg

SEQ ID NO: 3242 - DNA, 1146 bp, Zea mays
  Clone ID: TF_ZmC99_3
ggctggcagggttcggcgagcaggagcgctacttcttcacgtgcaaggaggccaagtacgtgaagggccggcgcgcgaaccgcgccacgggggccgggtactggaaggcgacgggcaaggagaagccggtggccgtggcggtccggggcgtgcaggggcagagccagagccagagccaggccgtgctggtgggcatgaagcgctcgctggtgttctaccgcggcaagccgccgacgggaagcaagacggagtgggtgatgcacgagtaccggctggcgggcgccgggctcgcgccgtgccgccgccgccacgccgacgccgacggagacggcgtggcgcgggcgccggccgagggctgggtgctgtgccgcgtgttccggaagaagggctccgccgccgtcgcgaggcggcccggcgaccgcagcgacggcgagggcgacgagagcgcgtgcggcggcggaggaggcggcgggcgcgggttcatcgacttcttcgcgcgcgcggacgccgccgggcgaaggcgccgcgctccgtcgcccgccgtgtcgagccggtggcttgcggacgcgtcgccccagccggagcaggaggccaccagcagaggcccgtgacgagacaagggccggccggctggctggcgtgaagcgatcaagcaaggtagagagagagagagagggaagcttttgttgcattggcagtacctaatgaggggagggtccagtacagtaggtaggagcaaagtgaattcgttttagcaacgtgagagagagaggcccgatagtcagtgcagtatcagttgttgagcgtagatggtgaaactaatgtagcagctcagttgtactcctcccaaccacctgatgaatcctacacaattgtagagtgtggctgcagcaaatcccggccatggcaccggagctcctccaggaacgcaagtccaccagctgctgctgctgcttgccatggcggtggcggattgctagtgctaatgttccacaggctgttgattgctgagaagcaagtggcgggggtggtggcgggcagcagacggaagatggcgggtgtctgatactggtggtggtggtagtagtcgtgcgtaatctgttgcctggacttggacttggtttctttaatgcaattatgacgatg

SEQ ID NO: 3243 - DNA, 751 bp, Zea mays
  unsure (1)..(751): unsure at all n locations
  Clone ID: TF_ZmC175915_2
nggtttcttagctcgccctgtacctgctgctgactcctgatctcggtactactgctgtctgtgcagggatggcgctgtacggcgagaaggagtggtacttcttctccccgcgggaccgcaagtacccgaacgggtcgcggccgaaccgcgccgccggcgccgggtactggaaggccaccggcgcagacaagccggtgggcacgccgaagccggtggccatcaagaaggctctcgtcttctacgccggcaaggcgcccaagggcgacaagaccaactggatcatgcatgagtaccgcctcgccgacgtcgaccgcaccgcccgcaagaagaacaacagcctcagggtacgttgcgatcgatcgagttccggccggcgcgtccaccagaatatctcattcgtttctgtgcagaaaattatctcttgctcgtatatattattatttgttaataatatatatctcctgtcactgccgtatcaacaaagaaaaagttgagataagaacgtaacgtatggatcacaaagaataattattagcagtcggattttcactagctagctagtcgccgataaaaaggacggcgagacccatttctctccggtgtgaaccctggagatgctgcgccgtgcgtcatctccttcaaccgccaattatttcttgcgcttttgcgagctacgacagcgatccgatacggtcgaaagcgacgcatcaatagtgcctatacatttcatcgcactagttctagatcgcga

SEQ ID NO: 3244 - DNA, 550 bp, Zea mays
  Clone ID: TF_ZmC545_19
acgggacacacacgcagatccgagctaaccaccatcgacgagcgccagccgccagcagccgagccggagcgaccttttcttttttcttttacacagcgggacagagaaaggagtcaggcagccaaagccacccaccgcttttaccgatcggcgttgccgccaccgctagcattgtcggcttcagctccatccaaatccaccgccagcaagcaagccggcgccatgggtctgccgatgaggagggagagggacgcggaggcggagctgaacctgccgccggggttccggttccaccccacggacgacgagctggtggagcactacctgtgccgcaaggcggcggggcagcgcctccccgtgcccatcatcgccgaggtggacctgtacaggttcgacccctgggacctgccggagcgcgcgctcttcggggcccgcgagtggtacttcttcacgcccagggaccgcaagtaccccaacggctcccgccccaaccgcgccgccggcaacgggtactggaaggccaccggcgccgacaagcccgtcgcgccgc

SEQ ID NO: 3245 - DNA, 746 bp, Zea mays
  Clone ID: TF_ZmC2195_14
aggattgacattcgttctcatctatgtagtattcatgcataatccactcagtacgttttccagtgggaggccgaccttcatgaaaaactaaagttttctttgttcctatggtcctcttatccaccttaatggcccggtcttttccagtagacttccaatacccagcaaccgttgccctatttgaccgagcaccattaggatactttctgtctcgagcagcaaagaaatgccacttgttatcctgtgttggaacattgcacttcgcaggtaaatcccatggttcatgcttgtatatatccacctctggtataatgtcatattcaattttctgaccaagtattttctttttcagatagtgagcaacgagttcagtgtccttaggatggaatccaaatcctggtggcagagccatgtcacgtagagtttccattgtatatgatctgtggtgcggagagcagagccgcgccggcgccgggacgtagccccgaccgatcgatcggaggggagagcggtaaccagcagggggaagccggagctggggccacggacggaagacggcgggcggaaggggatcgcggaagaggcggtggaggcgaagaggccgaggcggtcgcaggaaccggtcaagtctttgtgagggctggctggcgggtggggggggcggccgcggcgtggtgctgtgtctcttgccagcagacgcagacgcagcgaggggggggctggaaaagggaatgggatgcgggcag

SEQ ID NO: 3246 - DNA, 631 bp, Zea mays
  Clone ID: TF_LIB4741-044-R1-K1-H12
ccctccggcctcccgtccagcccccttgccttctttctcagctcacctctctctttacgcacgcctctctctctctctctctctctctctctctctctctctctctctctccttatctgtcctgaggcagccatttcctcttccgatcgtggagaggcttggagtggaaggaggctgctggttttcggcacggcggagatgtctgaggtgtcggtgataaaccaggcggaggtggaggacgcgggcgccgggcagctgatggacctgccgccgggcttccgcttccaccccaccgacgaggagatcatctcgcactacctcacccacaaggccctcgaccaccgcttcgtctccggcgtcatcggcgaggtcgacctcaacaggatcgagccatgggacctgccaggcagggccaagatgggggagaaggagtggtacttcttctgccacaaggatcgcaagtacccgacgggcacgcggaccaaccgcgccacggagaccggctactggaaggccaccggcaaggacaaggagatcttcaggggccgcggcgtcctcgtgggcatgaagaagacgctcgttttttaccgaggccgcgcgccgcgcggggagaagaccggatgggtcatgc

SEQ ID NO: 3247 - DNA, 786 bp, Zea mays
  unsure (1)..(786): unsure at all n locations
  Clone ID: TF_ZmC13043_3
ccgggggaaatgtagctcgaggctgactgggatctctctcgggactttccccaatccactccactccaatccccttcccccctctgtcaaccctagccgcgccgccggcagtctgctcgggtggcgcatacatgacccacccttcctcgccgtcgtcctccgcgccgccaccgccgcccgccgcggcggcggcagcggcggcggccgaggccacctccctcgcgccgggtttccgcttccaccccaccgacgaggagctcgtctcgtactacctcaagcgcaaggttctcggccgcccgctcaaggtcgacgccatcgccgaggtcgacctgtacaagctcgagccctgggacctgcccccgcgctcccgcctccgctcccgcgactcccagtggtacttcttcagccgcctcgaccgcaagcacgccaaccgcgcccgcaccaaccgcgccacgtcgggagggtactggaagaccaccggcaaggacagggaggtgcgccatgggcccagggtcgtcgggatgaagaagacgctcgtattccacgccggacgcgcccccaagggcgagcgcaccaactgggtcatgcacgagtaccgcctcgagggcgacgccgccgtggagataccgcaggactcgtttgtggtgtgccggatattccagaaagctggcccaggtcctcagaatggggcacagtatggagcgccgttcgttgaggaggaatggggaggagacgatgcanatgtgggtttgcttccagtggnaggtgatgctgctgtcgaccctg

SEQ ID NO: 3248 - DNA, 487 bp, Zea mays
  unsure (1)..(487): unsure at all n locations
  Clone ID: TF_LIB3595-041-Q1-N6-B1
atctgaacaggttaggctaaaaattaactaagggtagacgaatgttcataaacggagacactactggtatatacatctctttcatgagctgggatatcacatactcctacgacacatgcacattattatttttatctggagaagcggacactgggaggccctggctaggaggaccagaactagtggtacttatatcagcacaaggacaagaaggacccgacgggcacccagtccaaccgcgccattgacgcctggttctggaagggaaccgcttgagcaaacacatttacgcatcaacttgcgaggggcggtgtgcttgatgaacacgctggtgtactacaacggcagagcttcctttggccactagntcgattggatcatgcaccattaccgcctgcaccaagggtgccaacgtacgttagtttatccagccgtgatgctccatgctggactgcaccttaagatggaaccttcctgcatgacctta

SEQ ID NO: 3249 - DNA, 673 bp, Zea mays
  Clone ID: TF_LIB5116-070-A1-PF1-B2
aaaaaaaaaaaaaaaaaaaaaaaaaaaaattcccattcatacctcgctttgctttcttgtgcacccaagcaagcctccttgctcttcttcttcctccttccgaccgatctcactcctagccagcttagcttgatcgagagagcgagcatggtggagagcgtagcagcaagtccgtcggaggagcaaggccgcggcggcggcctgtcgctgcctccggggttcaggttccaccccaccgatgaggagatcatcacgagctacctcctgcgcgagttcctcgaccctagcttcgtctcccgcgccgtcggcgaggtcgacctcaacagctgcgagccacgagatctcccaggcaaggccaacaagggggagaaggagtggtacttctttgtgcacaaggacctcaagtaccccaccgggagccgggccaaccgcgccaccaaggagggctactggaaggccaccggcaaggacagggagatcttcaagccccgcgcccgcgagctcgtcgggatgaagaagacgctcgtgttctacacgggccgcgcgccccggggcgccaagtctgagtgggtcatgcacgagttccgcctcgaaggcaagtccagaggccaaaccatgaacaatcccaaggacgaatgggtcgtgtgcaaggtgttcaacaagaagggggagg

SEQ ID NO: 3250 - DNA, 941 bp, Zea mays
  unsure (1)..(941): unsure at all n locations
  Clone ID: TF_ZmC5878_1
ccttgccttctttctcagctcacctctctctttacgcacgcgtctgctgctctctctctctctctgtctctatctctctctctctctgtacgtatctgtcctgaggcatccatttcactgttgcagatcgtagagaggcttggagtggaaggaggctgctggttttgccagtccaagcccccttgccttctttctcagcccacctctctctttcacgcacgcctctctctctctctctctccctctccctatctgtcttcctgcctgaggcagccatttcctcttccgatcgtggagaggcttggagtggaaggaggctgctggttttcggcacggcggagatgtctgaggtgtcggtgataaaccaggcggaggtggaggacgcgggcgccgggcagctgatggacctgccgccgggcttccgcttccaccccaccgacgaggagatcatctcgcactacctcacccacaaggccctcgaccaccgcttcgtctccggcgtcatcggcgaggtcgacctcaacaggatcgagccatgggacctgccaggcagggccaagatgggggagaaggagtggtacttcttctgccacaaggatcgcaagtacccgacgggcacgcggaccaaccgcgccacggagaccggctactggaaggccaccggcaaggacaaggagatcttcaggggccgcggcgtcctcgtgggcatgaagaagacgctcgtcttctaccgaggccgcgcgccgcgcggggagaagaccggatgggtcatgcacgagttccgcctcgagggcaggcttccccagccgctcccgcgctccgccaaggacgagtgggccgtggtgcaggtgttcaacaaggagctgcangcggcgaggagcgagccactattnnggcgcggccggcngcgcggaactcgagcgcgtgggctcgctgggctt

SEQ ID NO: 3251 - DNA, 672 bp, Zea mays
  unsure (1)..(672): unsure at all n locations
  Clone ID: TF_ZmC3395_2
ggccggcggggagaagncggtactcgtgcatgacccagtcggtgcgggcgccgccgccgccacggcggcgcgggcagaagacgagcgtccgcttggtgccgacggggcgcttgcagcgcggcgacacgacgacggtctccttcccggacggcctccagacgccggcgccggccgccctggccgcgccgcctcccctgcgccagcaccgcgtcgccgggcggtggaagaagaagtgctccccgctggcgtcgtcggcggctccccccgcaggtggtgcggcggcggggaggaggaggtccgacgggtcgaggcgcgcgaggtcggcgtccgggatgacgcccgccgggagcgggcaggccagcgccttgcggcggaggtagtgcagcagcagctcctcgtcggtggggcggaagcggaagccgatgggcaggcccgcgacgggcgcgccggggccccgctgctgcaggcgccacgcgccgggccgggcctccatcgccgccgccgccgatcgacgggatcggatcaggattcggttttggatttgtttgggtggcttgcgcgcgatctgcctgggtgatcgatgtcagacggtaggcggcatcggcgacctggtttttgtggcctggtgggggatggggggattctcgtcgtcgtgggaggagcgccggccgg

SEQ ID NO: 3252 - DNA, 1329 bp, Zea mays
  Clone ID: TF_ZmC16864_1
ggtcgtctaaaaaagcagcagctgctcttctcttctgctagcagctttatttgcctgcctccctaccggcgagggaggtacgtgcgccgatcgagaagcagcagcagcaattaataactaaacatggatcaggcggcggaggagtcttgtgttcccccaggcttcaggttccaccctacggaggaagaactggtgggctactaccttgccaggaaggtggcctcccagaggatcgacctcgacatcatccaggaggtggatctctacaggatagagccatgggatctgcaagagcggtgcaagccgcagcacgccggcggtgggcacgacgagcagacacaggagtggtacttcttcagctacaaggaccgcaagtaccccagcgggacgaggacgaaccgcgccacggcggccggcttctggaaggccaccggcagggacaaaccggtgctgtcgtcgtccaccaggaccaccaggtgtagcagggtcatcggcatgaggaagacgctggtgttctacaagggcagggcacccaacggcaggaagagcgactggatcatgcacgagtaccgactccaatccaacgagcacgcaccggcgcaggaggaaggctgggtggtgtgccgcgctttccagaagcctatccccaaccagcggcccttcttccccaccagctacgccggctactacgaccacaacctctcaacgacggcacggctgcacgtagacggcgaccgccatttcctggcgggctcatcagcagcagcagcagcactgctacagcagccaccagggcttgcaggcagcagcttcccgcagctgtactccgacgacgacttggagtccaagaagcagctgttgagtatcccgccgctggagagccccactgccatggcctgctgttccgacgccggcggctacgcgcagagaagcagctacgatgaacatgagatgatgatgatgatgatccagcagggaggaggaggaggagagcaagctgcagccgccatcgactggaactttctggacagcctgctgtccgcgacgtcgcaactccatgggccctcgggatccttgttgcagtgacctccggccatcgtcgatcgatccatctttctttgatccagcggagaacattattcattcatcggcattatacaatatatttattagttgcatacacacacagagtatacgtatatgctaataattcagatgtgttcatacacacttccattgtcatgtgtagttcgttgcgacttacattacagactgccttagatgattcaggtatactgtatacaacatgatgcacagtatagtaggagt

SEQ ID NO: 3253 - DNA, 745 bp, Zea mays
  Clone ID: TF_ZmC593119_1
cgaggccggccggggatccgctaccaagatactcctgcaccgattaataaattcatgcagctctataatttatttgcataaagcagcgagagctcgatcatcatcaggaactatctacccccttcaatttgcagccgcaaataatctatcggtcgtcgtcagcttgcgagcgacaaggcgcgacagatcgagatgatggaaagcagtggtggtagtggcagcagtgatccgttgctgctggcgccgggattcaggttctacccgacggaggaggagctgctgaccttctacctccggcaccgccttgccggcaccaagcccgtcgtcgagcacctgatccccgtcatggacatctacggctaccatccctccgagctccaggcgatggccggcgcggcgaacgtgtgcgacacggagcagtggttcttcttctgcccccgcgcggagcgggagctgcacggtgggcggcccgcgcgcaccacgccgtcgggctactggaaggccactgggtcgccgtcctacgtctactcctcctcgcccaacaaccgggtcatcggggagaagcgcaccatggtcttctaccagggccgcgcgcccaccggcaacaggacccgctggaagatgaacgagtacaaggccgtcgccgacatgtgcgccgccgccgcccggggcgcccgtcatgctgcggaacgacttcagcgtctgccgggtgtacatcagcacgggcacgctgaggtccttcgac

SEQ ID NO: 3254 - DNA, 356 bp, Zea mays
  Clone ID: TF_jC-zmX700098954b1
tctctggtacttcatctgacacaaggaccgcggggaccttaaggggatgcgcggcatcacagccaccggcagcgggtactggaaggccacaggcaagaacaaggagatcttccatggcaggagaaccagccgcgtgctcgtcagaaagaagaagacgctcagcttgtacacaggtcatgcaccgagcggaggcaagactatgtgggagatgcacgagtgccgccttgagggcagtctgtcgcccaacctgcaccgtggggacaaggacgaatgggctgattgtgaggttatcaacaaagactcggcggccaaggttggatagcaacaaatggtgcgcgccatacgctgattacgag

SEQ ID NO: 3255 - DNA, 440 bp, Zea mays
  Clone ID: TF_ZmC232_4
ccgtccgacgaaacccaatcctgcttcgatcccgtcggccggcgatggagggccggcggccgggcgcgcccgtggcgggcctgcccatcggcttccgcttccgccccaccgacgaggagctgctgctgcactacctccgccgcaaggcgctggcctgcccgctccccgccggcgtcatccccgacgccgacctcgcgcgcctccacccgtgggacctcctccccgccgccgcaccagggggatccggagccgacgccgacggggagcgcttcttcttccaccgcccggcgacgcagtgctggcgcaagggcggcggcgcggccagggcggccggcaccggcgtctggaggccgtccggcaaggagaccctcgtcctgtccccgcgctgcaagcgccccgtcggcaccaagcggacgctcgtattctgcccccgcccggcc

SEQ ID NO: 3256 - DNA, 1405 bp, Zea mays
  Clone ID: TF_ZmC566_1
ggaaacgcgtgaatcgatggccatgtaaagcggcggttccccgtgcccaatgcctcaggttcctattccatctcgaattcggagtcttctctcgtccctgtccccctccagcaccgccgccgccgccaccgcgccgcaacctcgccatggcacgccctccgtcggcggccctcaagccgccgtatccggccttccaatcccatcccagcgatctcgagctcgtcaacttctatctccgtccctgggtcgagaccggcgtcaagaccggcgcgttcatccacgacgcagacgtgtacgccgctgaccccaactacctcacccgtcagttcgcgccggcggtggcccaggacggcgagcgggcgtggtacttctacaccccgctgcgccacaagagcgtccacgggacgcggaagacgcgcaccgtggccaccggcggcgggtgctggcacaacgaggcgaaagctaggcccgtgtacatggtctccaacgggatgcaccagattgcgcatcgccagagcttctccttcgtcgagaaggatggcggcgtgcgggtccgcacgggttggctcatgatggagctccgcctcgtcgaggacggcgccgccgggcagaaaccggaggaggacggcgccctcgggagtcgcgtcctgtgcaaggtgtaccgcagcccgcgcaaccccgagccaagcggcatcgaagccgcgacggcgcccgggcagaaggcggaggcagacgacgatgaatcttgcgacgacgaatctagcgacgcgacgttggacgacgatgacagctccaacgcgtcactagcggcggcatcgggacccaagagggaatccgacgaggtggaatccagcgacgcgacggtggcggcacctagtcgccatagcgcgccgaacgacgagatctccggccggtccgcggtggcgcccggacgcaaggaaaagacggagatcggggaggtctccaccgagacgtccgcggcggtgcgcaagaggagaaaggccgacggcagcagctcccctggcactccggtttctacgacggatatgcactgccctcagtgcggcacccatctcatgctaacactgaacatggcggagtccaaatcggaaacggggctcgcgaaggacgagtcggccaccgccgcgcctgatcaaggcgggacgggtgagtcttcacagaaggatgttcgggttcggttccatcagttcctgtgagatccagggttccttcctgcccagacaaatcctgggaaacagagccatggtttcttgtctgttatttggaagaacgaaataagaagattttagattaagaattcgttagaagtaaccgtgtctattgctgcaacggtgatgtaatcgtgaaaccaagacataaggcgtacgaatttacacagtcatgc

SEQ ID NO: 3257 - DNA, 1058 bp, Zea mays
  unsure (1)..(1058): unsure at all n locations
  Clone ID: TF_ZmC151182_1
tttacatcgattcgcgcgaagcgggccggtcggccggcgaggaaagggtggtggtgcggcgcgaagcgttttggcccggtgctccagtaccttgcagtcggcgtgtgctacacggagtgtgtgaagccgccggcgcagctttctttggcacgagcacgaccgcacgaggcaagctcagcgaggtttgcttgacgtctaccagctgcataataacttgactcagaagaagaagatggacgctttcacacatgttcctcccggntttcgtttccaccctaccgacgaggaactcgntgattactaccttaggaaaaaggnagnactgaagaagatagatttggatgtgataaaagatgtggatttgnacaagattgagncttgggatctgcaagaaaagtgcaggattggaagcgaagagcagaacgagtggtacttcttcagccacaaggacaagaagtacccaaccggnactcgcaccaacagagcgacgacggncggtttttggaaggccacggggagagacaagncgatctacgtgaagaactgcctcgttagggatgaggaagacactggttttctacaaaggccgggcgcccaatggacagaagtcagactggatcatgcacgagtatcgcctggagaccaacaacaatggaattccacatgaggaaggatgggttgtatgcagggtgttcaggaagcgactcgcgactgtccaaagaatggtcggggactcgccttactggttcaatgaccacgcggggttcatggcgccggagctcggctcaccgaggcaggcggcgcaccaccagcagaacgtcatgatgtaccacaggcaacagagcagctacagctacccttgcaaggtggagctggagtaccaccacctccttccccaggagcacttcctgcagcagctccctcagctggagagccccaagctccctgaccttattggccaagtagacactactctccagccagcatgcggccttacacaggagcatggtgcccctcgctacaccctgcaggagcttcaggccgagcctctctatctg

SEQ ID NO: 3258 - DNA, 584 bp, Zea mays
  Clone ID: TF_LIB5117-066-A1-PF1-B2
attttctctcaacactccccttcgatccatccgttgccgattgagtccatatcatcatcatcagttccaaaagagggaaaaggaagtgatggagcacagcgagcaggagcagcacgccatggacctgccgccgggcttccgcttccaccccaccgacgaggagctcatcacgcactacctggccaagaaggtcgccgacgcccgcttcgccgccctcgccgtctccgtcgccgacctcaacaagtgcgagccctgggacctgccatcgctggctaggatgggggagaaggagtggtacttcttctgcctcaaggaccgcaagtacccgacggggctgaggaccaacagggccaccgagtccggctactggaaggccaccggcaaggacaaggacatcttcaggggcaaggccctcgtcggcatgaagaagacgctcgtcttctacaccggcagggcgcccaagggcgacaagtccggctgggtcatgcacgagtaccgcctcaacgccaagcttcacgccgccaggaccaggcgcggctccctctccggggggcaggccggcgtcggtccaccaaccagtgggt

SEQ ID NO: 3259 - DNA, 365 bp, Zea mays
  unsure (1)..(365): unsure at all n locations
  Clone ID: TF_LIB3245-008-P1-F12
ctcacctcccgtggcagcanccgnccaacaccggcaccgcagtccatattggggaccaanccacancnaanaaaanatccaatggtgatggcgccggctgcggcgcaacagcagcggcgccgcgacgcggatgcggagcttaacctgcccccgggcttccggttccacccgacggacgaggagctggtggcgcactacctcttcgcgcgcgcctcgggtcgcccccccccggtgtccatcatcgccgaggtcgacctctaccgctttgacccctgggacctgcccgagcgcgccctctttggccgccgcgagtggtacttcttcacgccgcgggaccgcaagtaccccaatggctcccgccccaa

SEQ ID NO: 3260 - DNA, 627 bp, Zea mays
  unsure (1)..(627): unsure at all n locations
  Clone ID: TF_LIB3061-086-Q1-K6-B4
cccacgcgtccgcccacgcgtccgcccacgcgtccggaaagagtggtacttcttctaccagaaggaccgcaagtacccgacggggctgagggcgaaccgggccaccgaggccggttactggaaggcgacgggcaaggacaaggaggtctacaacgccgcggaaggagtggcggtactggtcggcatgaagaagacgctcgtcttctacaggggcagggctcccaggggtgacaagacaaactgggtcatgcacgagtacaggctcgaagggcagcggcaggctccccgccggcctcgcgtccgcaaccggctcaaccgccgccaacgccgcggcggccttgaaagcttctgcttataaggatgagtgggtggtatngtcgtgtgttccacaagaccactgggatcaagaagaccaccactgctgcaccggcgtaccaggtggccatggccggcgctgagatggatcagaatcagaacaacatccccttccccatgccgatgcaattttccatgctgcccgacttctccttggacccggtgcccccctactacccgtaccccagcccatgagcttctaccaccagatgggcacggggactgcttgcgctggcgngcttcgatgtttct

SEQ ID NO: 3261 - DNA, 1366 bp, Zea mays
  Clone ID: TF_ZmC545_7
cggacgcgtgggcggacgcgtgggcaacaccactccactccctccatttccctcacctcccgcagcagctagccgccagccaacaaccgaaccaaccaaccaacccacaggccacagcgagcgagtaaagcgtccaatggtagcgatggcggccgtgcagcagcagcagcagcagcagcgccgcgacgcggaggcggagctcaacctgcccccgggcttccggttccacccgacggacgaggagctggtggcgcactacctctgcgcgcgcgccgcggggcgccgcccgccggtgtccatcatcgccgaggtcgacctgtaccgcttcgacccctgggacctgccggagcgcgccctcttcgggcgccgcgagtggtacttcttcacgccgcgggaccgcaagtaccccaacggctcccgccccaaccgcgccgccgggtcgggctactggaaggccacgggcgcggacaagcccgtggagcacgagggccggacggcggggatcaagaaggcgctcgtgttctaccacggcaagccgccgcgcggggtcaagacggagtggatcatgcacgagtaccgcctcgccgaagccggcggcgcccgcgccaagaagtccggcgccggcacgctcaggctggatgactgggtgctgtgccgcctgtacaacaagaagaacgagtgggagaagatgcagcagcagaaggagaaggagaagaaggcgatggagtcggaggcgtcgctctcgcactcccactccgacacgcggacgccggaatcggagatcgacgacgacccgttcccggagctgggctctctaccggcgttcgacgacatgggcgcagccccagcccctgccggcgtcgtcctgcccaaggaggaggtggaggacttcggcgacctcggcggcgacgactggctcgcgggcatcaacctcgacgacctgcagatgccgggggacgccgccgatttctacggctccatgctcgtctcgccgatggccgccaagatggagccggacggcggcttccccttcttctgagatccttcggcgactccggggacgaccggatgcagcgcaacgcaaactgtgtatagttcagattttcttcatggaaccaacaacaacaaaaaaagttcttgctaatatcttgttctagtggtgtagtgcagaagtagcagcaacatgattgaagttccattgtagtactgatgttcatcgccacttgagctgtgacaagtgacgacattctttcgtttcttggctgcaaattcttcgttgtccagaatataatttcagatgggtaatgccaattcgggacgtgttaacttgtttcttgcctctgaacatacaatagcttgttgtgct

SEQ ID NO: 3262 - DNA, 2668 bp, Zea mays
  Clone ID: TF_ZmC13043_1
gggaactggtgttccggaaggacccgggcctttcttatagccccagccactcccttcttcctcctctcacctctctcgaaactttccccaatcccatctcctgcccccctctcccaaccctatccacgccgccgccagccctgctcgggtggtgcgcatacatgaaccatccgtcctcgtcttcgtcctccgcccagccgccgccagccccggcggcggcggccgaggccacctccctcgcgccgggcttccgcttccaccccaccgacgaggagctcgtctcctactacctcaagcgcaaggtcctcggccgcccgctcaaggttgatgccatcgccgatgtggacctttacaagctcgagccctgggacctgcccgcccgctcccgcctccgctcccgcgactcccagtggtacttcttcagccgcctcgaccgcaagcacgccaaccgcgcccgcaccaaccgcgccacgtcgggagggtactggaagaccaccgggaaggacagggaggtgcgccatgggcccaggcttgtcgggatgaagaagacgctcgtattccacgcgggacgcgcccccaagggcgaacgcaccaactgggtcatgcacgaataccgcctcgagggcgacgacgccgcagggataccgcaggactcatttgtggtgtgccggatcttccagaaagctggaccaggtcctcagaatggcgcacagtatggagcgcctttcgttgaggaggaatgggaggaggatgacacagatgatggtttgcttccagtggagggtgttgctgctgctgaccctgaggttccccttgcttctgtggagatccctggtgctttggatagaggctatcttcaaatgagtgatctcattcagggtttggatgatcaaaatggaaatggtacacctagtttgccagtttctgatacttcaaataatagcaaccattctgaagacgtagatggaaattctggggacattttaagtgacccaaaccttggctctaattttcttcagtgtgttgaacctggggagcaaaatagcttaatgcttaatggaactatcatatctaatgcaaatgctggagatttttttgataattccagccacagtgatgggtttctagagctgaaggattttgcagatgctgcaaatctggatttccctttgggcaatggatcatccatctggcctttggatggttgggcatggaaaacacctgactcagcggaatctgtaaatggagctaatgatgagattcctccacttcctgatgaccagactttccagccagatgagctggaacaactgttacagtcaatacaagaagattcccatttaggctcaagtatcattgaccccccgcattcttctatgacaaattcagttctgcctgatgaggattgtttgatgttctatgatgcaccgttcgattccaccatgtgtgatgatgggtttgcacagaatgggatccttggctctgcagcaaccaatctatctggtattggcatggtggacgatggtatgccatactttgatgcaatggatggtaatttatttaatgacattctgggctccatacagcagccagatggtagcagttcccatgcttttaatggcccagtccttacccaagaggtcaacaataccatgtttacatatagtccaactcaaaaggttttagaacctaatattctagttggcgccccgtcgtctgctaggttacctgaagctggtagtcagttaaattgtgttgttttaccagatggtcaggctaagagtagtactattggaaagggatttgtaaggattttggattcaatctccgctcccccagcttttgctggagagttcccagctatccaccgcaaatctttggctcatatttctggggggcgccccaacacactccatgtttctgctgaagtgatccgcgtaggaagtttagctgttccttctggcgcagataagtgggcgctgcaaaaggatcaaggcatggagctggtcttttctgcagattttgagcctgatgcccgtatacattgtggctgcaacaccattaccgcggtgctgcgtggtggcttctgccttttctttgtttcagcaataatgctcttagtgagctacgaggtgggcatgtgcatctatggcaagtagcagcctggtactggtttaagataaatctcacagcatttaggttaatcctatgttttgaggcagactcaactggggggggcctcctgctagcttttaagtgtgccgcattgcatggcatggacctgtggggtgtttagcactagcagtaccattttgcagctcgagagctaatggtgtatgtatgaattcagtgctatttagaaatactatgagaattgcctcattggcgtgtgatgatgccatttgccatgcttgtggtcgcagtggtcaatgttagtgcaaaatattgtatatatatttgagatccaccataggaatcatgatgcttgtgcagtacagttgtgttggtgttttgagtgtttgcaggtttcaaaatgaatgttaatcgtgttgcaagccatggtgatcaagatgcttgcctggaaatcctgttaattcagatttgcaattcttttgcaaaaaaaaaaaaaaaaaaaaaaaaaaaaagaaaaaaaaaaaaaaaaaaatga

SEQ ID NO: 3263 - DNA, 1726 bp, Zea mays
  unsure (1)..(1726): unsure at all n locations
  Clone ID: TF_ZmC24820_1
gcgatcgagtcgtgcagcggctgcttgcgttcgtgcatttttcgtacaggaccgcgcgcgccgcgggtttgagaggagcgcgtgcacacgtacgatacgagcatggcagactaccacaggatccacccagtgagcgcgggctcgccgccgccgccgtccgcgccgccggagcaggcgtcgaggagcggcaagaaacccagccacgaccagctgccggtgacagcccctgccccggcgccgccgcccccgcccccgcccccgccgtcgcggcgcaagcgcagccgctgctgccggtgcgtgtgctacaccgtcctcgccctcgttttgctcgccgttgcgctgggcgccaccgcggggatcctgtacctggtgttccggcccaagatcccgacgttccacgtggaccgcctgacggtgacccgcttcgacgtgaacggcacgtcggccacggtgaccgacgcgttcgacgtggacgtgacggccgacaacccgaaccgccgcatcgggatctactacgacggcggcgacgtgacggcgtccttcaacggcaccgtgctgtgcagcggcgccttcccggcgctgtaccagggccaccgcaccaccgtgcacccgcgcatctcgctcgcgggggagacgcggctcgacagcgccgtcgcggcgcagctgctgcagcagcgggcggccgggttcgtgccgctcaccgtgcgggcccgcgtgcccatccgcatcaagttcggcgccgtcaggctgtggacgatgacgggcaaggcaaactgcaacctggtggtggacaatatccaggcaggcacgcagctgagcatccgctccaattcctgcacttttaagcttaagatctagatgcgccttcctttgtcggccatgcatggttgttgcctccaatgactacggctacgggggtggtagtggtagaggtgtacagtacattcttttcggcacctgtatccatagcttaattgatggctgtaataaataacatccgatatgcatactattttgctatgagattatttattatataataaatattatttatataataaagcatgattttttaggccaaaaaaaaaaaaaaaaaagtcgtttcccactaccttaagggcaagatcaccggcaggatcaactccttgttcgaggtgattcctgagatcgacgtttgcaagtgctagccttggtacctcccggataagtccctgattcggtccgactatcccgagtggttctttttttccccctaggatcgtaagtaccctaatggtagctggtcttacaggtccaccgttgcttgttactgcaatgcttctgttcatgattttattatcaagttcaagggtgacttgcgtattcagtgttctattggtatgaattttacctttcttttccacctttgtctttcctcnnnnnnnnnnnnnnnnnnnnnnnnnnnnnnnnnnnnnnnnnnnnnnnnnnnnnnnnnnnnnnnnnnnnnnnnnnnnnnnnnnnnnnnnnnnnnnnnnnnnnnnnnnnnnnnnnnnnnnnnnnnnnnnnnnnnnnnnnnnnnnnnnnnnnnnnnnnnnnnnnnnnnnnnnnnnnnnnnnnnnnnnnnnnnnnnnnnnnnnnnnnnnnnnnnnnnnnnnnnnnnnnnnnnnnnnnnnnnnnnnnnnnnnnnnnnnnnnnnnnnnnnnnnnnnnnnnnnnnnnnnnnnnnnnnnnnnnnnnnnnnnnnnnnn

SEQ ID NO: 3264 - DNA, 955 bp, Zea mays
  Clone ID: TF_ZmC58420_1
cccacgcgtccgaaacccatatccctccggcataaacccaaaaagctgcaagcagtgtgaccaaaagcaggcctgacggcgatcctcggctcactatccaggcaggagatggagcacgacgtgctaccatcaccaccagcagcagcaggaggacgaggaggaggccatggagctgccgccggggttccgcttccaccccaccgacgaggagctcatcacgcactacctcgccaggaaggccgccgacccgcgcttcgccccgcgcgccgtcggcgaggccgacctcaacaagtgcgagccgtgggacctgccatctcgggcgacgatgggcgacaaggagtggtacttcttctgcgtcaaggaccgcaagtacccgacggggctgaaggcgaaccgggccacggagtccggctactggaaggcgacggggaaggacagggagatcttcaggggcaaggccctcgtcggcatgaagaagacgctcgtcttctacacggggagggccccgaggggaggcaagaccggctgggtcatgcacgagtaccgcctccaaggcaagcacgccgccgcctccagcagtagcagcctcgtcccgtcgtcggtcagctgtggcgcgtcgtcgcagcaggacgagtgggtgctgtgcagggtgttcaagaagagcatcgagccgccatccgtgcccggcagcaagaggtcatcgtcggttgcgtgcatggggacggagggcacgggagtgggagtggggccgtcgtccatgtccacagaggacgacttcgccgcgtgcgccgcgttgcctccgctgatggacgtgtccggcggcagcggcgccaacatgtcgctttcagcagcggcggcggcggcgttcatcgaggtgacgccacctgcaggtgcagcaccggcaccacacgtgacctgcttctccacgcgccgctggagggccagtttctgaacc

SEQ ID NO: 3265 - DNA, 1390 bp, Zea mays
  Clone ID: TF_ZmC1367_1
cgtttctcctggctactacctctcgctccctccggctccgatccagggtgcgagctgagcttgggctagtttagtctccccaagctcgtggcgcagcagcagactcgttggtggaggtggattagtagccaaggctttgcagctaggtagggttttgtagctagttcctcgcaggctcagctctctcatactagctagcgtcggtcagtcgggcgagcaggccaatggtcatggcgaacccggacatgctgccgccggggttccgtttccacccgacggacgaggagctgatcctccactacctccgcaaccgcgccgccaacgcgccgtgcccggtcgccatcatcgccgacgtcgacatctacaagttcgatccatgggacctgccatccagggctgcgtacggggacaaggagtggtacttcttcagcccccgcgaccgcaagtacccgaacgggatccggccgaaccgcgcggcggggtccggctactggaaggccaccgggaccgacaagcccatccacagcagcaccaccgccggcgagagcgtcggcgtcaagaaggcgctcgtcttctacgagggccggccgcccaagggcaccaagaccaactggatcatgcacgagtaccgcctcgccgccgacgcgcaggcagcgcacgcctaccgccccatgaagttccgcaacgcctccatgaggctggacgactgggtgctgtgccggatctacaagaaggccagctgccaggtgccggcgatggcggcggtgccgcagctctccgaccacgaccaggacgagcactgcggcttcgacgacaacccgtacgccgccatgctcctgcagggcgcgtcgtactcgtacccggcgccgccgcatgccgcggccggcgcgcagaggatgccccggatcccgtccctcacggagctgttcaacgacccctcgctggcgcacttcttcgaggagggcggcggcatgcaggacatggcgcggctcagcaacccgcagcagcagcagcagcacgctcctctcctcggccgcgccgtcacgagccaacagctgctgctcaacaacggccacagcatgcccggcggggggcaggcgcagatggatcctcatccgcctgctgctgccgcctcgacgtcgtcggccgccgctggcaacaacaagcgcaagagatcgagcactactactgatgccggtgcgctgtcgtcgagccaggcgtctgaggccaagaaaccgaacgggtcctgtttcggcgcaacgttccaaataggcaacggactgcaggggccctccctgggccaccaccacatgccgcttcactctaacatgggcacgatgaactgacagattattgctgttgttctccgctgaaagctatacttgagagc

SEQ ID NO: 3266 - DNA, 634 bp, Zea mays
  Clone ID: TF_ZmC13898_3
atcaaaatctctctcgggcgctcgctcgctctcctggctccagctagactgtcctgctctgcttcggtgctactcagtgtgcagtgtgcacaggcagccatgcttcagcagagtccggctcggctgtcggctgcgagtcctgctcctgcaggaatggacaggcctgcgcaggcgcccacgcagctgccgccggggttccggttccaccctaccgacgaggagctggtcgtgctgtacctccgccggaaggccctggctcgcccgctgccggccgccgtcatccccgtcgtccacgacgtcgccaggctcgatccgtgggacgtcactggggcgagcgaaggggagggctacttcttcagcctgcggcgagcgccggcgaccggccgcaggaggagggctgagagcgggtactggaaggccacggggaaggagaagccggggtttctgcagagcggcggcgttggcggcgagcacaggcagctgctcgtgggcgtcaagacggagctctgcttccaccgacgcgaggcgccggcgtcgtcacggacaggctggatcatgcacgagtaccggctcgacgtgccccgcggcgtggctgaccagaggaagaaaatgtgagacatggctactgtgtgaa

SEQ ID NO: 3267 - DNA, 390 bp, Zea mays
  unsure (1)..(390): unsure at all n locations
  Clone ID: TF_LIB3060-026-Q1-K1-A3
attccgggctacggcgtacgctcgagctctaccgctacgacccatgggagctcccatcaatggccgcgattggggagaaggaggggtagttctacgtgccgagggaccgcaagtaccgcaacggcgacaggcccaaccgggtgacggcgtcgggctactggaaggccacgggcgccgaccgcaccatcaaggcggacaacagccgncccatcgggctcaagaagacgctcgtcttctactccggcaaggcgcccaagggcgtncgcagcagctggatcatgaacgagtaccgcctcccgcccgacgacaccgaccgttaccacaagaccgaaatatccttttgccgcgtgtacaagcgcaccggtatcgacaacggcggccacgggcatc

SEQ ID NO: 3268 - DNA, 2742 bp, Zea mays
  unsure (1)..(2742): unsure at all n locations
  Clone ID: TF_ZmC2195_3
ttcatggatgtaaggcccaatgctgggttacacaaccagcttgctagattatttattgtacttcgtattgttggatggaatgcgtttaagctgaagtcttcagtggtagaattttccgatgagagattggatgaaccgagtatccgtttgtgcatatatggtcacatcttagnnnnnnnttgccagtaaatgtgagctccatttctgcctgtttgcagaagatttgacctgaactcgtacaagtttgcgatgcaagcaaagttgtgtctagtgccctcggcgggtaaggtaccagctagcgtttagtgtcatgaagccacacccacggtatcaaatggattactggagtgcttacaaactcttagacagcagaaatcaaatggattgctggagtacaattctgtagtttagcgagagatcatcttcacttgttcnnnggccgccttttataatttttttttctttcaatgcagtggccgctccactatgtagtgtactgtacaaacatggttcagatttacaaagctaaggatagtagtaacagtctgaagctacatcttttttgttcatacgaccaacccttttcccactttttttctttttcgattttcgataggcacccgttggtagcaactagacgatcaaaagaagagagaaaaaaaattaatatgtacagcaccacaaaaaaaaagtggagataactgggaatcagtggtcgcaaaaatgtatttccagtaatcccagtgagataagctgaggaactcgatttctattccatttccaatgcaagcaaagctagcgaactactccaaggacgaagccaatgctgccactgaccactagagctacaatcaagcatgctgatgttccatgattcaaattcataggttggcattggagcggtgataatgcagcactagagcagcaactccaaccacaaaaagggcaacaaatatgtatgccctgaatccagctgatgaacatcttttgaagccctcgagataaccttggttgctgtgggcttcatgattggctgcatcagactgcttggcagaaatgacattgtttgcatttttcttctggtgctcaacatcagtcctgagatcaagacgacgaccactgttatctgtaaacttcatagtctggttgatagattctgaattactcgtaaccatcctcttaattccaacctgcattttaatcttgccagctgctagtgaaatgttagcgggaggcgcagttgctctgcgccttcgtattgtaattccggtgtcaatattttcatttgacatatccatcttgttattttcatgatctaactgcaattcggcattcggagtttcattctcaaagttgtttggaagaacatatgaaccaatccccatcatgtagtttgtctgattgttattaccttcctggccagtttgttccaaaaatatgctatcattgaactggtcagtaccaggatacaacatactgtaaagatcctcgggaagatcatctgtgaataggtagtctgtggcatctgttccatcctggatagggctagcatggcctggtctgatattcggagccatggaaccaggattctgcaaatttgatgattcagcatattgttcagtcggacacacgtcagcagaaccagtatcagctacaaggttaaatggaggtgaaggatccaacagttcttgcagccatgtttccagttcattaccaccatttggagttgttgaatcaggagtgatagctgcaggagtgatagctgcctgagcaacatcattagatagttcagcactgccaattggtgtagttgcatggttcgattcttctggacagatgactgaggcagcaacatcttctggctttacagtgctgacaactgatgtagcagcatctggttgttccagatgagagctcctgttgcccacctcattatcattatctaatgaccagtcatttcttttagtaacacggcagaggacaaaggcatccttcatatcagggctgactttacatccattctcgtcaatgtagtactcatgcataatccactcagtgcgtctgccagagggaggtcggccttcatgaaaaactaacgtcttttttgttcctagagttagcttgttcagctttatggctcggtccttcccagttgatttccagtaaccagctagtgttgccctgtttgacctagagccagtagggtacttcctgtcacgagaggcaaagaaatgccacttgttgtccttgattggaagattgcactttgcaggtaaatcccatggttcatgcttgtatatatccacctctggtataagatcatattcaattttctgaccaagtattttcctcttgagatagtgagaaacaagttctatatccgaaggatggaatccaaatcctggtggcaggtgcatatcacgcagtacttccattttacaatgtctctccggagcccaggtgcccgcacggccgatcgcgcccgaccggcgccccgcgtaaccaccaggacggcgccgccgtgcggggaagaggagcctggagggggcacagcgaagagctcgagggcggtgttcggcccagcggacgagtcaaggctgggagtggcggcactgggtgggggaagcgtcagaggtagggtggtgacgagcgagtagcaggggagggcgattgggcgagatggacgaagcagccaggaagctgtgggtgcactgcttcccgccggccggcctcgagtacccc

SEQ ID NO: 3269 - DNA, 1807 bp, Zea mays
  Clone ID: TF_ZmC24893_1
ccttcctcctcttctcttcctctcgatctcgtttctctccaggctcggacggcacagcgcgcggcggcgtggatcccgtctccctctcctcgatccagccctctgaaccacatgcatgtgatcatgcacgggctggtatggtaaagggcgcgccgtgctgctagactcgtatgggctcttggcagcaaggagagctgcagggagcagccatggatggtgcagcggcggcggcgactggaagcggcggcggccaccgcgtcgtgggctcgaggaacgaggagcacgggaagtacctgtcggagtcgagctgctgcccacggtgcggacacaagctcgacccgaagctggactggctggggctgccggcgggggtcaagttcgacccgacggatcaggagctgattgagcacctgcaggccaaggtctggcctgcctcggcagcggcgccgtcgcaccctctgatcgacgagttcatacccaccattgaaggggaggacggcatatgctacacccatcctgagaggctgccaggtttgacgaaggacggcctgagcaggcacttcttccaccggccatccaaggcttacactaccggcactcgcaagcgccgtaagatccagccgcccgtagccgatgcctcatcatcctccgccctgcccgcgcagcagcagcatcagcagcagcagcggagcgagacgcggtggcacaagaccggcaagacgcggccggtggtcgtcgccgggcggcagcgcgggtgcaagaagatcctggtgctctacacgaacttcggcaagaaccgcaagcccgacaagaccaactgggtgatgcaccagtaccacctcggcgacaaagaggaggagcgcgagggcgagctcgtcgtgtccaagatcttctaccagacgcagccgaggcagtgtggcgtcgcggcggagcctgccgccacagccgcctcctctgacacggtggaggaggctgctgacccgccggcgccggagggcttggtagtgccgccaccaccagatgtagccggtgccttccaaggcgccgctggcattgatgagttcagctttgcgcagttcaggagcagcttcgaggaggtggacgtcggagcatcagttcaggtttcgatgagggacgaggaggaaatgcatgcagcgcatctcaaccttcaccaggatcataatcttcaccgcaatcaatttggcaaccaagagcacaggcgccgcatggctgcaactgctgcagcattccacatcaacacaccagtagagcctatcaccacgatgatcacctcctcgccggtggttcacggttctgccatacttcaacatccagaggcatatggccatggcagctcgacttattgtcatcatcagcaccagatggaggaggatgagcagctacaccaacaacctcaaaattttgatgggcgacggtcgacttctgggctcgaagaggttattatgggatgtagttcgaggaggtccaaaagagcggaagcatctggcccaggtggaaacaaggagagcagaggatggcagtacccatccttctggccatctggcagccaacaggatcatcatgggtagaagagcagcaacacatccctgcctggcactgtatgtgccgcaccacctttgcatgaagccaaccttggagagggcaaccgaaagcagagagacacctgacatcatcattactagctaccatgataagatcatcatataaacctagctacactgtcgtacctaccatatctaggcttacaatactttagcgtgagtgcagtcgcttccaagaagcaaac

SEQ ID NO: 3270 - DNA, 757 bp, Zea mays
  Clone ID: TF_LIB5115-005-B2-PF1-D6
acacagggtgcaaaacgttagccaaatggtaggaagggaaaccctacaaagtaaccaaccaagagagctaagactacgagtctgcaacttaaagctgcttcttccttctctgagattttgtgctagcttttctccaaatttagttagtctttgataagagcagagccagtgcttagtgacccaccttgtttggccccaaagaaatatatggtagtcccacactgagtggaagaaagggttcgttttagctccagtaatcagcagaaaccagaatcttttagctacttcctaccgagtgaagtttgaccatacagattaaccgttaggttttgtagctggtaacttcttgtaactagaagcaggtgagcactgcttgagatatacagcatctaaccagtagtttgttgtactgtgtaaacatatggatgccatcagaagtgatgacatagagaagcaagatgaagttatgttacctggattcaggtttcatccaacagatgaagagcttgtcaggttttaccttaaaagaaaaatccagcagaagtctctccccattgagctcatcaggcagctagacatctacaaatatgatccatgggatctcccaaaactggcgagtactggagagaaggaatggtatttctactgtccaagggataggaagtatcggaacagcacaagaccaaacagggtaactggagcaggcttctggaaggctactggaactgacaggccaatctactcttctgatgggagc

SEQ ID NO: 3271 - DNA, 1390 bp, Zea mays
  Clone ID: TF_ZmC345_1
gtctgttcttctcctctccctctcatcctggcgtttgtaccgagagtacgactgactgggtgaagggtggtgcctagctgatcgcctgatccatctcgtccgcccggggcccaagcagggttacaagagttactagggatcctctgatcgaaaggatggacactttctctcatgtcccccctggattccgtttccaccccaccgacgaggagctggtcgattactacctgaggaacaaggtggcgtccaacaagatcgaccttgacgtcataaaagacgtcgatctgtacaaaattgagccctgggatctccaagagaagtgcaagatcgggacggaggagcagaacgagtggtacttcttcagccacaaggacaagaagtacccgacgggcacccgcacaaaccgggcgaccaccgccggattctggaaggcgacgggtcgcgacaagcccatctacaccaagagctgcctcgtcggcatgaggaagacgctcgtcttctacaggggccgcgcgcccaacggccacaagtccgactggatcatgcacgagtaccgcctagagaccaccgagaacgtgaccgccgcccctgaggaaggatgggtggtctgcagggtgttcatcaagaagcgagtggaggccgtgcggcggatggccgacggcgcgccgccgtggttcgatggccacgtccccggcggcttcatggcgcccgcgggccttggctcgccgaggcagctgatgcatcaccacccaaacccggcagcagcagcgccactgctgtacagcggccagcagctctaccactgcaagcccgagctggagtaccatcaccttctgcagccgagccaagaggccctgttgcagcagctccctcagttggtggagagccccaagcctcctcctcccgccttcatcgaccaaggcagctgcagcctccagtcccccgacgaggcttctgggtacaacaccaccccgcagcaaccgccgcccatgacgacggaggccgcctacatggacgacgactcggtcaccgactggagagtgctcgacaagttcgtcgcgtctcagctcttcagccacggcgacggcatggcgaaagaggatggttaccccaacccggggcaggcattatttcaggctgagaacaagcagccggaagaagcactggactacgcctccacgtctgcgtctggtggcggcggcggcgaggcgaacatgtggaaatagcgtatgccgtatacaattcatctgcgagtttaccatatatatgcctcccaaacctgatttagtgtacaaatatatagcgtgcaatataatgcttgtcatgctgacacatgataatatacacatgcatgcatgataataaacacgtaaccgaagtggttattttt

SEQ ID NO: 3272 - DNA, 617 bp, Zea mays
  Clone ID: TF_ZmC58420_2
ccccctcggagtaacaactccactcccgcggaaaaaaaacccatatccctccggcataaacccaaaaagctgcaagcagtgtgaccaaaagcaggcctgacggcgatcctcggctctctagccaggcagcaggagatggagcacgacgtgcaccaccagcaccagcaggccatggagctgccgccggggttccgattccaccccaccgacgaggagctcatcacgcactacctcgccaggaaggccgccgacgcccgcttcgccccgcgcgccgtcggcgaggccgacctcaacaagtgcgagccatgggacctgccatcccgggcgacgatgggcgagaaggagtggtacttcttctgcgtcaagtaccgcaagtacccgacggggctgaggacgaaccgggccaccgagtccggatactggaaggcgacgggcaaggacagggagatcttcaggagcaaggccctcgtcggcatgaagaagacgctcgtcttctacacggggagggcgcccaggggaggcaagaccggctgggtcatgcacgagtaccgcctccacggcaagcacgccagcagcagccgcctcatgccgtcgtcggtcagagctggcgcgtcaaa

SEQ ID NO: 3273 - DNA, 791 bp, Zea mays
  Clone ID: TF_ZmC218_42
tctgacagtggttgatcaagaccctcaatcggaagctcacggtcagtaattgcatgctcctccattgtagatggtgggctgttggtgttaggaacaggattagcggctgcacccgcaatcactctctcatcgtcgtcatccaaccaatcctcctctcgaaagggagcaccgtactgttcgccgttctttggcccggccccgctcttctggaacagcttataaagcgcgtagaactcccgaccctgcgcagcaggcgggagcgcatcggcaagtagggtatactcgtgcatgacccagtccgtacgctccccgcgcggggcgcggccatggtggtacaccagcgtcttcttgttgccaaccgcccggccgccgccgcagatgaagcggtccttccccgtggccttccagtagccgtcgccagtggtgcggctggcgcgcgagccgttggggtacttgcggtccatccggctgaagaagaaccactgcctgtcccccgtctgcagcgccgacctctcggggaggtgggaggggtgtgacttgtacacttcgacgtcggcgacgtagggacaggggcggccggaggcgatccggcgcttcaggaagtagagaacaagctcctcgtcggtggggctgaagcggaagcctggcggccaccggccccgcggcggggtctccatctcgctctcgccggatggttggtgctggtggcgtgtcgtctgccgggtcaacccgatgctccggctacttatgctaaagacatctcaaggggctgccggttctgccccggccgg

SEQ ID NO: 3274 - DNA, 2870 bp, Zea mays
  unsure (1)..(2870): unsure at all n locations
  Clone ID: TF_ZmC151_3
ngattcaaaaaaaaaaaaaaaaaaaaaaaaaaaacataaaaaacctcgaggccggccggggccgggattcctcacacccacacaaaccgcacctcatccctgttgacccgacggtggcgctcatctcctccccgacggtggcgctcatcttccccccgacggttctccccatcgacctgctggcttcccttcgtcttccccgacactgatcctcaccactcatgtctgctgaagttgccggaggaaacccttatttcctctcatgctacttctggttcatatactgcataaaattccgagatttcacttgatacaagtggaacactaggagttttgtgcaaatacttcctaccatgtgaatcagttgtagctggtgaatttggcaagactcaagtcctctcatctgggttcagaaaacatctgtcggttgattgcttggtctcctgtttcctttgagtcttgccaaccaaagttttctctcagcatcagttgtggtctacgaactctttctgtgacttgaccaacatctcttttggtcctgtcaatcttgcaacactcccttccaaagacttgtctagaggctggattgccctgctctctgctggcgctgcatcctcctttagtcttccaagttttctcttggcagcagttgtgatctacgaactctttctgtgacttgaccaacatctcttttggtcctgtcaatcttgcaacactcccttctaaagacttgtctagaggttggattgccctgctctctgctggcgctgcagcctcctttagtcttcccttgctgcattctgtgctcactttcgaaagctgctctgttctgctctgctttattgatttgtgcacttggattctcttgtcttaatcaagcttctctcttctgggtccccttttgtcttgagatccttcatcagtgctaaaggcaaaagaggtcttagggcgatggcgcaaactagcctgcctcctggacttcgtttctgatttgagattgtttcctactatttgaagaggaatatgggaaagaagcttattgtagacgctatatcagaggttgatctctacaagtttcctccctgggatctccctgaaaagtcctctcttcgaagcaaagatcttgaatggttcttcttttgtccttgtgacaagaagtaccctaatgggtctaggacaaaccgtgccacaccaaatggttactggaagactagtggaaaggatagaataattatgcttaactctcgcactgttggaatgaagaaaacattgatatttcatgaaggcaagccccctaagggtgatagaactgattgggtgatgtatgaatacaaaatggaagatgaatatttggtttctactggtttctcaaaggatacttatgtactctgcaaaattttcaagaaaagtggccttggtccaaggattggggagcaatatggggctccgtttgacgaagccgaatgggacaatgcagaagctgaaacctctatatttcctttgatgacctcttcagaagtagtgaacccaacagagggaccacacactcagcctgttgcccctgctggtgctcttcaggaacctctacataattcatctgctacttgtgttgtagagggatcgccatttgatcatgccactgcaaatacttgtgctgagggtgtaacatttggctatactgttgctagctctgctattgaagatatgcctgctcagctgtcaggagatggtgtggtttctatgaacaacatatccagtgaggtcaatgatatgtacagtcctcatgactgtgatgaatttctattggaggagatgtctagattcctgaatgatcctccaatgcgtaacactccttatggagagtgctctggtcttcctccaatgtctgaagctgaggctcatgcttttgaagtcaactcttttgacctctacaaagaattatcagggcttattgagttaggaggcatggacaataacttcaacaccagcaatgtggaaaccacagattaccttgtgctgccacctgacagagaattgtccactgatggttacatggaacttaatgatctccttgcttctgattcaagcttccccatcccagtgaatttcctgctcaggacaatcaatctatgcagtatcctctggctgagtacaatgtgcattatgatgtcgctactctgtcaggtcctttggaaccaacaatgcctagcattttcgacgattttcctcccaataatggaccccatgtcacagatgaggaagacgactacttggacccgaccatccctttcccgtgattggtcgaataatatgcctgcccttttttgtgtccttacatgtttggactgttccgatgttgcaacttgcagttctttgctactacaactctatccaccttggatgtcgcgatattgttgatgcaatgcctgggctcatgtcagctgagagctgaccttggcagcttggctgtctgctgaccttggctggaagcacggtttttggatgaatctgcatcgactaccacatgcaagttccaactggttgagctgaccgcctatcttgtatcgctctgctcaatatcggtaggacttggcatgtaaatctttgattatgtctatgctgagtatcaataagacttggcgtgtaagtctttgattatgatattacctgtctgtattgcaacctgcatgattgccaccattttaagcaatttgtcatttgtgtattcacaatatgcaaaccattattattgttgtaatgtgatattgaatgtttaatactatattttaccctgaaaaaaaaaaaaaaaaaaaaaaaaaaaaaaaaaaaaaaaaaaaaaaaaaaaaaaaaaaaaaaaaaaaaaaaaaaaa

SEQ ID NO: 3275 - DNA, 1346 bp, Zea mays
  Clone ID: TF_ZmC1229_1
gcgccgcgcggggagaagaccggatgggtcatgcacgagttccgcctcgagggcaggcttccccagccgctcccgcgctccgccaaggtccggccctcgtgtacttactcgttccgtcgttcggcgttgcaagcaagtctcctgcccttaatttccggccggtgggcgtgggctaacaagtcccctctcttctttttcttgccgccttgtcctttttgttgcgtgcggtgcaggacgagtgggccgtgtgcaaggtgttcaacaaggagctgcaggcggcgaggagcgagccattattggcggcggccggcgcggcggagctcgagcgcgtgggctcgctgggcttcctcaacgagctcctcgactccgcggagctgccggccctcgtcggagccgacgtggacgaggtgatcgacttcaagggccccgcccccgcgtccgttccggacgcgagctacctcccggtcaagatggaggagcacgcgctgctgcagatgcagcagtgccagtaccagccgccgcccccgatgttctacccgagccagtacttctctcttccggcgatgaactccggccacctccccccggcgatccggaggtactgcaaggcggagcagcaggtggtctcggcgcagacggcgtcggtgatcagcccgtcccgcgagaccgggctcagcaccgaccccaacgcggcgggcggctacgcggagatctcgtcggcggcgaccccgtcgtcgtcgcaccagttcctgcccgagctcgacgacccggccctcaacctcgccgacctctggaagtactgaagcctgggcgacgatcgaccggtggctgggccgcccacccgccccggtcacgtggtctggttggttaatttgcttgatttgattgattatcttggtctcttgtgggatctggggttggtgaccggttcgctgatgcgtcctcgttcgtcacctccgccaggtccggcctctactgacctcgggtctgactagattattatccgtccagaccgccaggggattagggcttccttgttaattaattaatcctaggttcctttgtattggtctctgtacatagtactggtaccctactctgattgtgtcattagcagtagcatgattactgataggattaatgaaatgggggtagattaagggggcctgcatctgcgtcagcaatgcagtgcatggtggggggttttacgggttgattagttaatttgggcgcttggtgagccagctagcgctagcttcatatgtacatgtactgccattaattgctgcttgagctcgacataccattatgtgaatttgatgcttcagttaagctctcgtttaaag

SEQ ID NO: 3276 - DNA, 1744 bp, Zea mays
  Clone ID: TF_UC-ZMFLMO17336E02_FLI
gcgcaaatgaaagcgctcccctcgattgggcggcacgtaacccatcaccaccaccaccaacccggacccgtcaagcgctgcgtcgtcccgtgcaaagaccgcgcattccgtgcgtgccgtgtccacgcgcgcgcgcgcggtggcgttaagttgtcgagcgccagaggagcgccactagtcgtcgatcgatttgacccaggcgaggaggcgtaggcgcgtaggggagtgagtctagctagctactggtgttgggtccattattcgctagcttccgacgatggaggtgaagaaggaggccacgaaggcgacgctgccgccggggttcaggttccggccgacggacgaggagctgatcgtgcactacctgcggcggcgcgcgctggcctcgccgctgccggccgccgtcgacatcccggacgtccgcatcctggcgcacgacccgtccgacctgctgcccccaggtgagtgagtgagcgagtgagtcggcactcgagggatccatcccatctccatctcagactggggctgattggttttgttgctggattggggggcggtggtgccgtggtggtggcagggttcggcgagcaggagcgctacttcttcacgtgcaaggaggccaagtacgtgaagggccggcgcgcgaaccgcgccacgggggccgggtactggaaggcgacgggcaaggagaagccggtggccgtggcggtccaccggggcgtgcagggccagagccagggccaggccgtgctggtgggcatgaagcgctcgctggtgttctaccgcgggaagccgccgacggggagcaagacggagtgggtgatgcacgagtaccggctggcgggcgccgggctcgcgccgtgccgccgccgccacgccgacgccgatgccgacgccgacgccgtggcgcgggcgccggccgagggctgggtgctgtgccgcgtgttccggaagaagggctccgccgccgccgccgccgttgcgaggcggcccggcgaccgcagcgacggcgagggcgacgagagcgcgggcggcggcggcgggcgcgggttcatcgacttcttcgcgcgcgcggacgccgccgggcgaaggcgccgcgcgccgtcgcccgccgtgtcgagccggtggcttgcggacgcgtcgccccagccggagcaggaggccaccagcagaggcccgtgacgagtcaagggccggccggctggctggcgtgaagcgatcaagcaaggtaaggtagagagagagagggaagcttttgctgcattggcagtggccaatgagggtccagtacagtaggtgcaggtaggagcaaagtgaattcgttttagcaacgcgagagagagagaggcccgatagtcagtcagtcagtcaaccagtgcagtatcagttgttgagcgtagatggtgaaactaatgtagcagctcagttgtactcctcccgaccacctgatgaatcctacacaattgtagagtggctgcagcaaaatcacggccatggcaccggagctcctccaaggaacgcaagtccaccagctgctgctgctgctggccatggcggtcgcgcggattgctagtgctaatgttccacaggctgttgattgctgagaagcaagtagcggtggtggtggcgggcagcagacggaagatggcgggtgtctgatactggtggtggtggtagtagtcgtgcgtaatctgttgcctggacttggacttggtttctttaatgcaattatgatgatgaagtg

SEQ ID NO: 3277 - DNA, 478 bp, Zea mays
  Clone ID: TF_LIB3960-012-Q1-N6-H1
gcgccgtgcccggcccccgtcatcgccgaggtcgacatctacaagttcgacccatgggacctgccagccaaggcggttttcggggaggcggagtggtacttcttcagcccgagggaccgcaagtaccccaacggcgtgcgccccaaccgcgccgccgggtcaggctactggaaggccaccggcaccgacaagcccatcacgctctcctcctcctcctccgccgccgccgccgccggcatgatcggcgtgaagaaggcgctcgtcttctacagggggaggccgcccaagggcgtcaagacgagctggatcatgcacgagtaccgcctcgccgaggcgctccacgccgtcgtcaacgcctacagacccacgcggttcaagaacaacgcctcgtcgtccatgaggctggacgactgggtgctgtgcaggatctacaagaagaccaccccgcagctggcgtacagcatgtccgccgccgccg

SEQ ID NO: 3278 - DNA, 454 bp, Zea mays
  Clone ID: TF_cC-zmpo148030h05a1
cttaaccctttgaatgtcttaacgtccattattttataacatttctattgaccaatcgcttattgtttataggtattttttaaatttagaatctgcgcatatcaatacataaaaccctattcgatctctttcttctccaatctaagttgcagaaccatggccaaaactctctactgcaattttttttgatcttttcttttactttttctcttcgtaatcgctggttcgagaaatggagaatcccgtgggtttaagattcccgccgaccgacaaggacatcgtcttctattacctccgaccaaaaaactccgatagggacacgagtcatgttgatcgagtcattagcacagtcactatccgtagcttcgatccttgggagttaccttgtaagtgtttttacgagttttcctcttcaaccatcggctactttttaagtttagggtttttctctttg

SEQ ID NO: 3279 - DNA, 1539 bp, Zea mays
  Clone ID: TF_ZmC119_1404
ggagaattgtgtaatgataattatcacagtaaaatatgtcatgatactttcaagtcaaatagagcttccctctcggcaaggtgataagccgataaccatacaacatagtgcaccgtgagaggacaagagatatgacacacaccctgacacgctcaaactgggtcttagcaccatcacttgcatgctggtaaattcaggtcacaccaaaagcttcagacaatgttcagcatagggcaagaaggctggtagcagcatgacttgcgcctcttggcccttctgctctccagcgtctgttgcgcctgctcaaactcttcttccgtgggctccgagctactcgccttggagtcacacttggacatgatgttcgagaggatggagttgaactgttttttccgctcagccctgcgctgtgagatagccagtatcagatcattctcctgactgttcttcctcttcctgccatggagttcaagacaacgatcagtattcagcactaaagaataaggcaaagatgcaaccaagaaaacaacaacgctaccaaagaaaggttgcctattatattatataagaacacagtattcagcacacgtttaggtgtatagcaatggttgagtaactaaacaaaaaaaaccaggacatgttccttccacgcttgacttctccctgctcatctgcacggcaaggtggccaacgagcggctcgccggcgccggcgcgaccatggtggaggtggatctgcacacccacgagcctgggagctccctggtacatgcttgctgtgcctgcttgccactgaaattgaattccttaattgcttaatttacttgattgttagctctgsgtccatctccctctctcgcaagcaagactctggctaattaactcagttccgtgtcatggaatgagtgattaggcacgcaaccgcgccaccaagtccggctactggaaggccaccgacaaggaccacgtgatccacaccccctgcagctggcccgccgccgccgccggccaccaccgcaccgtcgtcggcatgtacaagaccctcgtcttctaccgcggccgcgcccccaacggcgtcaagaccagctgggtgatgcacgagttccggatggagaacccgcacaccccgcccaaggaggactgggtcctgtgcagggtcttctacaagaagaaggcagacgccatggattatgccgactgcagcgaccaggacgccatcgccgtgcatatggcttgcggcagcgctgacccacgaggggcggcagtagcagcgtcggaccgaggagggagacaacagggtgggggagaggcaccaactgcgactgcgcgaggaggacgacctcgggacggggtggcgacacgaggatgaagacgaggcgcggacaggaagacgatggagtggcgcgcagatcgagagggcggcgactccatgggggccgcaattggcgacgcgggcgtggcggcgagacgcgggcgtgaggaaaaggtagggcacggtggaagggaggcggcgaggtcgagaggatgagagcccggccgg

SEQ ID NO: 3280 - DNA, 805 bp, Zea mays
  Clone ID: TF_ZmC2195_10
cagtcacttctcttagtaacacggcagaggacaaaagcatccttcatatcagggctgactttacattcattctcatctatgtaatactcatgcataatccactcagtgcgtctgccagagggaggccgaccctcatgaaagactaaagtcttctttgttcctagagttcgcttcttcagctttatggctcggtccttcccagttgatttccagtaaccagcgagtgttgccctgtttgacctagagccagtagggtacttcctgtcacgagaggcaaagaaatgccacttgttgtcctcgattggaagattgcactttgcaggtaaatcccatggttcatgcttatttatatcaacctctggtataagatcgtactcaattttctgtccaagtattttcctcttcaggtagtgagaaacaagttcagtatccgaaggatggaatccaaatcctggtggcaggtgcatatcacgcagtacttccattttacaatatatctctcctgagagccgggtggccgcacggccgatcgcgcctgaccggcgccgcacggaacctccaggacggcgccgccgggcgccgggcggcgaggaggagcccggagaagcacggcggaagagcaccaccgggcggtgttcggtccagcgaacgagtcaggactgggagcgattgcaccgggtggggaggaagcgtcagggctgggctggctgcccctgctggggagcggaggggagaggccgattgggtgggagcggacgaagcagccacagccagcaaggaagcgaagccccggccggcctcgagg

SEQ ID NO: 3281 - DNA, 297 bp, Zea mays
  Clone ID: TF_ZmC1343_1
gccgaccggccggctctcctccatcgcaacatttcaagggggccgggcgaaagcaccaaaaatcccagcgcagatcactcgaccgccgcctgctccatttggaccctcccaaccgacagcgtaaggctctctgcaacagagccggggttccggttcgacccgacggacgaggagctggtcgtccactacctcaagaagaaggccgccatcatcgcctttacaagttcgatccgtgggagctaccttgtaaataccctgtgatttataatcatgcgaaaaatagtgagattgttgttg

SEQ ID NO: 3282 - DNA, 2059 bp, Zea mays
  Clone ID: TF_ZmC198_15
ccgcctccccctcccacccccacccccacccctggccccccgagcggcggtggcgtggcgtccattatcacagaagatctcttcgagaggatgctgaagcaccgcaacgaacctgactgcaaagctcggggcttctacacgtacgacgccttcatcacggcggcggacgcgttccggggcttcggcaccacgggcagcacggaggtccagaagcgcgagctcgccgcgttcttggggcagacggggcatgagaccacgggcggctggccgaacgcgcccgacggcgccttcacctggggctactgctacaaggaggagaacggcgccaccgccgactactgcgacatgacgggcgagtacgcccagtggccgtgcgtcgccggcaagaagtacttcggccgcgggcccatccagctctcctacaactacaactacgggccggccggggaggacgcgaccatcgcccaggacctgctgagcaacccggagctggtggcgtcggacgccgtccatctccttcaagacggccatctggttctggatgacggcgcagccgcccaagccgtcgtgccacgacgtggccaccgagcagtggaccccctcggccgccgacaaggccgcggggaggcttccgggctacggcgtcatcaccaacatcatcaacggcatcgagtgcggcaaaggctacaacgagaaggtggccaaccggaccttcttctacaccagctactgcgacatccttggcatcagctacggcgacaacttggactgctacaaccagaggcccttcaacagcgcatcccttgctggaaccgctgctcacgctgaagcgtaaataattaaactaaattaagcgatgggggcgataataatatgttgtgatgggactatgggagtcgatcagatgagctgtgcagaatccgtgctatatcggatttgcattgctcatggaataaatcaaatcaaatcaaaataaacggtgttcaacgatcggcacattataagttagtatatcgttaatatgattggagtcatccacgagaagctgctgatccatggcgccctctctctagctcgctcccatggaagaacgaagaagataggtaaaggtcccgagtcccgagcagggagataaggtggagagatccttgggctgccgcggtgcgtgcccgcgcttggtagctcttgggccgtgcggcccagcgcgcggcgcacgggcatcagttgggccgacgactgtgagcgtgggccttcgctttacatataaagctgttggattgtgtggattttggttagaagttgaggacgctggcgtagtaggcagaccaccagctctccatccgtgggctccgcagctgcgtcaggaaggggtcctgctgctgctgattcttcgccgcctcctctctcttcatgctcatcgcagctgacggtgagagcgagacgccgcccacgggcaccatcacgatctccgacgacgacatggagtcggcgggggagccggtgctgtgggacgcggacggcgtggcggtggcgcgcgcgagctcctccatggccacccgctgctccagctccttgagcgacacggccttgcggtagaccttgcacagcaccacgtccacctgcggcacgcgcgcgtcgctgctagcgtcggcagcgtcggggaggcggtactcgttcatgacccagtccgtcttggtgccccgcggcgcgcggccctcgtagtagacgagcgtcttcttgagcccgatgaggcgcttggggtcggcggcgcaccgcacggcgcggtccgaccccgtggccttccagaacccgcgctccgtggtgcggctaggccggccgccggagccgggctgctgcttggccgcccgcccgccgccgtcgcggggcacgaagaagtaccactcgcgctcgccaacgacgcgcgccaggctcggcagctcccaggggtcgtgccggtacaggtgcaccgtggggatgatgtcgaacttgagcttcctcccgcgcgccgcctgcttcaggtagaactccagcagctcctccttattgaactaatcctgtg

SEQ ID NO: 3283 - DNA, 809 bp, Zea mays
  Clone ID: TF_ZmC586250_1
ttttcgccggattatatttcaaaaatcccccccctccgcttccttcgctgctaagtatatcccctgagctccgaatctcctaccgggttgggtctcgtagtcgttggatgagagcttgggacagtggaggagcatgacggtgatggagctcaaggcgctaccgctcggtttcaggttccaccccaccgacgaggagctcgtcaggcactacctcaaggggaagatcacggggcagatcaagaacgaggtcgaggtgatcccggagatcgacgtctgcaagtgcgagccgtgggacctcccagataaagctttgatccgctcggaggatccagagtggttcttctttgcacccaaggaccgcaagtaccccaatggaagcaggtcaaacagggcgacggaggctgggtactggaaggcgacagggaaggacagggtcatcaagtccaagggcgagaagaagaagcagcatatgattggcatgaagaagacccttgtgttccaccgaggacgtgccccgaaaggggagcgcactggttggattatgcacgagtaccgcaccaccgagccagagtttgagtctggcgagcagggtggttatgttctctaccgcctatttcaaaagcaattggagaaaactgagcgctccattccagaggaaatggatagaagtggctactctcccactccatctcgttcaactcctgacaacatggaagcaaacgaggaagctatcacactcataaataaggaatctcctgaatctggtctgcatggatgtccaattgagttgccaggtacaattgatactc

SEQ ID NO: 3284 - DNA, 1257 bp, Zea mays
  Clone ID: TF_ZmC3395_1
ctccccgccggcctccacctccacggcggggaggaggcggtactcgtgcatgacccagtcggtgcgggcgccgccgccgccacggcggcgcgggcagaagacgagcgtccgcttggtgccgacggggcgcttgcagcgcggcgacacgacgacggtctccttcccggacggcctccacctccacggctgcgccgccaacgcgcctccgcccactaatgtgagctcccatggcggtggcgcggcggcggccgactgggtggtctgtcgcattttcaggagggccaggccagcccaccgcgcccgccttggtgacgcgcaagaagaagaagaagagcacgcggcggtggagagcgcgtcgtccacgtcgtcgtgcgtcaccgacgcctccgggaccatcggccaggacgatgacggcgacgaagggatcagtggcagctgcagcgtcgcctcctctaattgagaccgactagaagaaacaagagttggctagcccgcccgtcgaccaaatcacgggcgccgtgtcctaattgccgtagcaccctctcagtctcagtccctagtagcaatcaatagagagaagaagcttgagctccaacaaaccgacaacaacatcataaaaaggctaagcgctttgctgccatgttatgttgttgctggagctcgtcgcgaatccagagtgttaattagcgagaaaatcaatcagttcccttccagcaaaagaccgccatttcctgctgtgccaaggttctcccacaaacgcgttgctcgttcaaatcttcttcaatcttgctttgagaagcaaaacacagtctcacctcgtgccagcaccgcgtcgccgggcggtggaagaagaagtgctccccgctggcgtcgtcggcggctccccccgcaggtggtgcggcggcggggaggaggaggtccgacgggtcgaggcgcgcgaggtcggcgtccgggatgacgcccgccgggagcgggcaggccagcgccttgcggcggaggtagtgcagcagcagctcctcgtcggtggggcggaagcggaagccgatgggcaggcccgcgacgggcgcgccggggccccgctgctgcaggcgccacgcgccgggccgggcctccatcgccgccgccgatcgacgggatcggatcaggattcggttttggatttgtttgggtggcttgcgcgcgatctgcctgggcgatcgatgtcagatggtaggcggcatcggcgacctgttttggcccgggggatctgaggaccgt

SEQ ID NO: 3285 - DNA, 1399 bp, Zea mays
  Clone ID: TF_ZmC545_8
ggccggggccttgactctctatttatcccccgatctccaagaacaacggcactccgctcccccatttttttctcacctcccgtggcagcagccggccaacacccgcaccgcagtccacagcaagaaccaagccacagcgaagaaaagatccaatggtgatggcgccggcggcggcgcagcagcagcggcgccgcgacgcggaggcggagctgaacctgcccccgggcttccggttccacccgacggacgaggagctggtggcgcactacctctgcgcgcgcgccgcgggtcgccgccccccggtgtccatcatcgccgaggtcgacctctaccgcttcgacccctgggacctgcccgagcgcgccctcttcggccgccgcgagtggtacttcttcacgccgcgggaccgcaagtaccccaatggctcccgccccaaccgcgccgccgggtcggggtactggaaggccacgggagcggacaagcccgtggagcacggtggcaggacggtcggcgtcaagaaggcgctcgtgttctaccacggcaagccgccgcgcggggtcaagacggagtggatcatgcacgagtaccgcctcgccgacgccggcgcccgcgcccgcgccaggaagcccggcaccggcacgctcaggttggatgactgggtgctctgccggctgtacaacaagaagaacgagtgggagaagacgcagcagcagcaggagaagaagcagaatcagaagcaaatggagtcggaggcctcgctctcgcactcccactcagacacgcggacgccggagtcggagatcgacgacgacccgttcccggagctggcctcgctgccggcactcgacgacatgatgggcccagcagcagcagcgcctgccggcgccatcttgcccaaggaggaggtggaagacttgggcggcctcggcggcgacgactggctcgcgggcatcaacctcgacgacctgcagatcccgggcgaggccgacttttatggctccatgctcgtgtcgccgatggccgccaagatggagcaggacgccgccggcttcccgttcttctgagaccttctgcgcaacgcaaactgtgtatagttcagatttcttcaggattcggagaaaaaaacagttctgctgatatctggttgtagtggtttagtgcacaagcagcagtatgccggtcagttaagattgaagtccattgtagttcatcaccacttgagctgtgactgtgataagtgacagcattctttcatttctggtctgctaattcttcaatggtcagaatatagtttgtggccttcccagagtggtcacaccactgtggagccttgagatggagtaaattttttcttcaaggtttacggtttacctctttaaaatatcttagtactgtttct

SEQ ID NO: 3286 - DNA, 1784 bp, Zea mays
  Clone ID: TF_ZmC227_1
gggccgacgcacgcgtccacacaacacgctagctctgcatcatccgttctggtgagcgagcgagcgagagacctagctaactgactgactactgtaataccagagatcgaacaacttggtcctgcagctcaagaagagagttttgtgcatttgggggccgggggcaagagagagagagagagccatggcggcggaccagcagccgcagctgcaggaggagatgaacgacgctgccggcggcggcctcaggctgcctccagggttccgcttccacccgagcgacttcgagattgtcagcttctacctcaccaacaaggtgctcaacacgcgcttcacctgcaccgccatcacggaggccgacctaaacaagattgagccatgggacctcccgagcaaggcgaagatgggcgagaaagagtggtacttcttctaccagaaggaccgcaagtacccgacggggctgagggcgaaccgggccaccgaggccggttactggaaggcgacgggcaaggacaaggaggtctacaacgccgcggaaggggtggcggtactggtcggcatgaagaagacgctcgtcttctacaggggcagggctcccaggggtgacaagacaaactgggtcatgcacgagtacaggctcgaaggcagcggcaggctccccgccggcctcgcgtccgcaaccggctcagccgccgccaacgccgcggcggccttgaaagcttctgcttataaggatgagtgggtggtatgtcgtgtgttccacaagaccactgggatcaagaagaccaccactgctgcaccggcgtaccaggtggccatggccggcgctgagatggatcagaatcagaacaacatccccttccccatgccgatgcaattttccatgctgcccgacttctccttggacccggtgcccccctactacccgtaccccaacgctggcgcggggatgccgatgcttcctatggcagcaggtataggtggtggcgccggtgggctccacctcaacggcgccgccctgttcggcaatccgatggccgcgccccagcccatgagcttctaccaccagatgggcacggggactgcttgcgctggcggcttcgatgtttctgcgccggagagtaggccgtcctcgatggtgtcgcagaaggacgaccaggctaatggcgctgagatctcgtcgatgatgtccgtggccggcccagggcctgcgaccaccaccaccatagagatggatggcgtgtggaagtactgaaaacgtggagggtggagggcaaagacatgaattcgcataaattaaatatgcatgtaatatctatatctgcattgcattttgtgaaatatgatgcatgcatggtttgtatattccgtaataaccagtagttggtaagctatgtgtgtgtatggatgtactagctagtacatgcaccgtatcattgcatgtgtggtatatgtctcgtttggtgttagtaatctgcttggttgtgctgatgactgatggttgtaagaagcagattcgagtttggtacaatattatcgtgaacctatatattatatatatgttaattatagtatgttgtttaattatatgaacttgattgccacctggatttacatctgcttggtcgtgctgatgttgtgttgtaatttgtaaaaagcagattgaagttcggtacagaaaaaaaaaaaaaaaaaaaaaaaaaaaaaaaaatgggaataaataatataaaagaacccaagtttacttccccgtgcttgcgaacgaaatagtttttttttagggc

SEQ ID NO: 3287 - DNA, 342 bp, Zea mays
  Clone ID: TF_LIB4738-084-R1-K1-H3
cccgcggaaatttccctatccctcggataaacccaaaaagctgcagcagagtgaccaaaagcaggcctgacgggatcctcggatctctagccaggcagcagcagatggagcacgacgtgcaccaccagcaggacatggagctgccgccggggttccgattccaccccaccgacgaggagctcatcacgcactacctcgccaggaaggccgtcgacgcccgcttcgccccgcgcgccgtcggtgaggccgacctcaacaaccgcgagccatggcacctgccatcccgggcgccgatgggcgaaaaggagtgaaacttcttctgcggcctggaccgcccgcacc

SEQ ID NO: 3288 - DNA, 325 bp, Zea mays
  Clone ID: TF_ZmC124792_1
tttttctcactgactgactactgtaataccagagatccggcaacttggcctggatcctcgactagatgactttccgcatttgggggccgggggcaagagagagagagagagagccattgcggcggaccagcagccgcagctgcaggaggagatgaacgacgcttccggcggcgggcttaagctggcttcagggttccgctttcacccgagcgacttcgagattgtcaggttctaccttaacaacaaggtgcttaacacgcgctttaactggaccggcattacggagggcgaccttaacaagattgagccattggaccttccgagc

SEQ ID NO: 3289 - DNA, 536 bp, Zea mays
  unsure (1)..(536): unsure at all n locations
  Clone ID: TF_LIB4759-009-R1-K1-A10
ccttccgggagcaagtactgngctccttattaactccttgaatggccatctagaaggctactagctagctgcatcaagagcatacatgacatatatacatcggacatagatcgaactcctgatcgtctatcctggcaagtagaaagatcgaccatggtggccaaggtgaagagagacggagaagtgctcgtcgccgccgccaccggagacagcgaagagcaagacgacttggtgctcccggggttccggttccacccgaccgacgaggagctcgtctcgttctacctccgccggaaggtggcgaggaagcctctcagcatggagatcatcaaggagatggacatctacaagcacgacccgtgggacctccctaaggcgagcacggtaggtggagagaaggagtggtacttcttctgcctgagaggaaggaagtaccggaacagcatcaggcccaacagggtcaccggctccggcttctggaaggccactggcatcgaccgcccgatctaccctgccgcggccggcgagtccggcgg

SEQ ID NO: 3290 - DNA, 1516 bp, Zea mays
  Clone ID: TF_ZmC750_1
ccgggactatcactttcctcttgtttttcttgcctgtctccatactcatcgatcgattgctttttggcgtcagttgcttttgaggagctgagctacaatcaggcaagggatatttccgagatcatagctaggttttacgaggaatgcatcccggaggtggacctctgtcagtgccaccaggcttccgcttccatccgactgatgaggagctcctctactactacctgaggaagaaggttgcttatgagcccatagatcttgatgtcataagggagattgatctcaataaacttgagccctgggatctcaaagaaagatgcaaaataggcactgggcctcaaaacgactggtacttcttcagccacaaggacaagaagtacccaacgggaacgagaacgaaccgtgccacgacggcgggattctggaaggcgactggccgagacaaggccatcttccttggcagcgccaggaggatcggcttgaggaagaccctggtgttctacatcggcagggcgccacacggcaagaagactgactggatcatgcacgagtaccgccttgatcaagagaacgttgaaattcaggaagatggatgggtggtatgtagggttttcaagaagaagagctatgagcagagaggccatgacgtggctgagatggtggcactggacgacgaagagctccagcctttcacggttcctgtccccggctggcactagctccctgccaacaacagaccacaagaacaaccctcacctcatgcaatatgacttcccttctttcgacccttccatgcagctcccacagctgatgagcgccgaccagcccgtgccaaccctattccccagccatcctggcgtcgccacggccatgagctcatcaatcgacgttgagtgctcgcagaacctgctgacgatgctgacatccaacggcagcgacgggatgctccacgtccgcgctggtggtgctggagctggtgtcgaccgcttcgctggcacgacagattggtcgatcctagacaagctcctcgcctcgcaccagaacctcgaccagctcttccacggcaaggtcaccgcagcatctgcctccccaatggctccataccatcaacagctcatggaactcggtggctcgtcgtcgtcgtcgtccttgcagaggcttccactgcagtacctcagcggcgagacgaccgatctcctcaggttccccaagtaattattggatcgacctcaagtttagctaccttgttgagcagtgaccatatcaggattttggttgactactgggctgcttaattcggcctacttcgtatggagtttagtgcttttaaatgtatatatggtgcaactgtttggggcatgcaggcatggaatgccatcgatctaccatggttgcttgcttggccaagaggatgtttttgatgtttccattttggcttagggttgctcgttaggttcttttggagaaaaaatgtgaagagatggcccggtcaattaagaacttctatttgtttccc

SEQ ID NO: 3291 - DNA, 313 bp, Zea mays
  Clone ID: TF_LIB3182-009-P2-M1-B4
gccatcatggacgccgacctaaacaagaatgtgccatgggacctgccgatcaaggagaaaaagggcgacaaagagtgctacttgttctaccagaacgaccccaagttcccgacggagctgagggcgaaccgcgccaactaggacgggtactggaaggagacgggcgaggacaacgaggtgtacaacgccgcggaacgggtggcggtactgatcaccatgaagatgaacctcggcttgtacacgggcggggataccacaagtgacaagatcaactgaggcatgctcgaatacaggctgtaaggcagcggcaggc

SEQ ID NO: 3292 - DNA, 491 bp, Zea mays
  Clone ID: TF_LIB4766-005-R1-M1-G2
ggccgcttttttttttttttttttaaggtcaaattgcgttgctagatagatataccgagattatgatataagcagtctcctttcaagttggttgacttcataaggcattaaacagttccctacgttgagttccagctaagtcaaacaacaacaacaaaaaatctcccaaaagggtcacagttccgcccagccacatcatccacggacaacattctgaaccaagcgcaagggctcagttctccaaatcatctccttcatcgtcatcatcaccatccaaatcatcatcatcttcatctccttcaaattcatcgtcaacctcattgttgaagtacttcaaaggattaggccacaaatcttccttgatgatctccgccacctcatcttgcacaccatcagcaagactcttgagctctgtatcaccaaaccagctaaaaaaactttcctctactaatgcccggttactccccttcttgataataccatttccattg

SEQ ID NO: 3293 - DNA, 504 bp, Zea mays
  Clone ID: TF_LIB4315-023-R1-N1-G8
aagcaggattttccaacaaaaggctgaaaagggtttcttacaacaagatataactattacgggaaaaaaaaattaaaagcttggctgttggcgtcaaaacccacttttgcttaaaattaaaaacctttcaacacacaaaactttacacactttgttataaaaaaaacatgtaaccaaatggggtttctgggtatccctgccatcattcctcaccaacttcgtctttttcggcatcatcttcatcaaaggcaccttttttctcctcttcatctccatcatcggctccataaaagtccttttcatcagcgtcattgttgaaataggggaaagggttgggccacaaatcttccttgatgaaatctgcaacctcgttttgcatttaatcctcaacatcctccttggggtgagcatcactaaaccaggtaaagaagctctcttcaggaagggcacgtttggttccattcttttcaagaatcactccattcgccaggcctttgccctttt

SEQ ID NO: 3294 - DNA, 568 bp, Zea mays
  Clone ID: TF_LIB3632-022-Q1-K6-D5
tcgatactgttgtggggaaaataccaggacgctgagggcgttccatactttctggcttactgacatgtaaaacaaaggacggtggtgtctgaggagatacaaggagcgcagactaagcccgtccgaggtatctaggagatatcaactggtctacaatcgaggatcctactggtttcaacctgggatggtggtttgatacaaacccattcttgaagaattttgtcctgtcaaaaacgttccacatggtctgatgaagatgacccaattttggagaaagctattggaactgtaattgagtggtattctgggctataaacctatcacacatgattctaacaaagaaggctacgatggggtaaatgaatacgaaggctatcactaaaaccgaggactgggacagttttttcaactttctcaatcccccgcatgtccctgaggatgatgatgacctcgatgaagacactgctgttgagctgctctgtctaatggcatcatgattgtgacattggtactctcctaagggataagattatccctcagtcgctgggctggtttactggtgatgctt

SEQ ID NO: 3295 - DNA, 829 bp, Zea mays
  Clone ID: TF_ZmC7683_2
caaaaggtgctaaaaaagaagccacggaagggttcaaagaacactaaacctatcacaaaaactgaagattgtgagagcttcttcccgttcgagcgtccacctcaagtccctgatgatgatgaggaaattgatgaggatatagctgaacagttgcagaacgaaatggaacaagattatgatattggatctaccatcagagacaagattatcccacatgctgtctcgtggttcactggagaggctgctcaagatgaggagtttgaagttatggatggtgaggatgacgatgatgaagacaatgatgatgaagacgaagatgacgaggatgatgatgatgatgatgattacgattcaaagaagaccaagggaactgccggaggggaagggcagcagggcgaacgacctgcagagtgcaagcagcagtgaggtgctgcacaatgaatgttggcaggcattgtttgtggagcaattagtttggttctgcttgatgctcaaggtcattgagttggtttgtggaaccttcgagggggcgcttgttggttttatggaattggttggggaatttttctgggacatggcgttatatcattatatgtgggtagtttcttcactttctgtattgggtttcagatattatatgtgttcttatgcttggagtgaagatggttgccactctggtatgtcttattgtgcataccactggcatagtgtgctgtctgtactttcatcaagcgtgccgtgccgctgagaaattttgctctaggggaaaggctagccttttgcctgaaaatgttttgcgaattgcatcttgcataaaaaaaaacccccc

SEQ ID NO: 3296 - DNA, 470 bp, Zea mays
  Clone ID: TF_ZmC13098_5
tttggtgatacagagctcaagagtcttgctgatggtgtgcaagatgaggtggcggagatcatcaaggaagatttgtggcctaatcctttgaagtacttcaacaatgaggttgacgatgaatttgaaggagatgaagatgatgatgatttggatggtgatgatgacgatgaaggcgatgatttggagaactgagcccttgcgcttggttcagaatgttgtccgtggatgatgtggctgggcggaactgtgacccttttgggagattttttgttgttgttgtttgacttagctggaactcaacgtagggaactgtttaatgccttatgaagtcaaccaacttgaaaggagactgcttatatcataatctcggtatatctagcaacgcaatttgacctcagtgtcctgtttgtgattcagtttttgcttcggtcggttgcctaaagatgacgtattgccttcagtttgtgctc

SEQ ID NO: 3297 - DNA, 707 bp, Zea mays
  Clone ID: TF_ZmC518259_1
gctctctccccgcctcctcgccgcccactcccgctctccctagggcttccccctcctctcctcggcggcgcggcggcgaagtccaaccaggccccaccggagctccgaccatgggcggcgagaaggagaacctcgacctctccgacctcaacacctccctccccgccgccgccgccgccctcagcgccgaggaccgcgtcggcctcgtcaatgccctgaaggacaagctgcagagcttggcggggcagcacgcggacgtgctcgagtcgctctcgcccaatgtcaggacgcgtgttgagtttctgaggggcattcagagccaacatgatgagattgagacgaagtttttcgaggaacgggctgcccttgaagccaagtaccagaagctgtatgaaccattgtatgctaagaggtatgacattgtaaatggagttgtggaggttgatggtgttgctaaagaacctaccactgaaaatgctgccgaggggggagattcagatgcaaaaggtgtcccagatttttggctcactgctttgaaaacaaatgacgtgttgactgaggagatccaagagcgtgatgagcctgttttgaaatatctaaaggatatcaagtggtctagaattgatgaccctaagggtttcaagcttgagtttttctttgatacaaaccctttcttcaagaactctgtcctaacaaatcctatcata

SEQ ID NO: 3298 - DNA, 583 bp, Zea mays
  unsure (1)..(583): unsure at all n locations
  Clone ID: TF_LIB4073-015-Q6-K1-B10
caaagttgacattgaatatccgttcacatttgaaggtccntgaaatttataaatgtgtcggttgtaatattgattggcacaaaggtaaaaatttgacagtaaaaaccatcaaacggaagcaaaagcataaggcacgtggagcagtgcgtacagtcaccaaacaagtaccggctgattcattctttaatttcttcaaaccgccagtaattcaagaaaatcaagacgaaagcaaaatcgatctcgaagatcaagcaatcttaagcactgactttgaaatcggtcactttttacgtgcgcgagttattcccaaagctgccctctattatacgggagacatagtcgaagacgatgatgatgatgactatgatgaagaagaggaagaagaagaagaagaaggtgatgaagaagaagacgaagaatcagaatcggaccaagaaagtcggccaactgggaaacagcaacaacgtgttcacggcgttgcaaataaaaagaaaagtggtagtggtgccggcggtgctaatcaaactccagccgaatgcaaacaacaataagaggaaaaccaaacaaatcaatataaaattct

SEQ ID NO: 3299 - DNA, 1153 bp, Zea mays
  Clone ID: TF_ZmC13098_1
attgggtacctcgagacgggccggagcttcccagctccgcctccttttcctgccttcctcctcactagtcgctcccccgcggctcgcgcaggcgggcgacacaacgaggctaaatccctatcgcgaggaggcgtgtgaggccagcggctttgcgatgacagcaccagcggacaaggggaagaaggccaagactgatgccgacggcggcgaggagaacgaacagatcgacggcgtcctcgtcctctccatcgagaagctccaggagatacaggacgagctcgagaaggtaaatgaggaagcaagtgacaaggttatggaggtggagcagaaatacagtgagatccgcagacctgtctatctcaagaggggtgacattatcaagaccatcccggacttttggctcacagcgtttatgagccatcctctattaagtgagcttctgactgaagaggaccagaagatattcaagtacttagactccattgatgtggatgattctgatgttaaggcaggatactccattcatcttaacttctctgagaacccgtactttgaggacacaaagcttgcaaagacctatatctttgctgatgatggaacaaccacaataaaagcttccgaaattaagtggaaggaaggaatgggacctgcaaatggaaatggtattaacaagaaggggagtaagcggccattagtagaggaaagtttttttagctggtttggtgatacagagctcaagagtcttgctgatggtgtgcaagatgaggtggcggagatcataaaggaagatttgtggcctaatcctttgaagtacttcaacaatgaggttgacgatgaatttgaaggagatgaagatgatgatgatttggatggtgatgatgacgatgaaggcgatgatttggagaactgagcccttgcgcttggttcagaatgttgtccgtggatgatgtggctgggcggaactgtgacccttttgggagattttttgttgttgttgtttgacttagctggaactcaacgtagggaactgtttaatgccttatgaagtcaaccaacttgaaaggagactgcttatatcataatctcggtatatctagcaacgcaatttgacctcaaaaaaaaaaaaaaaaatcaaaaaaactcgagctcgtgc

SEQ ID NO: 3300 - DNA, 285 bp, Zea mays
  unsure (1)..(285): unsure at all n locations
  Clone ID: TF_700336790H1
gaaaaagaagaccccaaaggaattccagaatatacgctcactgttttttcanatgttgacttgctcagtgatatggttcaggaacacaatgaacctattctgaagcacttgaaagatattaaagtgaagttctcagatgctggccagcctatgagttttgtcttagaatttcactttgaacccaatgaatattttacaaatgaagtgctgacaaagacatacaggatgaggtcagaaccagatgattctgatcccttttcttttgatggaccagaaattatgggt

SEQ ID NO: 3301 - DNA, 755 bp, Zea mays
  Clone ID: TF_ZmC502799_1
gacgcctgcggtaccggtccggaattcccgggtcgacccacgcgtccggtttcttcctgctgtgaacatcagggctctgggctctgtctcccggtcatctccctcgcgccatggccccgaagcggcagtctgcgatcctgcctcagcccaagaaacccagaccggctgctgccccgaagctggaggacaagtcggcctctcccggcctgccgaagggagaaaaagaacagcaagaagcaattgaacatattgatgaagtacaaaatgaaatagacagacttaatgaacaagccagtgaggaaattttgaaagtagaacaaaaatataacaaactccgccaaccattttttcagaagaggtcagaattgatcgccaaaatcccaaatttttgggtaacaacatttgtcaaccatccacaagtgtctgcactgcttggggaggaggacgaggaggctctgcattatttgaccagagttgaagtgacagaatttgaagacattaaatcaggttacagaatagatttttattttgatgaaaatccttactttgaaaataaagttctctccaaagaatttcatctgaacgagagtggtgacccgtcttcaaagtccaccgaaatcaaatggaaatctggaaaggatttgacgaaacgctcaagtcaaacgcaaaataaggccagcaggaagaggcagcacgaagagccagagagcttctttacctgggttactgaccattctgacgcaggtgctgatgag

SEQ ID NO: 3302 - DNA, 1709 bp, Zea mays
  Clone ID: TF_ZmC23984_1
ggccggccgggaagtctctttctgccccacgacacctttttcccgacaccctaccactccaactctccaccccaaccgccgccatggacgtccctaggtctaacaagcagcctaccagcacaccgcagaacacacccgccaatgctgcacccatctcgtcgcgcgcccagcagccgaacgtcggcaccatcaaggaagaggagcttgaccgcgccgccgccggactgttcgctgcaaaccccgctctcgtctcgatgatgcaggccaagctcggctcccttgttggccgctcaagcggctacatcgagtcactccctggctctgtccgccgccgtgttgctggcctgaagggtgtccagaaggagcactctaagctcgaggccgagttccaggaggaggttctccagctcgagaagaagtacttcgccaagttcacaccgctgtacgagcagcgtgccaagatcgtcaacggctctaccgagcccacagaggagcaggtcaaggttggcgagcagcaagatgaggacgatgaggatgacgaggaggctggcgagaaggagctgaacaaggacgagggcaagggcgtcaagggtattccagagttctggctgagcgccatgaagaaccagatctcgctcgccgagatgatcacagaccgcgacgaggccgcactgaagcacctcactgacgtccgcatggagtacctcgaccgccccggtttccgtctcattttcgagtttgaggagaacgagttcttcaccaacaagaccatcaccaagacatacttctaccaggaggagaacggttacggtggcgacttcatctacgaccacgccgagggcgacaagatcgactggaagacgggcaaggacctgactgtccgcgttgagagcaagaagcagaggaacaagaacacaaagcagacccgcgttgtcaagaagaccgttcccacagagtcgttcttcaacttcttcgaccccccaagccctccccaggacgaggatgacgacgcttcatccgatattgaggagcgcctcgagctcgactaccagctcggtgaggacatcaaggagaagctcattccccgcgctatcgactggttcaccggcgaggctcttcagtacgagaacatcgaggacttcgacgagggcgagtttgaagacgaggatgatgaggatgaggacgggctcagtgacgaccgcgatgaggacgaggagtcagatgacgagaacgacggcacaaaacccaagcaggaggctgctgagtgcaagcagagctaaacgtctctttcgaccgatcttcttcgatgatatctccgggcattgggcttgttcaatctagatggcttctccggctgtgacaggctcgcaacctgacctcttcccattatctttgcacagcacttcatgttttcgacacggcgtatcattgcatcaaaagagctggacgccgattgggggtggttgttctagctatacatgaactatactggttctacctccctcgctctactccactcaaccctaatagtccctgcccatggctcgccctcagacacgtcagacccggacatgcggtctaaacacagtattggcccctgcggtggtactcaacgcgtgagggagctacgagcagcggatgaatcacgactacagcgatggatagtaaaagttttggtatatagagcgaaatgaatgagatacgagcac

SEQ ID NO: 3303 - DNA, 437 bp, Zea mays
  Clone ID: TF_LIB3150-004-Q1-N1-D4
aagccgaccaacccttccgcccttttcttcctttccgacgccgggggggggaattccgaatcgagggcgagacgggcttgatcgaaaagtcgactatggacggagagaacgaaccctacgttatctccgacctcaacgcctccctccccgcagccgctgcagcccttagcgccgaggaccgcgccggcctcgtcaatgctcttaaggataagctgcaaagcctggcgggccagcatgccgatgtgctaaagacgctttcgcccaatgttaggaagcgtgttgagtttttgagagggatccagagccaacacgattaaattgatggcaagttttttgaagaacgggtagcacttgaggctaagtaccataaagctttatgaaacctttatacacaaagagggtattgaaattggtaaagggagaaaatggaggtagat

SEQ ID NO: 3304 - DNA, 2086 bp, Zea mays
  unsure (1)..(2086): unsure at all n locations
  Clone ID: TF_ZmC2218_1
cgatgtaagagaggacgatgacgttgacacagtcttccggaagctcaaagaggaaacagtcatcgactcaaactggggcatagggatttatgttaagtcggtagccctaaaacatggcatcactacccaaggatgctcaataggtaccaacaaacaaaggagaagaaatgcttgtgttaagccaacacccaacagagatggagcaaacagaaaagcacaatccacccactatttatttatctcccttactgaagcacaagccttgatgactgaatggacagtgaatcccgagaaaaactgaaaatttcattgagtgaactactaccagctccaattcatgctggacgctgtttgagtgtacacagccaccatatgtgcaataactgacttctggctgaaagccgagaaaggcgatgacttatgtagattggttntggggggantangcgcacgaggagaggactagttctcttcatctctctcttcctcttctcccgccgcccagcttctctcttctctcggcggcgccaccacggcgatcaagcgcgatacgggcgtaaccgaagaatcgacaatgggcggcgagaaggaaacctttgatacgtccgacctcaacgcctccctccccgcggccgctgcagccctcagcgccgaggaccgcgccggcctcgtcaatgcccttaaggataagctgcagagcctggcgggccagcacgccgatgtgttagagacgctgtcgcccaatgttaggaagcgggttgagtttttgagagagatccagagtcaacacgatgaaattgaggccaagttttttgaagaacgagctgcccttgaggcaaagtaccagaagctttatgaacctttatacacaaagaggtatggaattgtaaatggagaagtggaggtagatggtgtttgtgatgaaccggccagtgagaatactgttgagggaaaagaaccagacgctaaaggagttccagacttttggcttactgccatgaaaacaaacgaggttttgtctgaggagatacaagagcgcgatgaagccgctttgaaatatctaaaagatatcaagtggtctagaatcgaggatcctaagggtttcaagctggattttttctttgatacaaacccattcttcaagaattctgtcctgacaaaaacgtaccacatggttgatgaagatgacccaattttggagaaagctattggaactgaaatcgagtggtatcctgggaaaaacctaacacagaagattctaaaaaagaaacctaaaaaaggttcaaagaatacgaagcctatcactaaaaccgaggactgtgagagtttcttcaactttttcaatcccccgcaggtccctgaagatgatgatgacatcgatgaagacactgctgatgagctgcagagtcaaatggagcatgattatgacattgggaccaccataagggataagattatccctcatgcagtttcctggtttactggtgaggctgtgcaaggtgaggattttggtgagttgggcgatgatgatgaagatgatgatgatgaagacgatgacgaagatgatgaggatgaagaagaggatgatgatgaggaagaggatgatgaggaagaaagcaagccagcaaggaagtcaggatctggtcgcagacataaggcgccacagaaggtgtcgcagggaaatgcggaacaaccagcggagtgcaagcagcagtagaatggcctgttgatgttggttgatgcagtattttccattgagctgcctagaggttatgtgtgcgcaggccagatgttggtgttgatatctcaagtgtggtttttattagtaggcggtgagggtgttgtctggagcactttggtgctgcgttggtggatggatattggtttgcaacttgtctgctagtgtcttggggattcagctacgtgcaatcggatgatattatatggttgtaattatctttgcactcggcctataacgggctctttatttgcactgggtctaaaaaaaaaaaaaaaaaaaaaaaaaaaaaaaaaaaaaaaaaaaaaaaaaacccacgcgtccgcccacgcgtccgcggacgcgtgg

SEQ ID NO: 3305 - DNA, 1628 bp, Zea mays
  Clone ID: TF_ZmC7683_1
tcgagccggccgggaaatggaccctcgccgccctcattcctcactctttttttatcccctcctctgccattccctccctctcccctcaacccagcgcccccctcccgccgccactagggtttctcctccccgcccacccccaaaccatccccgaagcttccagtgcgtcgcgccgcaaccatgagcgacggtaaggactccctcgacctctccgccctcggcgccgccatccccaactcggccgagctcagcgcggaagacaaggctaaccttgtggcgtcgatcaagaacacgctcgagggattggcgtcgcggcataccgacgtgctcgagaacctcgagcccaaggtcaggaagcgcgttgagaagctcagggagatccagggcgaacacgatgaacttgaggcgaagtttttcgaagagagagctgctctagaagctaagtatcagaagttgtatgaaccactttactcaaagcgttatgaaattgtcaatggtgtggtcgagattgagggtatcacaaaagaaagtgcagctgaaaccccagaggagcaaaaaagtggagatgagacctctgctgagcaaaaagaagaaaaaggtgtaccagctttctggcttaatgcaatgaagaatcatgaaattttagctgaggagatccaggagagggatgaggaagctctcaagtacctcaaggacatcaagtggtacaggatcagcgagccgaagggttttaagcttgaatttcactttggtacgaatatgttcttcaagaattcggtgcttacaaaaacatatcacatgatcgatgaggatgaaccaattctggagaaagccattggtactgaaattgaatggtaccctgggaagtgcttgacacaaaaagtgctaaaaaagaagccacggaaggggtcaaagaacacgaaacctatcacaaaaactgaagattgtgagagcttcttcaacttcttcagtccacctcaagtccctgatgacgacgaggaaattgatgaggacacagctgaacagttgcagaaccaaatggagcaagattatgatattggatctaccatcagagacaagattatcccacatgctgtctcatggttcactggagaggctgctcaagatgaggactttgaagttatggacggcgaggacgatgacgatgaagacgatgatgatgaagacgacgaggatgaagatgacgatgattatgatacaaagaagaccaagggaactgctggaggggaagggcagcagggtgaacgacctgcagagtgcaagcaacagtgaggtgtgatgtcattaagttggttttgtggggccgttgggtgggggttcttgttggttttatggaactggcggggggatttttctgggacatgttacatgtgggtctgtattgggtttcagatgttatatatgctcttcatatgcttggagtgaagatggctcatggttgccactctggatgtcttattgtccataccactggcattgtgctctgtactttcaagcgccccgtcccccccgctgagaaattttgttcttaggggaaaggccaccctttcccctgaatgttatgcgaattgcatcttgccccccccccccgggcgttaaggtaccaa

SEQ ID NO: 3306 - DNA, 648 bp, Zea mays
  Clone ID: TF_LIB5116-017-A1-PF1-G8
ccccgcctcctcgccgcccactccctctctacctagggcttccctctcccctgctcggcggcgcggcggcgaagtccaaccaggcccccaccggagctccgaccatgggcggcgagaaggagaacctcgacctctccgacctcagcgccgaggaccgcgtcggcctcgtcaatgccctgaaggacaagctgcagagcttggcggggcagcatgcggacgtgctcgagtcgctctcgcccaatgtcaggaggcgtgttgagtttctgaggggcattcagagccaacatgatgagattgagacgaagtttttcgaggaacgggctgcccttggagccaagtaccagaagctgtatgaaccattgtatgctaagaggtatgacattgtaaatggagttgtggaggttgatggtgttgctaaagaacctaccactgaaaatgctgccgaggggggagattcagatgctaaaggtgtcccagatttttggctcactgctttgaaaacaaatgacgtgttgactgaggagatccaagagcgtgatgagcctgttttgaaatatctaaaggatatcaagtggtctagaattgatgaccctaagggtttcaagcttgagtttttctttgatacaaaccctttcttcaagaactctg

SEQ ID NO: 3307 - DNA, 347 bp, Zea mays
  Clone ID: TF_LIB3088-035-Q1-K1-G12
gggtttggacgttgaagaaggggcattgaaagaaacaacaccagatggtgagggggatcatgagaaaggagtgcctgcattttggcttactgccatgaaaaacattgaagtgttggctgaggagatctcagagcgtgatgaaggtgctcttaagtatctcaaagatatcaagtggagcaggatagaaaacccgaaaggattcaaacttgagcttttctttgacaccaacccttattttatcaattctgacttgacataaacatatcatatgattgatgaggatgaaccaatattggagaaagcaattgggactgaaattcaatgggccccaggaaaatgcctgacac

SEQ ID NO: 3308 - DNA, 1140 bp, Zea mays
  unsure (1)..(1140): unsure at all n locations
  Clone ID: TF_ZmC13098_2
ggtacgctcattgggtacctcgaggccggccgggctcccagctccgcctccctttcctaccttcttccctccgtctcccagctcgcgcaggcaggcgacacagcgacgctaaaaaccctagagcgaggaggcgtgccaggccagcggtttgcgatgacggcaccggcggacaaggggaagaaggccaagaccgatgccgacggcggcgaggagaacgagcaaatcgacggcgcccttgtcttctccatcgagaagctccaggagattcaggacgagctcgagaaggttaatgaggaagcaagtgacaaggttatggaggtggagcagaaatacagtgagattcgcagacctgtctatctcaagaggggtgacattatcaagaccatcccggacttttggctcacagcgtttttgagccatcctctactaagtgagcttctgactgaagaggatcagaagatattcaagtacttggactccattgatgtcgatgattctgatgttaaggcaggatattccatttaccttaacttctctgagaacccgtactttgaagacacaaagcttacaaagacctattcctttgttgatgatggaacaaccacaataaaagcttctcaaattaagtggaaggatggaatgggacctgcaaatggaaatggtattaacaagaagggaaacaagcggccattagtagtggaaagttttttctcctggtttagtgatacagagctcaagagtcttgctgatggtgtgcaagatgaggtggcggagatcatcaaggaagacttgtggcctaatcctttgaagtacttcaacaatgaggttgaagatgaatttgaaggagatgaagaagatgatgacgacgacgacgacgatgataatttggatggtgatgacaatgacgatgatggggaccaggagaactgagccctcgcgtttaggcggggaattatgtgacccgtttgggggattttttttggttgtttgacttagctggaactcaacttagggaactgtttagtgccttatgaagtcaaccaacttgaaaggagactgctatatcataatctcggtatatctatcaacgcagtttgacctgtgattcaaaaaaaaaaaaaaaaaagcggtcgccttcnn

SEQ ID NO: 3309 - DNA, 1122 bp, Zea mays
  unsure (1)..(1122): unsure at all n locations
  Clone ID: TF_ZmC2218_4
ggggcgacccaggccagncgggactacccgctgagtttaagcataaataagcggaggagaagaaactacgctaaaggagttccagacttttggcttactgccatgaaaacaaacgaggttttgtctgaggagatacaagagcgcgatgaagccgctttgaaatatctaaaagatatcaagtggtctagaatcgaggatcctaagggtttcaagctggattttttctttgatacaaacccattcttcaagaattctgtcctgacaaaaacgtaccacatggttgatgaagatgacccaattttggagaaagctattggaactgaaatcgagtggtatcctgggaaaaacctaacacagaagattctaaaaaagaaacctaaaaaaggttcaaagaatacgaagcctatcactaaaaccgaggactgtgagagtttcttcaactttttcaatcccccgcaggtccctgaagatgatgatgacatcgatgaagacactgctgatgagctgcagagccaaatggagcatgattatgacattgggaccaccataagggataagattatccctcacgcagtttcctggtttactggtgaggctgtgcaaggtgaggattttgctgagttgggtgatgatgatgatgatgatgatgatgaggatgatgacgaagaatgagagaagaggatgatgatgaggaagagatgaggaggaagaaagcaagccagcaaggaattgggatccggtcacaaacagaaggagccgcaggaagtgttgcagccttgcagggaaatgccgaacaaccagcggagtgcaagcagcggagtgcaagataaccagtgtttggttgatgcagtattttccattgatctggagcactctgtgctgcgttagtggatggaaatcggtttgcaacttgtctcctagtgatctcagggttttcgctacgtgcaatcggatgatattatatggttgtgtaattatctttgcactcagccgataatggcgctttatttgtcctaggtctatattggctatcttaaattgatttgtagttagcttagagcatatacaatcgaccacccaaatcagggggtctatttttgatttgatgcccactttttttct

SEQ ID NO: 3310 - DNA, 768 bp, Zea mays
  Clone ID: TF_ZmC2218_2
ttgggtacctcgaggccggccgggttcaactttttcaatcccccgcaggtccctgaagatgatgatgacatcgatgaagacactgctgatgagctgcagagtcaaatggagcatgattatgacattgggaccaccataagggataagattatccctcatgcagtttcctggtttactggtgaggctgtgcaaggtgaggattttggtgagttgggcgatgatgatgaagatgatgatgatgaagacgatgacgaagatgatgaggatgaagaagaggatgatgatgaggaagaggatgatgaggaagaaagcaagccagcaagtcaggatctggtcgcagacataaggtgccacagaaggtgtcgcagggaaatgctgaacaaccagcggagtgcaagcagcagtagaatggcctgttgatgttggttgatgcagtattttccattgagctgcctagaggttatgtgtgcgcaggccagatgttggtgttgatatctcaagtgtggtttttattagtaggcggtgagggtgttgtctggagcactttggtgctgcgttggtggatggatattggtttgcaacttgtctgctagtgtcttggggattcagctacgtgcaatcggatgatattatatggttgtaattatctttgcactcggcctataacgggctctttatttgcactgtgtctatgttggctatcttgaattgatttgtagttgcttaggctgttccattgctatgccaaccattatcttgtattcttgt

SEQ ID NO: 3311 - DNA, 724 bp, Zea mays
  unsure (1)..(724): unsure at all n locations
  Clone ID: TF_LIB4172-012-Q1-L1-E5
tggtacgcctgcaggtaccggtccggaattcccgggtcgacccacgcgtccgcctggctgtaggtagcgactacagttagggggcacctagcattcaggccctcatcctcctccttcccagcagggtgtcacgcttctccgaagactggatgactgccatggaggagtcacagtcggatatcagcctcgagctccctctgagccaggagacattttcaggcttatggaaactacttcctccagaagatatcctgccatcacctcactgcatggacgatctgttgctgccccaggatgttgaggagttttttgaaggcccaagtgaagccctccgagtgtcaggagctcctgcagcacaggaccctgtcaccgagacccctgggccagtggcccctgccccagccactccatggcccctgtcatcttttgtcccttctcaaaaaacttaccagggcaactatggcttccacctgggcttcctgcagtctgggacagccaagtctgttatgtgcacgtactctcctcccctcaataagctattctgccagctggcgaagacgtgccctgtgcagntgtgggtcagcgccacaccttcagctgggagccgtgtccgcgccatggncatctacaagaggcacagcacatgacggaggtcgtgagagnctgnccccaccatgagcgctgctccgatggtgatggcctggctcctccccagcatcttatc

SEQ ID NO: 3312 - DNA, 840 bp, Zea mays
  Clone ID: TF_ZmC1197832_1
cgtctcgaggatccccgtttccgtctgggcttcttgcattctgggacagccaagtctgtgacttgcacgtactcccctgccctcaacaagatgttttgccaactggccaagacctgccctgtgcagctgtgggttgattccacacccccgcccggcacccgcgtccgcgccatggccatctacaagcagtcacagcacatgacggaggttgtgaggcgctgcccccaccatgagcgctgctcagatagcgatggtctggcccctcctcagcatcttatccgagtggaaggaaatttgcgtgtggagtatttggatgacagaaacacttttcgacatagtgtggtggtgccctatgagccgcctgaggttggctctgactgtaccaccatccactacaactacatgtgtaacagttcctgcatgggcggcatgaaccggaggcccatcctcaccatcatcacactggaagactccagtggtaatctactgggacggaacagctttgaggtgcgtgtttgtgcctgtcctgggagagaccggcgcacagaggaagagaatctccgcaagaaaggggagcctcaccacgagctgcccccagggagcactaagcgagcactgcccaacaacaccagctcctctccccagccaaagaagaaaccactggatggagaatatttcacccttcagatccgtgggcgtgagcgcttcgagatgttccgagagctgaatgaggccttggaactcaaggatgcccaggctgggaaggagccaggggggagcagggctcactccagccacctgaagtccaaaaagggtcagtctagggtaccgagctcgaat

SEQ ID NO: 3313 - DNA, 682 bp, Zea mays
  Clone ID: TF_LIB4745-011-Q1-K1-A10
cctgccgggaacaggccaattgacttcgttcgcaacagcgggacaaagggaagcaacagcgagggaaaaccccattcctcgtctctgctcctctaatcaccatcgcccccctctctctccgatcactgcatctcttctccgcctggtcggcggtcggacggcgcaatggacattaaggtgtgtggggtatgtggcagtggtagcaactctgctcttattgtgaagtgtgttcggtgcaatgattatgaacaccgttattgtatgaaggtggtggcacgggtatctccacaggaatggtattgtgccaaatgccaagagcataccaacagaggcccgaaacctagtcaaggtgggcaaacggagctccaaaagccatgtcatggtcgtgatatgacgagcgagagggaaacttcgaagttgcacctcagtcaaagcagcgtagtgcatcaaataataagtcccaaatctctgaacagatttgaaaatgctaaagtgaagttcatctcttctgaagaagtggcattattgagtagagagaggccaccatctgttacatcaagatttactttgtcgcagccaagcaaggcatcatctcctccaactacaaaacacttgtccaatatgaattgtgtatccccaagcagagtgataaaaatgtgcaagccctgaaaccatgtgctga

SEQ ID NO: 3314 - DNA, 1836 bp, Zea mays
  Clone ID: TF_ZmC36928_1
ttttctcgaacgcgcaagagacatgtgcatcttttcattaagaaggaagagaaaaaggatccaaaatggatcagtacaggaagacccccattacggtggtcgaaaacaaagaaacaaaaatacatccataaataaaaggaaccagaaactactatgacctaaagacctgggattggggctgttaagagatctaagtttgtagcccctcctaacacccacaggtccctttcctcgtcagttctcttgatggcttcattaaggcagggagcaaggccgtcaaaaacacagacgtttcagtgtttccacaatatccagaggctgagactgataagcgagtttagtccttttctggcaattccatgcaactgatcactacatcttttccaccagagcatggtattctcttcatagacatgaggagtgaaattctctttaaacaatcagctacatgggcatcttgcttcttttcctcgtcttctactatcttgcacgtgtagcatgcccaatcatccgtaatcgtcccagtccatggtggtgatagacaatgagggtgaacatgccgagaacaaccagaacaatgaagcaacaggctctgctcctcctctgtgttgcaaatttgacacatgtggaactcctcatcagattctgttgattcatgatctgactcagatggagaataatcatcggtgtcgtcatcgctcacatctaccactttcgctactttcctaactcgccctttaaatgatacatccagtgcacgtttacgctgaatctctgtgactgtttcttcaccttgctgaaaagaatcaggttttggaggtaaagggtagttttcttctaccaacttaagaagaagctcccgagggccagaaacaaagtcttccatttcaactccatattttgtgacagcttcttcagttctagcttctccagtgctctgaaggccaatcaccacacatttgttctctgccaaggcctctttagctaacctcacaacagcaggtacctttgcagacatgcacatgtgcctgaagaaacgctgatggctggcccaatacaatcgccatatttgatttgaattgccatcagcaaataattcacttgctgataaaagttcaaggcgcagttcagcccagaattcagctgctcttctgtacatgttctgctttacaagaatgaggttaaactttgtcagcagcttgaaccagtaatttcttgcaaacacccagctcacgaggagatggtcaatggtttccatttcctggtcacaaagggggcactgatcagggtgatcaagccccctcctttgaagtctgtcagctgtccaacacctctgcagcgctacaagccataggaaaaatttgcatttggggggggggggaccaggagtgccaaaccctgtcacaatgctcaaagtatgttgacccaataaataaactctcgtaggctactttggcagagtatttgccattatgggcaaacctaaaaatgtgcgtcaacaaacgcagatgtctggccctatacaatcgccatatttgatttgaattgccatcagcaaataattcacttgctcataaaagttcaaggcgcagtccagcccaaaattcagatgctcttctgtacatgttcatcattcattcctcaagtggagcctccactatataaaaatcagcccctttgtaacttaatgtacggcatacatacatacccctagctttcatgtccatggcaacaagttcaagtgctaccacaccacctctctcaagagcacctaacaatcgtgggaaagttgcatattatgttccttcaccaccaagtgcagtacgaaccatagag

SEQ ID NO: 3315 - DNA, 1980 bp, Zea mays
  Clone ID: TF_ZmC4701_1
tgggtacctcgaggccggccgggatatcctttctccaaactaatttgtctgtcttgattactgctgcagcaacggtcgtccactcaaacaagtcaactttagacacatctgctaggcccgatgtaaatgctgtacagagttccaatcagacggtgaaaaaccatgacacaaaaccagtggcagttcaagccgcgacaggtaaccctgttatgggtcatcgtgctacaccaggcgtggcatttgctccaccaaaacctactttcatcaatcacaatgagatagcaaagaatgttctacaatttcttcaccaacctgcaaaccatcctagctggactccaccatcaactgagtacatgcattctcgtttgtgctgtcaaatatgcaaagttgatatcattggtacagacaatttacttgtttgtgatgcttgcgagaggggagtacacttgaaatgccttcatcagtatggcaataagggcgtccccaaagctgagtggcattgttctgcatgcctgactcagagtaagggaaaacccttgccaccaaaatatggcaaggttacaaggactgtagttgcatcaaagactgctccacctggtggtggagcacagctttctttgcaggaatcagcagaaaacatggctgcaaaggaaaatcaccaaaagttggctgcaaatggaaatcttatgaagccattctccattcatggtggcagcacagtacccgacagtaatgtattggcactgagtgctgtcatggctggttcacaatcacaattagtttctaccttgagaccatcaatagtcgttaaagctgaaacaccctctaatggaaaggaaggaactgggcaaccatgcaatactgcaatacaacctaatgtgcgatcatcttctcttaacaacagattgagaagtgattcctgtttgaaccctgctgattcagcaaatgaaatcatgcatggtaagcatgctgcagaaatttctggtgttgaagcaaaggtcaagtctgaagcaaactctgaggttgttgtgagtacagatgaggaattggttcatagcagtggaacatcaatcgaaactgaacgagccaaggttgtcgctattgaagaaaacagggcacaatcaacctttgagacagataaaatgaaagttggggaaacaactatcaacacaggaacaacagatcaatgcatcaatactgaagaaaagctccccagtttagcaacttctgaggcacacacaatcactgacgtgaagatgactagcaatacaggaataccagtacagcaacacaacattgctactattgaagagaagacccagattgatgcagtgtctgatccacatccacatgcaatccaagatattcaagatatggaaatgggcaccaacaatggaccacccatagatcaaacaagcagtcttgttgaagaaaacccccctggacaatcctcttcaattgctgatgcgtgtgtcactgctaatactggaataccaacagatcaaacacagcatccaaatgagtcaactgaaaatgcagtaaagaaatctcccaacagagaactatataaagaaaaaccgggctgcaacataacctcagatattacccaaaaagtaacttcaaatggcatcatgtgccctgaggacaaaactttatgtgttcatgaagataaagcagtgggttgtgacacagaagcaaaagaagaaaactaatttagtagcaggttgcatccaattttcattttccaggtgtgtttgtaatcaaactagttattagaagtcttatgtctgaaaatcttgcctattttgatttatgctgatagtgattcttttaaagtacattatttgaaactgatgtttgtagttattctttacttattatagatatgtcaatcacattagcttatttgaactcatggtaataagtatgcttaagtgacctttaaggcctgtattttattgcagcacatgcttttccccc

SEQ ID NO: 3316 - DNA, 2880 bp, Zea mays
  Clone ID: TF_ZmC299_1
cccgcccgcccagcggcaaacccaaaattcccaggctccgctcgacctgcctactcccccaccatcccaaaccccactccagcctccgccgtcatcccctcctcccgccaatccgccacctgtcggacgcccgcccgtccacgaaaccctagcccccagaccatcccactcgcaaccgccatgccggacctcccctgcgacggcgatggcgtctgtatggtctgccgcgtcgcatccccgccggaggtcgacctcctcacctgctccacctgcaccacgccctggcactctccgtgcctctccaagccccccgccctcgccgacgccgccagctggagctgccccgactgctcccccgactccgctgccgtcgccgctccctcaggccccgccaacaccctggtccccgccatccgcgccatcgaggctgaccacacactctgcgaccaggagaaggcgcgccgccgcgaggcaatcctcaccggcgacgcccccgaaggagcggacgacgatgacgacgaagcgtccgacgatgcccttgagatcgtcggcaagaacttcagctgcgttttctgcatgaagctccctgaacgacccgtcacgacaccctgtggccataacttctgcttgaaatgcttccagaagtggattcaaaatcagaagaggacgtgtgggaaatgtcgggcgcagatcccggccaaaatggctgagcagccaagaatcaactccgcactagtcgaagttatcaggatggctaagatttcaaagaatcctaactctgctggctcagcagttccatatcaacggaccaggaagagtggtgatatgcatgatgacggcaacggcagcccctgctgtgagcagcggccgcagggtgactcggagcagtgtgaatgccacgggagctgatgacagtccagcgaggaggaccagaagccgtggcagagcatgctgaaggtagtgggtgctgggcgccctcttttttgggtgtggaacctttgctgtgcgcagtgttgcagccatttcttttggtttgggggagaccgacctgctacaggtattccccatgcttctttcttccaggatgcaattcctatttaatttcaaggtagctgctgcactcgatctgcgagatgcaattttgttaactggcagccaggtgttggcttacgccatgattttggcacaacaggttcctagagagaaacaagatagctgatgttcttgcaaaaaaaaaagcaagacgggcaactaccccaaatccatgccttttctctaggggcttcattctccaacctgtaatatctagccatgtgttttgaaacttggattgttcggggcaacatgaccccccatctttgtagcatttgtatgatgtgataattgttgatatatgcttcgtgtcctccaattgctggacctttgtctcactatattgtcttaaaaggtcgcacaaagagaagcggtcctcatatgctcctgaatctggtgtgaggtacgacggggtttacaggattgagaagtgctggaggaagattggtattcagggtaagttcaaggtctgcaggtatctctttgtacgctgtgacaatgaaccagctccttggaccagtgacgatcacggtgaccgtccaagaccattgccaaagataaaggagctgcaaggtgcaactgatataacagagaggaaagggcgcccttcatgggattatgatgataaagatggctggaaatgggtggtgcctccgccagtcagcaggaagcctgttctatctggggatcctgagaccgacaagcaaatccgtagagcaacaaagcgtgttcatttgtctgttgctgaaaggctgcttaaagaatttgcttgttcgatatgccgggcggtgattaaagaaccacttacgactccatgtgcccacaacttttgcaagacttgtttgcttggggcatatgatagccagtcttctataagggaaagaagccgtggtggtcggactctaagggcacagaagattgtgaagacgtgcccttcctgcccaactgacatctgtgacttcttagagaatccccagatcaaccgagaaatgatggagctgattgagactttgcaacgcaaggctgttgaagaagccaagatgacttcagatgatgctgaggaatgtggtgatggtgattcggaggaaaatgatggtgatttggtgaagggagaggatgttagtggtttgaatgagggagagcaagacagtgcagacgctgatgctaatgttgaaggttctgtgaagattgtggttgaaatcaaggaggaaggaaaagatgataaaaggtcaaagatgggcgcgactgaagtggtggatgtgttagttgatgaagatgctgtgaagcagacgaaaaagcgcaaggttgatgctgaggctggcaccaacggtggcaagaggatgaagagcagtagtaccgtggaagaggttgctgtgtgcgtcactcctgtgaaacggagcaggaagagtggtgatatggatgatgagcgcaacggcagtcctgctgtgagcagcggccgcagggtgactcgcagcagtgtggatgacactggatctgctgatagtccggcgaggaggactagaagccgtgccagagctgatgctggttgctgaaggggtagaggaagcggggaggcggcagaaccgcagaagccagccgtgtcttttttgggtggttgtacgtacatatactgggagccttgccttatattttggttgaggggtgcaagtcagatactgtttgctgtgcacacctgtttcttttggtttgggagaccgattgctgcttcctggatgctaagcgttcatccaagacccttaaaacattcaattcaaatcggacgcgggg

SEQ ID NO: 3317 - DNA, 471 bp, Zea mays
  Clone ID: TF_LIB3632-035-Q1-N6-H10
aggatcaaaataatttaattaaatcaacaaataaaaggcatatggtaaaagaacaggaatcgaccatgccgccccgccccagcaacaatggaaacaaggggggggggggttgggttaagttgaccaagacaacacaaggactgacctaccaacaacggcatgacatgccacactggctagttacatagaacaaaccacagcaaacactggccacctttgctctcgccagggcaagggctgattcgccacaaaagcagcacatctccccgggaggggggcactcaattttcaccccgtctgccttaatgattcagccttgggctaaaaatttgaggaaggggcatatacattggaaaggctctttgaaccattttctttcaaacaggctgagcaaacaaagggatctagttttttggcctgtgcaatggccatagccatgcaagagggatggaaccaggccttgcaagcttc

SEQ ID NO: 3318 - DNA, 453 bp, Zea mays
  Clone ID: TF_LIB3069-027-Q1-K1-H9
aaaaagtccaggagtttcagcacaagcggttttatggatctgacatgtccttaaaaggacgagttagtgaacttggaaaaaaggaagacgtgagtgaagatgggggtgatgagtatcctccaccagattcagatcatgaatcaacagaatctgatgaggacttctatatgtgtcagatttgcaacactgaagaggagaaaaactcattgttttgttgctgtatttgtgcttcacgggttcaccctggttgcctcactccaccttcgactgacatcgtgaatgatgattggtcatgttatggttgcaaggagaaagttaaaagctacttaaaagaaagagatgcttacttgactgaactctcaaagaggtatgatgctgcattggacagaaagtcaaaaattcttgacataatcccgtccttggatttacctagtaatcctttagatgatatca

SEQ ID NO: 3319 - DNA, 550 bp, Zea mays
  Clone ID: TF_LIB3960-010-Q1-N6-B6
ggcgcctcccatccccgcccctaaccccaccgatgactgggtggacggctcgtggacggtggactgttcctgcggcgtcacgttcgacgacggcgaggagatggtcagctgcgacgagtgcagcgtgtgggtgcacacgcggtgcgcacgctatgtccgcggcgttcacacatccttctcgtgccacaaatgccggaggtccaagcgtgtgccttcctccgccgacgaggccgaggttgctgagctcctcgccgagctgccaacccaccgcccgcctccgctgtaccgccgctgggccgaggtcccgctcccagcccgcgtccacgtccacgggcttcctggcgggggcgacggcgctcttttccgcggcgccccggccttttccgccgccctgtggcgctgcaccggctacgtccccaagagatttggcttccgctactgcgagttcccctcctgggccgacgataatgatggggctgatgctctttttgcgctggccagagagaagcccagggagatgacggatgatgttttgataggtactgaaccg

SEQ ID NO: 3320 - DNA, 2992 bp, Zea mays
  Clone ID: TF_ZmC10069_1
cggaccggcgaccaggcgcgtgggcacgggagcaagcgcccgcggcgggccgaggaggaggaacaggaggaagaggaaatggaaccgctggtgggggaggaggaggaggtggcggcgctggagggggaggactattgcttcgtctgcaaggacggcggtgacctccgcgtctgcgatttcaggggctgccagaaagcttaccatcctgcttgcgtggggaaagatagcggcttcctcaattcagatgaagaattcatctgtgaatggcatacttgctttatttgtaaagggcgttcacgttattattgcttttgctgtccgtggcaagccttttgtcaaaattgcgtgaaacaagcagaattcgtcccagtcttgaggaagacaaagggattctgcaccaactgtttaaggatggcaatcatgattgagaagaatgttgatgttgactccgatggggagagggttgatttcaatgacagggcaacttatgaatttttattcaaggaggaactacagttccagtactccaaagtgtactccagaaataaacaagagatgttttgctgctcttgttcgccataacattgatttaatctacttgaagaaatctttggttgtggatctactaagggagccggatacatttggcagcaaagttattggctgtttggtgagaataaagattgatctcaacgattataattcctacatgcataaaaaggtgcaccaacatagaaagttgtatcagcttggacgcctaacaggcatggctatgtgggctggggttcaaaagagctcatggagttcctttcctctataggcaaagatacattgaattccctagatcaacatggtgctactgaagttgtgaaggtgtacattcaacaaaaaggtctcttagcaagagataagaaaaaacttgtcatatgtgatgacaagctcaagattttgtttaggagatcaaaagtgaggtacaacaggatatatagcttgttaggtaagcatattgctgtgaatatgacatcagaggatgaaacttttgctaactctgatgataacaatgaaacatttgtgagaaagaaagctcgtattgggaactacagttccagtactccaaagtgtactccagaaataaacaagagatgttttgctgctcttgttcgccataacattgatttaatctacttgaagaaatctttggttgtggatctactaagggagccggatacatttggcagcaaagttattggctgatctttccttggaaagtttatcggaagaaaaacctgaagttaataaggcccacaccgatggtaggtacagctgtaatacacaatcaaaatcggagcactacagctgctattcctgcgctaccaaagtatttgcatcgccatgctgccactgaagccaataatgctggtgatatttcatctgttcaggagctggatgttggatgaattaaagctagcacggatgttgatacaactggaacagatgtccagcacgggagcattgaagctactaaagccaggggatctggaggagaaagcaagaagtttacgtagggagatagtgaatcattggatcagtaaagaactccagaggctagaaagattaattgacagggcgagtgagaaaggttggcgcaaggaaaagtttgaataccttgataagaaacaactcttgcgcaagccatctgaacaacaacgtttacttgaagaggtgcctcaagttattccagagacagaagataataaagatactgaatttcaagttacaggacaagacaaacctattcaaaagagtactgtcgctttacaaggtaccaatggagagagcattgtttctttgaaaaaaggctcagaagaaaaatgtaaacatttgcttctatagtatgtgttaaaaaaaaatccatgcaaggcgaacattgtgatgtttttattgtaggtacatatgtgacaagggcttcttttttgaagagccacacagggaaaaaatccaaaggtactgatggggagagagatctttccttggaaagtttatcggaagaaaaacctgaagttaataaggcccacaccgatggtggtacagctgtaatacacaatcaaaatcggagcactacagctgctattgctgcgctaccaaagtatttgcatcgccatgctgccactgaagccaataatgctggtgatatttcatctgttcaggagctggatggtgaaggtgttaaagctagcacggatgttgatacaactggaacagatgtccagcacgggagcattgaagctactaaagccaacgctgctggtgatgcacctggagcattttttcaaaagcagtgtgctaaagctgctgatgttattaccattgacgacgatgacgaggacaacagtcatcgttgttataaagaagaacaaacagcagtagttgatcttgaagctgattatgctggggataaccatcccgtgcagcttgaggcaaatagtcgaggccataaacacgtgaaggtgaaggagcgcatttggtattacattgatcctcagggtgatgagcaagggccatttacaatgcagcatctgagcatctggtggagcaatggcttcttccccggcgacttcagggtctggagaacaggccaaactagtaatgacgccatcttgctcgtggacgcactgcagatgactaggtaggctagttaggagcctcgtagaagactagatgtatttatgtatcgcggaaaaagcgggggggcttcgaggcagatatatgtgttctgctggggtgtacatccttctgtgttatatgatatgatgatgacatcctatccccaccatcacctcacccaccaatcaaaaacatcttgccaaacaaaacaatggttgtttgatggcaaagaggatttgttgggatgaaatatttgtggactattcagtatccctgtgctgtgacaatgctactgaaaatctggttctttggcatgttaggctgtttt

SEQ ID NO: 3321 - DNA, 1864 bp, Zea mays
  Clone ID: TF_ZmC1921_1
aggaacgtgagcggtgagcaaccctaccccaggcccagcttgcgctctctctctctctctggacgacgacgcctacgccagggccccaggtcgctgccgccctacgccaggtccccttcgccggcgacgagcaccagatgattagctcattgagcaacatacagcaacagatagctacaaatcgtggcatatgactccaaaatggagtgcatgctcttcaaatagctacagagaactacctttacatgaaaatggagagtgcaaatcaaccttaacagagtcagtcccttcacctacaagctgttttggcttacacactgcaaacacaatgtgctccttatcttcacaaaagaaggatggcaatgtttataaaagaaggaagatggataaggattcaaattctcctataacatttgaagaggctaaagaaatggcaacccaaagttgcacaatttctgatgaccactcatcattactgctacccattatctcctcagagtcagaggcattgcttttaaattcaacagcaggcgtggcaggtcctatcctagattgtgaggagcctgctgatgttccattggagccaaattctggtacagatgatagatgcttcatttcaaacatgtctccaacttccatgactccggacaaaaagaatgctgctgaatgttcctcatcgaatattggccctacagaatcaattaccgagcatatttcaccaagggatctttgcattgccatactgatgaaagatggactaataaatgaatcaagaacaagaatggcacataaagaggaattcactgacaatgatgctaaccctttgttggcatgcaataattgtggctgcttggaacattcattgaagatgctgatatgcgattcttgtgaagcaggatttcatttgtcttgctgcattccttgtattaaggagctacctactgatgaatggtattgtgctccatgcttgtgtaagaaacccaagagtctttatggcaaactctcagagggcaggataaatccttccaggaatactaacacaaggcctcatgggatgagtcacatagagtacatgctgaaggatgctgaaccatatgtaactggggttcgacttggtagagattttcaggcagaggtgccagaatggtctggtccatcatccagcagcgatgtttactttgacgagccctgtgcaattgattctgcagaactaactacatttaatttgtgcaaaatgagtaatcaaagtcattcttccattggtaattggatccaatgccgtgagaccttgaatccaggagattctgacaagcaagttgtctgtggaaaatggagaagggcacccttatatgttgtacagtcagataattgggattgtttttgttgtcttctttgggatccagtccatgctgattgtgctgttccacaggagttgaagactagtgaagttctaaagcagctgaagtttgtaaacatgctaaagaatcagctggtggaccaaaaccagaagcctgcttaaataaatgccagtaccagagtgggcgattccttaagagaaggatacccattatgatggtatgaatgagttgccgtatgtggcgttctcttgtagtaactagccgtctgtgaacatgtgagaactatgttgttctagcctgttaaacgaaatgatctgtactgtcttctatagggtcttggtacacaagagttgtacaacatagatctgtctgtgcagtccagggagcagcgtgtcgctactgctgtgatcgccgccaaacgatcctgtgatcctgcgccaagttttgtttcttggtaacttctggtattgcgcgtgccactgcatggcgtggatgacgttttctgt

SEQ ID NO: 3322 - DNA, 1914 bp, Zea mays
  Clone ID: TF_ZmC3525_1
gatgaaaattgcagcccacaagctgaatatgaactgcaggattccaaaaggagtaggtattcatctaatgatctgaggtcacatgtggctctccacaaaagaacatctggtggaaccaagaatcgaagaacaagtgtatcccttgccaggattaagaaattcgggagcaaatcagtatgctattctggcagtgacaaagacaatgctgtgctagcccatgaagtgaatgctaggagatacagtggaagactcagctcaaattctccatgctgtgtttgtgggatctcagacctggagccttgcaatcgattaatagagtgcagcaagtgctatatcaaagtgcaccaagcctgctatggtgtactaaaagttcctaggggtcaatggttttgcagaccgtgcaagaataataccatggatacagtctgtgtgctgtgtggttatggaggtggagctatgacaagggcactgaaaaccaagaatattttgaaaagtttgctccaaggtttgatgaatttagaaaggtcagaatattatgttgattccttaggaaatgcaagcagtgagtgtacaagcttgcaaaatccagtagacagtgcacatggggataacattatgaatgcgaagaacatcaccagcaattcctggacctctggaaaatactattcgagtttacttggaccacaaccaatgcagtgggttcacatggtctgtgggctgtggacacctggcacaaaatgcccaaatgacaccacaatgagcgcttttgatgtttcaggtgcttcacctgccaagagaaatactgcatgttcaatatgtgacagaactgggggctcatttgtcaagtgccgagctgtaaattgtttggtattctttcatgcttggtgtgcacatcagaggggtttgctgcaaagtgagcctgaaggcgagcacaatgaaaatattggcttttatgggcgatgcgtgtctcacgccattgttttttctagtcacgttaatcctaagaaagaatactttagaaacaacaattggacatgtgcacgtacagagggttttaaaggccgaaagggagaaggcttttctgatagtagccataaaaaatatgaagagtacagtggcgagttcggtgtttcccaagaacagataaatgcttggttacgcataaatggttcaaagccctgcggacgaggacagaaggagtacatccattacaagcagttaaaagggtggaagcatttggttgtttacaaatctggcatacatggacttggtctctacacatcagtctttattccacgcggctctatggttgtagaatatgtgggtgaaattgttgggcaacgggttgctgacagaagagagatcgaataccagtccgggaaacggcaacaatataagagtgcatgttatttctttaagattgacagggagcatattattgatgccacccgcaaaggtgggattgcaagattcgtcaatcattcatgccagccaaactgcgttgcgaaaataatctcagtcaggaatgagaagaaggtaatgttctttgcagaacggcacataaacccaggggaggaaattacgtacgattaccacttcaaccgggaagatgaaggccagaggatcctttgcttttgtagatcaagatactgcaggcggtacctcaattagtttccggtgggcgtaacatgtctatatataacttatatatctatatgtatatcttatatatttacaaattacaattgcgattcatgcctgctgtatatgtaggaacttgcatctagaactgcctgtttatcttttgtgaagtcaaatgagttatcagctgttcatgtgcccgaaaaaaaaataaagtcacgtgcccttttttttttttttgggctttttttctcctaaatcttaatccattct

SEQ ID NO: 3323 - DNA, 629 bp, Zea mays
  Clone ID: TF_ZmC62111_1
ctggttggaagagagagaggatcagatgatgatgagctcaatgaagctgtggtggccaggtctgaaccgaaaaacctagttcaaccaaatgcatcggtacccttgacctcacaaggctttaaccaattattggatcaacccgggccttctgatccttctgttgtatacaaggacagtatctgcaaccgatgtgggaaagtagcaggagctggtagcgttctcaaatgttacaggtgcatgctaccttgccacatttcatgcattgaggctactggttcacccatttcaactggaaggtggtgttgtaaaaactgcagcgctggcactaaggaaccagttgaaggagacatggtcttagcccatggcaatccaaattgcttgcatgaaagttgtgtcgtctgcgacagacttgcggcctgcaggtctccaaaatgtgataactcaagagcattggttatttccagcgtggacccagagattgatacatgttactcatgcaagatatgtggaggcaccgaagaggatgagaagaggttcttgatatgcggcaacgtcctctgccgatacatgtactaccacattgggtgcctcaagtccatgcagatctctaccagtgtagagaggggcag

SEQ ID NO: 3324 - DNA, 2255 bp, Zea mays
  unsure (1)..(2255): unsure at all n locations
  Clone ID: TF_ZmC89463_1
gctcgtgggggggcctcctcacaaaaagactgcaccaaagaagctgtctcccaaaaagaagcagaagatacaaaagaaacaatcacgcaagattgagaccaggaggaatcagatagttctgaaatgcaaatagaaatttggcaaaaggggtaagcgtggccggcccaggaagaacccaacggatctgtcaaagaatgaaccatcaaagatccatgaaagtgaaccatcaaatgtttccaaaaatgaaccagtgaaacgtatatcaaaacgattacatgataaatacatgaaaagtaactcaaatgtatccgagaatgcagctagctctagcaagaggaagaggactgtttcacagtattcatactggttgaatggcctccgatggtcacaaaatccacatgatgaacgagcaagaagtttcaggaaagaaagagtagtttttccatcagaagatgctgaaatttctgaagtcagcccagtatgctgcttgtgtgaaaaatgctataatgaagaggatatctatattgcctgtgaaaaatgtgaagactggttccatggggatatatattctgttaacattgagaatgtgaacaatctcattggtttcaagtgccatagatgccgccggataagtctacctgtctgcccgtatgcagagactgtaacagttgtcaaaggccagtcagatgaggatcattgcatcaagtttgtagatcaatgtgttggcaagtttgtggaggatgaggatcccaattgtcccaaagatcttggtgctccgggtagtctgcaagagcttcatgatcatgaaattgagcaggggctcaatgttcatattactgagatagaattcagttacgataactgtctagaggagctgaatgatcatggctgttcgaaagagtttgatgctcatagcactgagaaagatctagaggatgataaaagtttgaaaaaggtagacatccataatgagttgagggcgcttgacgatcttggctctgagaaagaacctggtgatcattgtaatccgaaaagatctcacagtcacatcanatctgaacctcgaggccggccgggccgggtgatcaagagatgaaggacaataattgtctaaatgaactagatggagacaacaattggaaagcactcgacagctataacagttggaaactgctcgacagccataacagtcaagaggagcttgactgtactacaaatagcaagttttctcctaaagaaataccatgtcctatggaacttgacggttttagtagcctgaagcttgtcagtcataacatcttggaagaacttgataatcataactgtctaaaagagaacggtaatgaaaatagttctaaagagctggacaacaatggaagtccaaaagattcaggtgactgtctagcagaacacttcaacagcagtaggatatctggcaatgaggcactggtccttacacctgaaactgattcggtaaatgaatctcttggtttgcaatccaaggatgatcctgggaagtctgttcctactgagcatgagattgatcttcaggtggtggtgactttatagtgtactttggacagtcagaaaccttccagcctcagcatgagtcccattagttccactggtcatttcttgatgctgttctggttgataattttgttgaccttgcctcattgccgtaatctacaataaggaaaaaaagctattctttatttcctttgggaaatattctgatctgactagccaagcgatagaataattaactcttgaggttaagttatattattcttaatagggctgacatagggaatagttagggtttcatttcatttcctttccaagcttcacattgcctgtcagaatatggagtcatgtcgcccacgattatgcattgatttggatccctctaagtacaagtgactggtatttggctgccctgcagtaatatatgatgttcaagggagatagcagccacagccgccgccaagcatgaggaggcattatattccattccccatggtttctttttgtgggccccttagatgttgcacaagatggatgtgccaaaacctgatgattcattctttcaagtttgctcctaacagtcagtcgcaatctttatctgtaaaaaatgctccaagggaactcgtctggacagggttaattggattttgtataggtttgggttatcagtcttcctagttacagagttcactctagcatggaattggtttgaacaatgcaaaaataat

SEQ ID NO: 3325 - DNA, 564 bp, Zea mays
  Clone ID: TF_ZmC1247420_1
ggaaggcattccctgtgatatgctcttggacagcgtctacacactgcaagctgaagtgctctttgagctttgttctccatgtggccacatttgaaacaccaatgtatggggcacggaaatgacattcccgccataatccttctttccaactcaccatcagtggcattaggatccaataattgtgcaatgcacttagggtggtaaaaatatccacaagatgcttgattgcattgaaagaccttagcatttggcccatgggatggttcaagctctccacatctaaaacattggtgttgcttatttttgcagtttgcacatagataagtaccaattctctttacttctgctgaagtgtaatgaagactttcacatttagattctctgccatctttctttgtggggtggaaagacctcttgcatggaccgtcacagctaagcaaatgtcctccatcatcacatagcgcacatatttgatcggtaacgtcatcatcactgctgccatcaccatcatcactgctaccatcacaatcatcaccactgtcatctttgttaccataattgtta

SEQ ID NO: 3326 - DNA, 819 bp, Zea mays
  unsure (1)..(819): unsure at all n locations
  Clone ID: TF_LIB4766-109-A1-K1-G9
gccggccggggttcaaaaaaaaannaaaaaaaaaaaaaaaaaaaaaaaaaaatccctcctcctccgttaattctccgctctccatttattcctttccagttccgccgctccattcccagctccccccaccaagggcaatccctctccgccatccaatacaatcacgcctgcgcacacgcaaccccagctcaagccccaagtccaaaccctaacccggcggcggaagatatggccgacacggggcgcgacgccttccctgacgaggcggagcccgcgttcaccctcgacgagtacatggaggacatcgaggccgtggagctggaggcggatttggtgctgggcggggacgagggcaaggagtgcacctacgccggcggatacctcaagcgccaggccgtcttctcctgcctcacctgcgtgccggatggagtcgccggggtctgtaccgcctgcagcctcgcctgccacgacgggcatgagattgttgaactttggacaaagcggaagtttcgttgtgattgtggcaactcaaagtttggtggtcacctttgcaaactctgccctgagaaagattctgagaattcagcaaatacttataaccataacttcaaaggttcctattgcacatgtgggcggccttatcctgacccagaagctaaggagcaagttgaaatgatacaatgctctatatgtgaggactggtttcatggggatcatattggtcttaactctattgaagagataccaagagatgaggaaggggagccactatatgaggaattgatatgccacaaatgctcatctgggttgcatttcttg

SEQ ID NO: 3327 - DNA, 621 bp, Zea mays
  unsure (1)..(621): unsure at all n locations
  Clone ID: TF_LIB3912-027-Q6-K6-F9
ttctcctngaanatacggtaccgggatcggtctgagccgccgaggcccgcgcaggcgcttccttatatatcgtttcttggcgtggctaaggtggtggtgaccatccggtgaatatgaacattgtgtgtgaagtatgtggagatattggttacagacaacttctgctatgttgcggagactgtaagcgttatgctgtgcaccagtactgtttggacaaagttgttttcgatgcaacgttgctagaatggttctgttatgaatgcctacaaaggcgtggtgaagttacttgcgtcgcatctctagaacaggtgtcaagtgaaagcccactaagtcatgctcattttggtcctctagtacatcagcgtactactaagagggtggagtcagtaacagggccatattcacccagtgatgactgtgaggaattattttcctaccctggcatagaaagcatcccaagtgttcaagaaataagtgtagatcccattaagacttcaagtatttctgaacatgataccatagaagcagctgcaagcagtgaaagattcacggagtgtcaaaaggctagctcctgtcgcgaggngataactgtgaagatggctatggcgccctcatcatatg

SEQ ID NO: 3328 - DNA, 849 bp, Zea mays
  Clone ID: TF_ZmC2557_18
aaaagattggcgacgaagcaaggaacgcaccccgaatcccaactcctgtgtccgccatcgcctcgtggcggtcgctcctgctcctgctgctgctgctgctcccccagccgcccccgcccggagcacgccgccggcgccgacgtcggcgcgtcgcatggatatggcccccgcgtctgtctacttcaacccgcgctcggtcgaggaaatcttcaaggacttctccggccgccgcgcggggctcgtccgcgccctcacctccgatgtggacgatttctgcagattgtgcgacccagataaggagaatttgtgtctctacggccttcccaacgggagctgggaggtgtcgccgccggcggaggaggttcctccggagttgcccgagccggcgctcggcatcaactttgcgcgcgacggcatgcagcgccgcgactggctcacactcgtcgccgtccactctgactcgtggctcatctccgtcgcattcttctacggtgcccgcctcaacggcaacgaccggaagcgcttgttcagcatgatgagtgatcttccttccgtcttagaagcattcgcggacaggaaacacggcagagataggtctggggttgatagcagcggcaagtccagacactcatcaaagagaggaaaagatggccatgccaagagtttcagggcagcagctcctgccgccaaggagtatgacgaagacgatgacgaggaagacgaggaggagcacacggagaccttttgcggaagctgcggcggcctttacaacgcgagcgagttctggatcggctgcgacatctgcgagcggtggttccacggcaagtgcgtgcggatcacccctgcgaa

SEQ ID NO: 3329 - DNA, 740 bp, Zea mays
  unsure (1)..(740): unsure at all n locations
  Clone ID: TF_LIB4980-054-R1-K1-A2
tcgaggccggccgggccgggatggtctgccgcgtcacctccccgccggaggtcgacctcctccattgctccacctgcgccacgccctggcactccccgtgcctctccaaggctcccgccctggccgacgccgccagctggagctgccccgactgctccctggactccgccaccgtcgccgctccctcggcccctgctaacaccctcgttgccgccatccgcgccatcgagtccgacaacaccctctccgaccaggagaaggcgcgccgccgccaggccctcctcgccggcgacgcccccgacgtcgcggacgacgacgacgcggtcgacgataccttcgaaatcgtcggcaaaaacttcagctgcgttttctgcatgaagctccctgaacgacccgtcaccacaccatgtgggcataacttctgcttgaaatgcttccagaagtggattcaaaacaagaagagaacctgtgggaaatgtcgggcaccgatccctgccaaaatggccgagcagccaagaatcaactctgcgctagttgaagttatcaggatggctaagatttcaaagaatcataactctgctggctcagctgttccataccactatatgcgaaatgatgataggcctgataaggcatttacaactgacagagctaagaaggctggaaaagcaaacgcatcgagtggccagatctttgtgaccattgcacctgatcatttggncctatacttgcagaaatga

SEQ ID NO: 3330 - DNA, 1463 bp, Zea mays
  Clone ID: TF_ZmC3769_1
tggaggtcttgtctcaacaaggtttgtgcataaaatgtggtgaaggtggtcagttgttggaatgcaatggctgttttttagccgcccatagcagctgttttggttcatcggcgacatttgaaggaaccaattttttctactgcccggtatgcttgtataagaaagccactgaagcatataaaaaggcaaagataacatattgtgaaactaggaagaaccttgttgctttccttggcacagcacaagccaccaatcaacctgacaaacaactaaatggggcgcagccaggagctgccaacagagatgaagagcctcatgatgagcaacattctaaagggtgtggcgcatcaaaaggggcccatgaaaatgaagtatacaatcttgctcatcaggatgaagagcatcatcagcagaggaagaagcagaaaataaatgctataggtaagagttatcctaaggaggtactcactgagaaggttcttttccagaactctgatcctgcatccattaataaacattcagtgctccagaataacaataaaacaccagttaaggatccagagaaaaagcagcaagcgggagacgaagaagctcgcaaagaagctggtaatgaaaactcatctcatgaaacaggagcttcatctccgagaagatgtgatcctccttcgaatcaggacgttgaggctgaccaggacgatagccttacaacttctaatcaatctggtggttctgatgaaatagaagctacatcttctaatgactctgccaagcaatcatcacccccttggcgtggtatgggacacaacaaaaaaggattgcacgaaaaggagccagctgtatcaagtaaatctagaaaaggtattgggaaacaggatcaacatatgcatacttcacgaaggaaaaaaaaattgcacacctgcaaaagcgctattccaatcctgttgcgccacctggaagacgcaaaaaactctgttggacagaaaaagaagtagctattttgagggatgggatggcaaaattctctccacataataatggtaaagtcccactaacccagatactgcaatatggccgtcgtgtgtttcacaagacgcgtctgccatgtgatttgagggtcaagtggaggaacatggagaggaagaagtgggcaggcttactgatgctggcaatcttacacagtgccacacacacacacacacacaactgttgtgtgtcatactgaattactaaccacaccttcatttgtttgtgtccatctgcagatctgatgccgtcgacatggaacactgatgtggtactagaacatagcggaacactgatatggtactaatagcgaatggaggagggtttcttctaaaatagtattttgatgcacagggtgggcatccttttgtgactggttgtgtcaacctagacctactatgcccgtgagagagattgctaaagagtcaactttcttttgg

SEQ ID NO: 3331 - DNA, 1819 bp, Zea mays
  Clone ID: TF_ZmC8733_1
caggccggccgggccggggattccctctctaccggatcccccccctccctcctcagcttccattccctctcctccgttaattctccgctctccatttattcctttccagttccgccgctccattcccagctccccccaccaagggcaatccctctccgccatccaatacaatcacgcctgcgcacacgcaaccccagctcaagccccaagtccaaaccctaacccggcggcggaagatatggccgacacggggcgcgacgccttccctgacgaggcggagcccgcgttcaccctcgacgagtacatggaggacatcgaggccgtggagctggaggcggatttggtgctgggcggggacgagggcaaggagtgcacctacgccggcggatacctcaagcgccaggccgtcttctcctgcctcacctgcgtgccggatggagtcgccggggtctgtaccgcctgcagcctcgcctgccacgacgggcatgagattgttgaactttggacaaagcggaagtttcgttgtgattgtggcaactcaaagtttggtggtcacctttgcaaactctgccctgagaaagattctgagaattcagcaaatacttataaccataacttcaaaggttcctattgcacatgtgggcggccttatcctgacccagaagctaaggagcaagttgaaatgatacaatgctctatatgtgaggactggtttcatggggatcatattggtcttaactctattgaagagataccaagagatgaggaaggggagccactatatgaggaattgatatgccacaaatgctcatctgtctgccatttcttgaaattgtatccagatacaatttgggcttctggtaagccgaatctggcagtggaaactgatgcaagtgactcgaatgtgatgaaaaaaccttcagggcatgctgaccctgagaaacatgaaaatggtgctcttgttgataatacggttggcgagaagacctctgttgagaatgattctacaaaagctattgcagttcctgaggaggccaatttgggtagcagttctggcaacaactgcaagttaggagtggatgtgaatacaatgccagctattacagataaaagtgagccttttttcatgtctaaaggttggagggagacactatgcaggtgtgaaacatgcttcaacttctatgcacaacgaggtattgcatatcttattgacaaggaggattctattgaggaatacgagaagattgccaagcagaagagggagatgaaactggagcagcagcaaggagctgagacaaattttctgaattcacttaatcatgttcagaagatagagatgataagtggcatcaatgacatgaagaatgagtttcagtcctttctggagtccttcgatgcatcaaaaccggtaacatctgatgatatacattcattcttcgagaatcttgctaagaagaagaaacagaggttatcttagcttttgtgaccgcatcggaccctacccgaggcaaccgttctgctggacagaggtcctagtttgttgggctagtaaatgtaatgttatcttaggtggtacttactaatcgggccagtaatgttgaattctagctggaacgcggtaatgtttgatgcaccgaagtcgcttgcagtaggttccgatggcccaagccaccaaaaacctgtttgctccatgaacctcaatcctgttaggtgataatataatatacattgtgttgccaccgtgcttttttcttaaaaaaaacagtaaaaaaaagagttccaaaaataaaaaaaaaaataaaaaaattatatataattt

SEQ ID NO: 3332 - DNA, 733 bp, Zea mays
  Clone ID: TF_ZmC8733_5
ctgcgcgctaacctagaaccacaaagggtgttggtcgattaagacagctggaggcggatttggtgctgggcggggacgagggcaaggagtgcacctacgccggcggatacctcaagcgccaggccgtcttctcctgcctcacctgcgtgccggatggagtcgccggggtctgtaccgcctgcagcctcgcctgccacgacgggcatgagattgttgaactttggacaaagcggaagtttcgttgtgattgtggcaactcaaagtttggtggtcacctttgcaaactctgccctgagaaagattatgagaattcagcaaatacttataaccataacttcaaaggttcctattgcacatgtgggcggccttatcctgacccagaagctaaggagcaagttgaaatgatacaatgctctatatgtgaggactggtttcatggggatcatattggtcttaactctattgaagagataccaagagatgaggaaggggagccactctatgaggaattgatatgccacaaatgctcatctgtctgccatttcttgaaattgtatccagatacaatttgggcttctggtaagccaaatctggcagtggaaactgatgcaagtgactcgaatgtgatgaaaaaaccttcaggcatgctgaccctgagaaacatgaaaatggtgctcttgtggataatacgggtggcgagaagacccttggtgggaaaggattctacaaaagc

SEQ ID NO: 3333 - DNA, 812 bp, Zea mays
  unsure (1)..(812): unsure at all n locations
  Clone ID: TF_LIB4743-111-Q1-K1-G10
ccggccgactcctgttcgttcgttaagccctctgaccggccgaaaccccggtggcctcctggaggttccgggattgagttcgatctgagctgctgctgcctgtggaggcattcccttgtcgtttcttgcagtgtcctggtggtggtgaccggtggatatgaacactgtgtgtgaagtttgtggtgatattgcttacagacaacttctgctttgttgcagagactgcaagcgttgtgctgtgcaccaatactgtttggacaaagttgtctacgaggcatcattaataaaatggttctgttatgaatgcctactaaggcgtggtgaagttactcgcatcagttctctagagaagttgtcaagtgaaagaccactaagtcaggtccattctcgttctccagtacagtagctaattaccaatagtgtagagtcagtaagggatgcagggccttggagagatcggaaaaatgaatcaattgcgactaaatatccatctctcaacataacatatccttcaattaagaagcacactaaaaagaagccgattgtgaaaccaatggttaactgcacaaatacaaaagtgcgaatggctaaagttaccacccatacaagtgccgaagcgtcacgttcttgtgaaaccattgggacagaatcatctaagagcaaccatgtgaagaaccagcaggtggaccatgcaaaccctgtcgcattgaacactgagcagtcttgccctttgattgtgaatagcttgagtacattgngagataatcaccagtatcacctcttatacacaacagaagggttggcttgcaaat

SEQ ID NO: 3334 - DNA, 4297 bp, Zea mays
  unsure (1)..(4297): unsure at all n locations
  Clone ID: TF_ZmC133_37
gaggtctggccgggaccgacgcctgtcgccactggcacgcattcctgctctcctctcctcttctccctcgtcggtgcggcgtggcgcggctcggcgttcggtgagaaaccactcggggatgaggatctgctgctagagtgagaggagctacggtcagtatcctctgccttcgtcggcggcggaagtggaggggaggaagcgatggaggcgagcgccgggctggtggccggctcccacaaccgcaacgagctcgtcgtcatccgccgcgacggcgatcccgggccgaagccgccgcgggagcagaacgggcaggtgtgccagatttgcggcgacgacgtcggccttgcccccggcggggaccccttcgtggcgtgcaacgagtgcgccttccccgtctgccgggactgctacgaatacgagcgccgggagggcacgcagaactgcccccagtgcaagactcgatacaagcgcctcaagggctgccagcgtgtgaccggtgacgaggaggaggacggcgtcgatgacctggacaacgagttcaactgggacggccatgactcgcagtctgtggccgagtccatgctctacggccacatgagctacggccgtggaggtgaccctaatggcgcgccacaagctttccagctcaaccccaatgttccactcctcaccaacgggcagatggtggatgacatcccaccggagcagcacgcgctggtgccttctttcatgggtggtgggggaaagaggatacatccccttccttatgcggatcccagcttacctgtgcaacccaggtctatggacccatccaaggatcttgctgcatatgggtatggtagtgttgcttggaaggaacggatggagaattggaagcagagacaagagaggatgcaccagacggggaatgatggtggtggtgatgatggtgacgatgctgatctaccactaatggatgaagcaagacaacaactgtccaggaaaattccacttccatcaagccagattaatccatataggatgattatcattattcggcttgtggttttggggttcttcttccactaccgagtgatgcatccggtgaatgatgcatttgctttgtggctcatatctgttatctgtgaaatctggtttgccatgtcttggattcttgatcaattcccaaagtggttccctattgagagagagacttacctagaccggctgtcactgaggttcgacaaggaaggccagccatctcaacttgctccaattgatttctttgtcagtacggttgatcccttaaaggaacctcctttggtcacaacaaatactgttctatctatcctttcggtggattatcctgttgataaggtttcttgctatgtttctgatgatggtgctgcaatgctaacgtttgaagcattatctgaaacatctgaatttgcaaagaaatgggttcctttctgcaaacggtacaatattgaacctcgcgctccagagtggtacttccaacagaagatagactacttgaaagacaaggtggcagcaaactttgttagggagaggagagcaatgaagagagagtatgaggaattcaaggtgagaatcaatgccttagttgccaaagcccagaaagttcctgaagaaggatggacaatgcaagatggaaccccctggcctggaaacaatgttcgtgatcatcctggaatgattcaggtcttccttggccaaagcggaggccttgactgtgagggaaatgaactgccacgattggtttatgtttctagagagaaacgaccaggctataaccatcataagaaagctggtgctatgaatgcattggtccgagtctctgctgtactaacaaatgctccatatttgttaaacttggattgtgatcactacatcaacaacagcaaggctataaaggaagcaatgtgttttatgatggaccctttactaggaaagaaggtttgctatgtacagttccctcaaagatttgatgggattgatcgccatgaccgatatgctaaccggaatgttgtcttttttgatatcaacatgaaaggtttggatggtattcagggtccaatttatgttggtactggatgtgtatttagaaggcaggcattatatggttatgatgcccccaaaacaaagaagccaccatcaaggacttgcaactgctggcccaagtggtgcttttgctgttgctgctttggcaataggaagcaaaagaagaagactaccaaacccaaaacagagaagaaaaagttattatttttcaagaaagaagagaaccaatcccctgcatatgctcttggtgaaattgacgaagctgctccaggagctgagaatgaaaaggccggtattgtaaatcaacaaaaattagaaaagaaatttggccaatcttctgtttttgttacatccacacttctcgagaatggtggaaccttgaagagtgcaagtcctgcttctcttttgaaagaagctatacatgtcattagttgtggttatgaagacaagacagactggggaaaagagattggctggatctatggatcagttacagaagatattctaactggtttcaagatgcattgtcatggttggcggtcaatttactgcatacctaaacgggttgcattcaaaggttctgcacctctgaatctttcagatcgtcttcaccaggtgcttcggtgggctcttgggtctattgagatcttcttcagcaatcattgccctctttggtatgggtatggtggcggtctgaaatttttggaaagattttcctacatcaactccatcgtgtatccttggacatctattcccctcttggcttactgtacattgcctgccatctgtttattgacagggaaatttatcactccagagctgaataatgttgccagcctgtggttcatgtcactttttatctgcatttttgctacgagcatcctagaaatgagatggagtggtgttggaattgatgactggtggaggaatgagcagttctgggtcattggaggtgtgtcctcacacctctttgctgtgttccagggacttctcaaggtcatagctggtgttgatacaagcttcaccgtgacatcaaagggtggagatgatgaggagttctcagagctatatacattcaaatggactaccttattgatacctcctaccaccttgcttctattgaacttcattggtgtggtcgctggcgtttcaaatgcgatcaataacggatatgagtcatggggccccctctttgggaagctattctttgcattttgggtgattgtccatctttatccctttctcaaaggtttggttggaaggcaaaacaggacaccaacgattgtcatcgtctggtccattctgctggcttcaatcttctcgctcctttgggttcggattgatcctttccttgcgaaggatgatggtccgcttcttgaggagtgtggtttggattgcaactaggatgtcagtgcatcagctcccccaatctgcatatgcttgaagaagtatattttctggtgtttgtccccatattcagtgtctgtagataagagacatgaaatgtcccaagtttcttttgatccatggtgaacctacttaatatctgagagatatactgggggaaaatggaggctgcggcaatccttgtgcagttgggccgtggaatacagcatatgcaagtgtttgattgtgcagcattctttattacttggtcgcaatatagatgggctgagccgaacagcaaggtattttgattctgcactgctcccgtgtacaaacttggttctcaataaggcaggcaggaatgcatctgccagtggaacagagcaacctgcacattatttatgtatgcctgttcattggagggcttgttcattacatgttcgtctatactagaaaaaacagaatattagcattaatctatagttaattaaagtatgtaaatgcgcctgttttttgttgtgtactgtaatcatctgagttggttttgtgaaattttcgtagaaagaatgaatgtgagatacagaaaatgtaatgccgtggtatatgcgtatggaacgatgtagtatcttttatggttccataatagtgtatttaacaaccccagcaaggggtttcttgggtttctttttttaatcctatttataatgatataatgataggggagcaaagaggccttaggctgtctccagcaacgtcctctaaatttcgtcccctaaaggaatattccctgtactttacagcacactctnaaagattctgtcctctttaaaaaaaaaaaaaaaaagcggcc

SEQ ID NO: 3335 - DNA, 851 bp, Zea mays
  Clone ID: TF_ZmC1236834_1
cgcgcactcgcgtcggaatgcgtgctgcgtgaagagaggcgagagcgagacgggctgcggggaggaggcggatagcggcggcgtcggcatggaggcgaaccgggggatggtggctggctcccgcggcggggtcgtaacgatccggcacgacggcgacggagccgcggctaagcagttgaagaatgtgaatgaacaaatatgtcaaatctgcggtgacacactcgggctctcagcaacaggcgatatctttgttgcgtgcaacgaatgtgccttcccggtgtgtcgtccgtgctatgagtacgagcgtaaggaggggaatcagtgctgccctcaatgcaagactagatacaagaggcacaaaggaagccctcgggttcggggagatgaggaggaggatggagttgatgatttggacaatgaattcaactatacacaaggcaatgtccaagggcctcagtggcagctgcagggacaaggggaagatgttgacatctcttcgtcttctcgacatgaaccccatcacagaattccacgtctgacaactgggcagcagatgtctggagatatccctgatgcatctcctgatcgcaattctattcgcagcccaacaccaagttatgttgatccaagcattccaggtgtgctatcgtgttatgtatatttgtgttggtaatcagttcccttgcagattcactagaatgcaatcatttgttccatgatatcagtacctgtgaggattgtggacccctcgaaggatttgaattcttatggagttggaagtgttgactggaaagaaagagtcgagagctggaaagttagacaggacaaaaatatgatacaggtgcgccggc

SEQ ID NO: 3336 - DNA, 989 bp, Zea mays
  Clone ID: TF_ZmC313479_1
attgggtacctcgaggccggccggggaagggcccaaagcccagtcggaccacgccactcccaaaccctaagctgagcctgtgacgctttcatccaatggtgcaagagcaagacgcacccaacgcacttgcctccgacgccgatcaccccgccccgccgccccgcctcctttctaagcaccgcccgcgtcgccgcgccgctgcccctcgcccgcccctgccaccacctgcgccaccactgcccgcgcgtcgcctgcccgatctcagccagtgccactgctgcggcttccgcttccgaacgccccagccgggggccaggcccaagcgccgcccgctctgtccactcagttccctatggcgcgtcgtcctcctctgcgccgaatgcctctccctggtccgctgtggcgctgtatgctcttactgcctctccctcgacaacctgccgcccgaggattccgccgtcgtctgtcgccgctgcaaccgctatgtccatcgatcctgtatccctgccgaacaccgcacggccgtgatccagccggtcgatgtggaggatttcctctgcgtcgattgccgtcccaccgtgagatcgaagaacgggggcttcaatttggggctgaatctggatgcttgcatctgggatcgtacatccgttgccagggagaacgctctgaggaaggctgtggaggtgaagcccgcttctaagcgggggaacgacgctgttggcggcagtgggttggtcggaaggggcagtgatgttccagttctgccggacgaagagttagctttgcagctgcacctggcaatgaatggatcacagaggatttcacgttcaggtggtgcctctgccgatccagccaaggggaagaatgatggggttgctagtaggatttgcaacacaaatcaggatatttcgcgtaacaaatatgatggctcagcttgatgaagaagaaccaggttgcaacagggtattaaagggcccttaggaattctg

SEQ ID NO: 3337 - DNA, 951 bp, Zea mays
  Clone ID: TF_ZmC2027_16
gcggcgctcgaggcggccgtttcgggagtaggtgcggagaggaagaggaagcgaagcagcagcagcaccaccactgcgcggcattgcagcgagcaagcgggagggatctggggcatggtggcggtcgctgccgctgccgctcggatctagagggccgcacgggctgattgccctccgccggcctcgtcggtgtcggtggagtgtgaatcggtgtgtgtaggaggagcgcggagatggcggccaacaaggggatggtggcagggtctcacaaccgcaacgagttcgtcatgatccgccacgacggcgacgcgcctgtcccggctaagcccacgaagagtgcgaatgggcaggtctgccagatttgtggcgacactgttggcgtttcagccactggtgatgtctttgttgcctgcaatgagtgtgccttccctgtctgccgcccttgctatgagtacgagcgcaaggaagggaaccaatgctgccctcagtgcaagactagatacaagagacagaaaggtagccctcgagttcatggtgatgatgaggaggaagatgttgatgacctggacaatgaattcaactataagcaaggcaatgggaagggcccagagtggcagcttcaaggagatgacgctgatctgtcttcatctgctcgccatgaccccttcctcaagggtctcatgggcaggcagaaccgcacgccaacaatcgtcatcgtttggtccatcctccttgcgtctatcttctccttgctgtgggtgaagatcgatcctttcatctccccgacacagaaaactgctgccctggggcaatgtggcgtcaactgctgatcgagaccgtgactcttatttgaagaggctcaatcaagatctgccccctcgtgtaaatccctgaggaggctagatgggaattctttttgttgtaggtgaggatggatttgcataagttatg

SEQ ID NO: 3338 - DNA, 613 bp, Zea mays
  Clone ID: TF_5006147
tttgatgtagtaaggtccacaaagatttacactgtgtgcgccttcgtggatgagtcaaatttcttctagagggggtcccagacctccttggaagacatggcactgatgacatcttgaaggacttcctcgatcatcgacgagagaaaggccactcaacagttgttgatcttgaacatactagctagcatactccggattagggacatctgcagcactgtgacagggcgatccagcagcttcatgcagaaggcgcagctgaaacttctgccgaagatattgaggacgtcgtcctctgcgctgtcgtcgacatcatcgtcgggggcagaagcagcagatcggcctgccagaatattttggcggcggcgtgccttctctgcatcggagagggtggtgtcggcctcgatcgcgcggacggcggcgacgagctcgcctcctgccgcaggggccgcgggggctacaggatcgccggagcagtcggggcagctccagatcgcagcttcagacagcgcgggtggattcgagaggcatggggagtgccacggggtggcgcaggtggagcaccgtagcaggtctacctcggacggtgcggccacaccgcagaccatgcagacgc

SEQ ID NO: 3339 - DNA, 1319 bp, Zea mays
  Clone ID: TF_ZmC531693_1
cggaagccgccgccgccgcctctcttatcgcaacagttcatatttgcgaacgtggcccctgctttgcgttctccaaaccgtaccagcagcgtgccctgatcgccgccgcttggagtcctgatctggtcctcgttcgtcgggacttaggaaatccaagtaacggatagttcccaccggcagaccgagccgcgcctccattcttgtacgaaaccatggctcgcaaaaaggcaaccgtggagcagctccggacgctgaacaaggttcgtgaattcaagcgaaggagaaacatgcacaaggcagcaggagcaggaccgggcaacaagggagaaaatgtttgtgcaatttgtgacgatggtggtaacctaacttgctgcgaaggttgttgtcagaggtctttccaccttgataacgaacataattgcatcaagacacttgggctgactatacaagaggcaaagaacataatcgagaagggagattttatatgcaagaactgccagtacaagcaacatcagtgtttcatttgtggatcgttagggtcttctgatgacactgacacagcgtcacagcaggtattccaatgtgagcatgacgattgtgcacgcttttaccacccaaaatgtgttgctcaaatgctatatccagatagccaagaactgttcgagctccacgtggctgccggagagagcttcacttgtcctatgcatgaatgtattgtgtgcaaggaagtagataataagaaagataagagtatgcagtttgcagtatgcagacgctgcccaactgtttaccaccggaagtgcttgccaagagatatcattttcaaaccgaagaaaggtcgcaggggtcccatgcgaagggcgtggaagaacatgcttcccgatcgaattctgatattctgcatgaagcatgagatcgtaagagaactacaaactcctgcaaggaatcatatcgtttttcctgaatccaatgtgctgaaaacgtttcaagctctttatgctcaaagagaggcgcctgaccactcgtcatcgaagcaaacccactcgtcccctccaccggctgcaagagaccagaatcagtgctactgttctagccctttatgctcatttgctccaagttccgtgttcatgcgtccgcatccaggctcctctggttggctcgatgactgactaactaattaactatacggcccatctgtcccctgtagagagaaaccccctgttacaagtccttttgcaaataattggatgtagacaagctagtgttagccaaacgacaaaatcctattttttttaatataacctgatttttttattgcg

SEQ ID NO: 3340 - DNA, 524 bp, Zea mays
  Clone ID: TF_LIB4171-042-Q1-K1-E2
gccctctctcgagtttttttttttttttttttttttttttttttttttttttttttttttttttttttttttttttttaaaccctgaccaacatgagctggtgggggcacccgagggaatcaacagggttctttccaaagggaaagcaagtttacaagctaaacagttaggcatatatctgcaaacataaatgattgggcgcttacttcactccaaaatcacaaaagggcttggggctaggctcttgcccttttggggctgcaatcggggcatttggagggcttgaggggctcaactcgggcaggcgggattttgacacacttcccatggaaccaccggtcgcatttttcacaacaaatccaaaattcgcccttgccgtcttttgttccacaggacccacaaaagggggtaacaccctcttcctttttttaaaactcttaaccggtctaataattttcatccttagggggccccatttttggcgccttcaaaagaaactcgggtcttggtggcattttcaaact

SEQ ID NO: 3341 - DNA, 1139 bp, Zea mays
  Clone ID: TF_ZmC24647_1
gcacgagcctgtttcctgtctcctaccctcttgcggtcttgccagcgccccctcctcccttcgtctccgccgccgcggactcctcgccggaaccctaaatggaccccggcgccggcgcacactactccgcccgtaccgcggaggaagtcttccgcgatttccgcggccgccgcgcgggcatgatcaaggccctcaccaacgatgtggagaagttctaccagctgtgcgaccccgaaaaggaaaacttgtgcctttatggctaccccaacgaaacatgggaagtaactttgccagcagaggaagttcctccagagatccctgaaccagctttgggtataaactttgctagggatggcatgaacgagaaggattggttggcgttagttgctgtccacagcgatgcctggttactagctgttgcattctactttgcagcccggtttgggtttgacaaagaggccaggcggcgactcttcaacatgataaataacttgcccacaatatttgaagtagcgactggggttgccaagaaacaaaacaaggagaaggaacccaatagtaccagcaaaagcaacaaaccaagttcgaaaatgacaacaagacccgagtctcatttgaaggcgacaaaagtggcaccccctaaggatgaagatgatgagagcggtgaagagtatgaagaagaggaagagcgtgataacaccttatgtggatcctgtggaacaaatgacggcaaggacgaattctggatctgttgtgatagttgcgagcggtggtaccatgggaagtgtgtcaagatcactcctgcacgtgctgagcacatcaagcactacaaatgcccagattgcaacaacaagagggcaggagcctagcgtcaagccctggtgtgaccctggagtgaagtaagcgtcaaatcattgatgtctgcagatatatgcctacttgtctagcttgtagacttgcttttcatttcgcatgaacgctattgattcactcggttgccctctgcagctcatattgctcgggcttaattgtgtttaatgttttataagcggtgccagtgtgttgcatcggagcgtatattttattatccggtaatcgtacccaaaaaaacaaaaaaaaaaaaaaaaaaaactcgagag

SEQ ID NO: 3342 - DNA, 618 bp, Zea mays
  Clone ID: TF_ZmC62616_2
gtgaaagagcatttcatttattgtgttgcaatccacgtgtcaagaaaataccagatgaagagtggtattgtttggcatgtaaaagaaagaaacctaagagacaacgtggaaagtttgcaaatcccaaagttgaatcatccaagggcattcaaagaccccgccgaggtcttggtcctattcgagatatgttactggattctgaatcatatgaaagtggggttcggattggtactaagtttcaagcagaagttccaaaatggtctggtcctatttctagtagagaagatgagtttgctgagcccactgaacttgatcgtagtaaaacgacaatgctgagtttcgaggataagaaaaccagtatcggtaactggatccagtgccgggaagttctagacacaggagttgtttgtggcaaatggcggagggcaccattgtttgttgttcaatcaagtgactgggactgttcgtgctcagttgtttgggatcctatccatgctgattgtgctgttccacaggaattggagaccgttaaagttcacgagcaactgaagtacataaataagctgaagaatcgtctaggtgacagcaatcagaaacgctgaaaaaacgtactcttgc

SEQ ID NO: 3343 - DNA, 757 bp, Zea mays
  Clone ID: TF_ZmC211414_1
cttcgcgcagcgcattggatggttcaacgtgaaaacggaaatacgctccatcaagaatacgctaattctgcaccatattgtgttccttttgattttgttcacaagaattccaggatgttctacaatccgttcaacggaaatatttcatcgcaaccagagccttctccaccttacatctctgggggcattttggctgatgaaatgggcttggggaaaactgtcgagcttttagcgtgcatttttgctcatcgtagaccaatttcattagacttttctgtcttccagaacaaaaccgaaatggatcaaattaagaggcagaaagtagaaagggttgagtgcatctgtggtgctgcgagtgaaagttctgcatacacgggtctatgggtccaatgtgacatttgtgatgcttggcaacatgctgattgtgttggttactcacccaagaggaatatactttttgctgataccactgaagatgtagtatcaacaaacaaaaaaagcaccatgaagtctggatttagaaggaaaaagaaacccaggtgttctattgttgagacagaagacaaatacatttgtgcactgtgcttggagcttattgaagcaactcaaactaatatactcagccatgctacattgatagtatgtcccgcaccaatattggcacaatggcactctgaaattacccgacacacaaggccaggatctctgaaagtttgcatttatgaaggtgcaaggaacttggatccttctaccatcc

SEQ ID NO: 3344 - DNA, 871 bp, Zea mays
  unsure (1)..(871): unsure at all n locations
  Clone ID: TF_21216428
attatcttggcataagctgcccaatccacctatagaaacgttacaaaggcttcctctgcccctattccttctccggcaacatacaggctaccataactctccacggcatggagaaaccacaaagaggntataataaatactatgatctttccctgctaacattagcatcaccattattcgtcatatgtaagcttaatcgaaaaggtacagtaaacatggcaaggcggcattgaccttgcgcaaggggaaactctgacctgcttgtccaggcttcttccatccatggccgtcctcccgggaggagggcgatgctataggcctaaatcggcctaggtcnnnnngaattgcagcagcttgggcacttgtactgctttatgctctccgcctttgcaggtgtgatcttcacgcacttgccatggtaccacttctcgcacacgtcgcacccgatccagaactcatcagcgctgtatattccaccacatgtcccgcacaaggtttcgctgtggttgctgtcatcttcatcgtagccctcatcaggctccctggcgttattttctaatcgtggctcgcttgtttgctggagagacagatcaagttcaacatcataacatgacaatagaagatgtggtnnnnncagcgatgggttcttgttacctttaccgacagtttatttctaccaccattgtcagtaccggatctatccctctcttttgattgcttcacaccactggagacgacttcnnnnncagttggcagatcattcatcatgccgaacaaacgcttccgatcactgcggttgagccgcgcggcgtagtagaatgcgacggagacgagccacgagtcagagtgtacggcgacgagcgcgcctcgt

SEQ ID NO: 3345 - DNA, 601 bp, Zea mays
  unsure (1)..(601): unsure at all n locations
  Clone ID: TF_LIB3689-230-Q1-N6-A12
gtatcaaataaaatatattaacataaacctcacgggttattatcttggcataagctgcccaattcacctttagaaacgttacaaaggcttcctctgcccctattccttctccggcaacatacaggctaccataactctccatggcatggagaaaccacaaaaaggttataataaatactaggtgtgatcttcccgcccacattagcatcaccatcatatgtaagcttaatcgaaaagatacagtaaacatggcaaggtggtattggccttgcgccaaggagtagctctgacctcctgtttgttcagtcttccatccatggccgtcctccagtgaggagggcggtgctacaggcctacagcggcctaggtctttttgaattgcagcagctcgggcacttgtactgctttatgctctccgccttcgcgggagtgatcttcacgcacttgccatggtaccacttctcgcacacatcacacccgatccagaactcgtctgcgctgtatattccaccacatgtcccgcacaaggttgcaagacattgacttgggtgccattgngcgaggcgcccttggtagcttcaggagtgtagctgttaggtcc

SEQ ID NO: 3346 - DNA, 3005 bp, Zea mays
  Clone ID: TF_ZmC17187_1
gcactggcacccctccccgtcccatgccccctctcgcggctcgtgtcgtctcgtcgctcggctccaggccgcatcgcgatcagtcatctctttccctcccagccttcctcctgcgtctcgctctcgccggaggtcaggcgcaccgccgccgggcgatggacgcctcctaccgccgcgccggcaccgggagcggctccgctccccgctccgtcgaggacatctacaaggactaccgctcccgccgctccgccatcctccgcgccctcacccacgacgttgaggagttctacgcgctgtgcgatccagagaaggagaacctgtgcctgtacggctacgcgaacgaagcgtgggaggtagcgctgccggcggaggaggtgcccacggagcttccggagccggcgctcgggatcaacttcgcgcgcgacgggatgaaccgtggcgactggctcgcgctcgtcgccgtacactctgactcgtggctcgtctccgtcgcattctactacgccgcgcggctcaaccgcagtgatcggaagcgtttgttcggcatgatgaatgatctgccaactgtttttgaagtcgtctccagtggtgtgaagcaatcaaaagagagggatagatccggtactgacaatggtggtagaaataaactgtcggtaaagcaaacaagcgagccacgattagaaaataacgccagggagcctgatgagggctacgatgaagatgacagcaaccacagcgaaaccttgtgcgggacatgtggtggaatatacagcgctgatgagttctggatcgggtgcgacgtgtgcgagaagtggtaccatggcaagtgcgtgaagatcacacctgcaaaggcggagagcataaagcagtacaagtgcccaagctgctgcaattcaaaaagacctaggccgatttaggcctatagcatcgccctcctcccgggaggacggccatggatggaagaagactggacaagcaggtcagagtttcctcttgcgcaaggtcaatgccgccttgcgatgtttactgtaccttttcgattaagcttacatatgacgaacgatgatgatgctaatgttagcagggaaagatcacacattaatttataatctttttgtggtttctccatgccgtggagagttatggtagtctgtatgttgccggagaaggaataggggcagaggaagcctttgtaatctttctataggtggaatgtgcagcttatgcgaagataataataatccgtgatgttcatgttaatatattttatttaataaaagaaaaataagcctctcgcgtggggcagcaaagcgaccctcacccgccagcaccccaggcattcacaaccacccggccccatgttatacgtcatcaaccccctgctacctggtggaccatgtcctgtacctggtcacggagtatgggcggcaacccaaaatcgttacggcccccataacgttcggctgtggacggactgaaacaggatcgttactgggcacggctgcacccaagagtatacttggccagcgcagggaaactatatgggtcccccgtttgctagcaagtcagggagttgctgctgccaattccttctccatgtgcttcgcacaagatggccatggtagaatcaattttggggacactggaagctcagatcagcaggaaaccccgttaaacatgtataaacaaaatccatactacaacataagcatcactggtgctacggtggggagtaaatccattcacaccaagttcaacgctattgttgactctggcacctctttcacagctctgtctgatccgatgtacactcaaatcactagcagcttcaactcacaagtccaggataagccaagccagcttgactcttctctgccctttgaattttgctactctataagtccaaaggcttctaccaatcctccgaacataagcttcacggcggaaggtggaagcgtgtttcctgtcaatgatccaataattaccattacggactctgtatctaatccgatggcatattgcttggctgttatgaagagcgaaggtgttaacttaataggggagaattttatgtctgggctgaaggtcgtgtttgatcgagagaggaaggtcttgggctggaaaaactttgattgttacagcgtgggcaactcaagaagcaaccttccagtgaacccaaatccttctggtgttccccctaaacctgccttgggacctaacagctacactcctgaagctaccaagggcgcctcgcccaatggcacccaagtcaatgtcttgcagccttctgcaagtttttcgccgaagctgcgttgcaacagaaacgtcctcgtcgccgctgctctgctgttcctcgtgatcctttgatcacctcaactccccatgacaatcttttcagaaaccaaatcgacagatatgatagattttagttaaacttggtttacgttgtatgtattgagttacgtatagtgtgatagtatcacattcttttggcctgtgtccacagttccagtaggagttaggatagaacacgggatgagtccatagccctttttttttgcacgttcataatgtacctggtggatgtactgtgtacatattagatatgacttcaggatgtattgattttatagaataattgaataacgatgctcgcatttccagatacacgtactcttttcatatggcataacacactagcattaagtcttatgagagaccttgccaaagaattagtgcttggaggggaagaatgacctagaactgaagatggatgagctgatgtgaaaaatgaggggaagaatgacctagaactgaagatggaggagctcaggtgaaaaatgaacttgttcattgtgtgttttctgacctttttttggaattgtattaaaatatactgtaatgaattggtgtaagaatatgttggaagtagcaaagaacctgatgccttttgcaaaaaaaatgtctttaaaaaaaaataaacaaaaaaaaactcgagagggggc

SEQ ID NO: 3347 - DNA, 1433 bp, Zea mays
  Clone ID: TF_ZmC17187_2
aaaaaaaaacctcgtcgctcggctcccgaccgcattgcgatcagtccgggctttccctcccagccttcctcctgcgtctcgctctcgccggaggtcaggcgcaccgccgccgggcgatggacgcctcctaccgccgcgccggcaccgggagcggctccgctccccgctccgtcgaggacatctacaaggactaccgctcccgccgctccgccatcctccgcgccctcacccacgacgttgaggagttctacgcgctgtgcgatccagagaaggagaacctgtgcctgtacggctacgcgaacgaagcgtgggaggtagcgctgccggcggaggaggtgcccacggagcttccggagccggcgctcgggatcaacttcgcattctactacgccgcgcggctcaaccgcagtgatcggaagcgtttgttcggcatgatgaatgatctgccaactgtttttgaagtcgtctccagtggtgtgaagcaatcaaaagagagggatagatccggtactgacaatggtggtagaaataaactgtcggtaaagcaaacaagcgagccacgattagaaaataacgccagggagcctgatgagggctacgatgaagatgacagcaaccacagcgaaaccttgtgcgggacatgtggtggaatatacagcgctgatgagttctggatcgggtgcgacgtgtgcgagaagtggtaccatggcaagtgcgtgaagatcacacctgcaaaggcggagagcataaagcagtacaagtgcccaagctgctgcaattcaaaaagacctaggccgatttaggcctatagcatcgccctcctcccgggaggacggccatggatggaagaagactggacaagcaggtcagagtttcctcttgcgcaaggtcaatgccgccttgcgatgtttactgtaccttttcgattaagcttacatatgacgaacgatgatgatgctaatgttagcagggaaagatcacacattaatttataatctttttgtggtttctccatgccgtggagagttatggtagtctgtatgttgccggagaaggaataggggcagaggaagcctttgtaatctttctataggtggaatgggcagcttatgccaagataataacaatccgtgatgttcatgttaatatattttatttgatacagggctgatggtttgcgtgagcaaccatgtgtgattacgtaagctaccgccgacccattttgtggaataacatacagatgcacttcgacaactagtcgtttctctagtttagaaacctaaaccctcaatggatccccaacatgtgcatttcttggtagaggtatattatggagggttcaaagtcttcctctgtcttttttagaccatgtcttgtgagaagatgtgttcttcaatttgattctgatatatagggacaagaatagagtcagt

SEQ ID NO: 3348 - DNA, 1341 bp, Zea mays
  Clone ID: TF_ZmC2557_29
attgggacctcgaggccggccctgccgtgcccggttgtgtaaatagaagataggcgacgaacacgaagcaagcaaggcagccgaatcccaactcctgtgtgtgcctgccaacgcctcgtcgcccgccgccgccgctgcttcgcccctctccgccagccgctcccgctcggagcacgccgccgccggcgtgggcgcgcaccgacggccgtcgtgtcgcatggatatggcccccgcggccgtctcctccaacccgcgctcggtcgaggaaatcttcaaagacttctccggccggcgcgcggggctcgtccgcgccctcacctccgatgtggacgatttctgcagcttctgcgacccagataaggagaacttgtgtctctacggccttcccaacggtagctgggaggtctcgccgccggcggacgaggttcctccggagttgcccgagccggcgctcggcatcaactttgcgcgcgatggcatgcagcgccgcgactggctctcactcgtcgcggtccactctgactcgtggctcatctcagtcgccttcttctacggcgcccgcctcaacgccaacgaccggaagcgcttattcagcatgatcagtgatcttccttctgtctttgaagcatttgcggacaggaaacacgtcagggataggtctggcgttgatagcagcggcaagtccaggcactcatcaaagagaggaaacgatggccatgcgaagaactccagggcagcagctcctgctgccaaagagtacgacgacgacgatgacgaggaggacgaggaacacacggaaaccttttgtggaagctgcggcggcctctacaacgcgaacgagttctggatcggctgcgacatctgcgagcggtggttccacgggaagtgcgtgcggatcacccctgccaaagcggaccacataaagcactacaagtgcccggactgcagctcgaagaaaataaggcagtaggtcccagtgtgcaccgccggccatcgctgacctgtctgatcccaaaccatactccattgcttgcctgccttgccccaaggtcgcagctagcagatgcgaattccttcatttgtggggggttgttgtgtgatggatagcctggtaggaagaggcaaaggactgatatataatgactcgtttattgttcatctttttgcctgcttcgtcggtcgtcgcagtcgttgtggctgcatgaactgatgagtggtttgttcgtgctagttgtaggctgtttcactgatttgcgtgcgtatgtggactggtcctgtcaaatttgtaggcctgaaaccgtacttccatttacgtggctacgcgagctgatttgccaaaaa

SEQ ID NO: 3349 - DNA, 1444 bp, Zea mays
  Clone ID: TF_ZmC2557_30
ggcagccgaatcccaactcctgtgtgtgcctgccaacgcctcgtcggccgccgccgccgctgcttcgcccctctccgccagccgctcccgctcggagcacgccgccgccgacgtgggcgcgcaccgacggccgtcgtgtcgcatggatatggcccccgcggccgtctcctccaacccgcgctcggtcgaggaaatcttcaaagacttctccggtcggcgcgcggggctcgtccgcgccctcacctccgatgtggacgatttctgcagcttctgcgacccagataaggagaacttgtgtctctacggccttcccaacggtagctgggaggtctcgccgccggcggacgaggttcctccggagttgcccgagccggcgctcggcatcaactttgcgcgcgacggcatgcagcgccgcgactggctctcactcgtcgcggtccactctgactcgtggctcatctcagtcgccttcttctacggcgcccgcctcaacgccaacgaccggaagcgcttattcagcatgatcagtgatcttccttctgtctttgaagcatttgcggacaggaaacacgtcagggataggtctggcgttgatagcagcggcaagtccaggcactcatcaaagagaggaaacgatggccatgcgaagaactccagggcagcagctcctgctgccaaagagtacgacgacgacgatgacgaggaggacgaggaacacacggaaaccttttgtggaagctgcggcggcctctacaacgcgaacgagttctggatcggctgcgacatctgcgagcggtggttccacggcaagtgcgtgcggatcacccctgccaaagcggaccacataaagcactacaagtgcccggactgcagctcgaagaaaataaggcagtaggtcccagtgtgcaccgccggccatcgctgacctgtctgatcccaaaccatactccattgcttgcctgccttgccccaaggtcgcagctagcagatgcgcattccttcatttgtggggggttgttgtgtgatggatagcctggtaggaagaggcaaaggactgatatataatgactcgtttattgttcatctttttgcctgcttcgtcggtcgtcgcagtcgttgtggctgcatgaactgatgagtggtttgttcgtgctagttgtaggctgtttcactgatttgcgtgcgtatgtggactgtcctttcaaatttgtaggcctgaaaccgtacttccatttacgtggctacgcgagctgatttgccggtctgcctctcccatctgtatcctggacatggcagtatggtcacgaagtccagatggcgatatgcctgactgccggtaacggagggcagctgtggtgtagtatatctcagtcacatgggaggcgttagataatttttgaccaaatgttataaaataagacactattaaatagtttttttatat

SEQ ID NO: 3350 - DNA, 826 bp, Zea mays
  unsure (1)..(826): unsure at all n locations
  Clone ID: TF_LIB4757-014-Q1-K1-A10
attgggtccctcgggccggccggaaaaaaattattgtaaacggcgtttactacatgagctgtcaatttcactcttgaaaggtcaaaagatgtcaaacagacaaagtgatgacttgtgcagcatttgttcagatggtgggcaactactcctttgtgatacctgtccaagagcttttcatagagaatgtgttggcttatcttctgccacaaagggaacttggtgttgccgatattgtgagaatagacaacagagggaaagttgtttggcatataacaacaatgcaatagctgctgggagagttgaaggagttgatgccttggaacaaatattcacgcggtcgatacgtattgctacaacacttgagactggatttggtggttgcgcactgtgcaagtaagtgtccttccatggcatgttgcttgtatatccaccctggccttcttttcttttgtactgataataaattacatgtactttcaatcttacctaaaacatttcgtatgctggcagagaaaatttggcaaacttctcatcaagtaatgatatttgttgaataagctggttaatgaatcggaagctcaatgttcgagcgctaaatctctttacccatttcgaactctctgattacttttgcatcaatgttagtttcattaatcttactttaagctttatttgccctagttaattctgtgttagcattagtcgtggttgtttatggggtgtttggcgctaagtattgaccagtttgtgggaagtcatatcattgntaccttctatcanaaaagttacatattgnttttcgtttaatgcaacttgccaagtacta

SEQ ID NO: 3351 - DNA, 435 bp, Zea mays
  Clone ID: TF_jC-zmXLIB3526P054bg08a1
ggagaagatgatccttttgttttacaacagtagaacagcaatttataaagcatcatttcaacggcaggcatttaccaagaataaacataattcttttcagcttactcatcatttgtaatgaatagcagagaaaaatcattagctacttagtttattttcccaaataaaatgtccaaataaatctaatgacatcaggataacaaacctggcaagacaagcaggcttgatggtaactagcaggacaattgtcacagcatatcagttcaccaccatcgccacatgatccacaggtatcatcgttttggtctgcttgaagggacattggatcctttgcatgctctttcctcaccttctgctctatagaccatgcttgaagctgacaaagactgtaagatttgcctgtatccaaaaaaagattcaaagatgggacttctt

SEQ ID NO: 3352 - DNA, 553 bp, Zea mays
  Clone ID: TF_LIB3354-003-P1-K1-A4
gtcagagtcatcctcagattctgaatttgttgtatcaggtaaggaattggaagaattgagggagcctgagcctccaaaggctgcaccaaatctgcatgtgtccttgagaaggatttgtattacaaggcatggagaaggcaagggaaaggagaaacaggaacatgaggaggctgggaagccaatatgcgggatctgtctctcggaggagctgagagctactgtacaaggtgtcctcaattgttgctcacactatttttgcttcgcatgcatcatggaatggtctagggttgagtcgagatgcccattgtgcaagcagcggttcactacaatcaccaagtcatcaaaggtagatcttggtcttggagtgagaaaagctgtagtcaaggtcgaagagcgtgatcaggtttatcagcccactgaagaagaaataaggcgttggctagacccatatgaaaatgttgtttgtatagagtgcaatcaaggtggcgatgataatctcatgctactatgtgacatttgtgattcctcagcacatacttattgtgttggcttg

SEQ ID NO: 3353 - DNA, 658 bp, Zea mays
  unsure (1)..(658): unsure at all n locations
  Clone ID: TF_LIB3279-224-Q6-K6-A4
ctggtataaaggaaggttccatcagcagagatggaataaaatgcatgtgttgtaatgaattattcactgtggagaattttgaggttcatgctgggagcagtacaccattaccttcgtctcatatgtttttaaaggatggaaggtccctatcacagtgtttagttgaattcatgggtggaaacaagcccagagatccactgcatgtgcgcttgaaggggagtagttctgatctggaaagtgattcgatatgctctgtgtgccatgatggtggggatttattactttgtgacaattgcccatcatcttatcatcatgattgtgtcggcttggaggtagaggccattccagaaggaagctggtattgtccatcctgcagatgcggtatttgtaacttgagtgattatgatcctgataccagccaattcactgagaagaccatagtgtactgtgatcagtgtgaacgggaatatcatgtcggttgcactagaaatagtgaccatcagcttatctgccgaccagaaggttgttggttntgcagcaggggatgctcaaatgtatttcaacatttgcaagaagtcattgggaaacaagttccaactccaatcgaaggcttatcttgcactatcttgaaattttgtagagcgaacggcggtgacca

SEQ ID NO: 3354 - DNA, 1299 bp, Zea mays
  Clone ID: TF_ZmC21748_1
ccggccaaaaaaaaaaaaaaaaaaaaaaaaaaaaaaaaaaaaaaaaaaaaaaaattctcgcaggcctccacgcgaccccggccgggccccgcggttttgcacttctcgccttctctaatctctttgcctccctccaccaccagtccaccaccactgctacccaaccctcgcttccccaaaccctagccaagggacacggtggccggcgatggacggcgacggaggaggcgctggtgcgctgcaccaccacacgcgctcacccgaggacgtcttccgcgatttccgcgcgcgccgagccggcatcgtcaaggcgctcaccacggatgtggagaagttctatcagcagtgcgatccagagaaagagaacttgtgcctttatggtttgccaaatgagacttgggaggtcactcttccagctgaggaagtacctcctgagcttccagaaccagcactggggataaactttgcccgtgatggaatggtcgaaaaagactggttgtctctagttgcagttcatagtgatgcatggctcctgtctgttgcattctattttggagctcgttttggatttgacaaagatgccaggagaaggctcttcaccatgattaacaacctgcccactgtttatgaagttgtgacgggggttgctaagaagcaatcgaaagcccccaacggcagcagcaaaagcagcaaacctaactctaaaccatcaaaactgaccaattctaacagtaagcccgcgaagccagcccacccaaaagaagaggaggacagcggccgggaggacgcagaggaggaccaggcgtacctgtgtgggtcctgtggggagagctatgcgaacggggagttctggatctgctgcgatgtgtgcgagaagtggttccatggcaagtgtgtccgcatcacccctgccaaggcggagcacatcaagcagtacaagtgtcccagctgcagcaccaagcggagccgagaatgacggcaccctgggaacaggacctgctcccagttaacggaagcattttagaatcattaggagctatgaagcggtgtcattagaaccgcttcacctgtttagcgtaccggtgcgcgtgccggctgttgtatcttctctcgacgtgtgttgtaaactgggcagggacatggtagctagtggtgatgtgttgtgttagcaggctgactgctgtcatcgtagtgacggatgaactgctggcgtttggaaactcgtgttcggtaattaagtgctgcttagtgtgataatggcttaaaaaaaacggtttaaaaaacaccccccccccagcc

SEQ ID NO: 3355 - DNA, 1181 bp, Zea mays
  Clone ID: TF_ZmC21748_4
ccccgcgtccgccccgcgtccgccccgcgtccgccccgcgtccgctcgcttccccaaaccctagccaaggacacggtggccggcgatggacggcgacggaggaggcgctggtgcgctgcaccaccacacgcgctcacccgaggacgtcttccgcgatttccgcgcgcgccgagccggcatcgtcaaggcgctcaccacggatgtggagaagttctatcagcagtgcgatccagagaaagagacttgtgcctttatggtttgccaaatgagacttgggaggtcactcttccagctgaggaagtacctcctgagcttccagaaccagcactggggataaactttgcccgtgatggaatggtcgaaaaagactggttgtctctagttgcagttcatagtgatgcatggctcctgtctgttgcattctattttggagctcgttttggatttgacaaagatgccaggagaaggctcttcaccatgattaacaacctgcccactgtttatgaagttgtgacgggggttgctaagaagcaatcgaaagcccccaacggcagcagcaaaagcagcaaacctaactctaaacccacccaaaagaagaggaggacagcggccgggaggacgcagaggaggaccaggcgtacctgtgtgggtcctgtggggagagctatgcgaacggggagttctggatctgctgcgatgtgtgcgagaagtggttccatggcaagtgtgtccgcatcacccctgccaaggcggagcacatcaagcagtacaagtgtcccagctgcagcaccaagcggagccgagaatgacggcaccctgggaacaggacctgctcccagttaacggaagcattttagaatcattaggagctatgaagcggtgtcattagaaccgcttcacctgtttagcgtaccggtgcgcgtgccggctgttgtatcttctctcgacgtgtgttgtaaactgggcagggacatggtagctagtggtgatgtgttgtgttagcaggctgactgctgtcatcgtagtgacggatgaactgctggcgtttgaaaaaaaaaaaaaaataacggcctgctgcttagtgtgataatttcctccggttaaaaaatgaagaaaaaatatttacttattatatgaacagaggtaggattatgactgcctgacattatgttttgtacaaa

SEQ ID NO: 3356 - DNA, 1457 bp, Zea mays
  Clone ID: TF_ZmC1977_1
cccggcttgggttgcccaccgagatcacccccctcaaaccctagcccctcttctcctcctctgaccatctcctcctcctcgcgcttcgccttcccaatctcgctgccgtttcttgggcctgggactcgcgctctgctatctgtgtccgcgtatggcctgcgacggcgccgccagaggccgccctcccaagcgccccgcttcgggaggcctggcccagcccaacgtcgtcacctacaagagacgccgccgcggcaccggcgccaacgccggccacagcgccgtcacgtctggccccgaccccgctgaaatggtactgtcccagctgcgttgagccagacgtagctttgaagcataaaaaccatggcaggtcacatgaaggctgtgatgtatgcgagtggctcgtggtgaagccagaagagcctgctgaagatgttagcgagcctgaactggcggtcaaaacgcaggagagctcagtgtcaagcatgggcgaagacagcgaaccagacctctcaacgactgctctagcgaacttgtgcaagaactgtggcacatgcgaagacgaggacaggaagttcatggtatgcgggcatggtttatgttctttcaagttctaccatgtcctgtgcctgaaagagagacagattgcaagcgagaagcagaagaatctaaagtgctggtactgcccgtcttgcctgtgcagacggtgcttcaaggacaaggatgatgagaaaatagtactgtgcgatggctgcgacgaggcttatcacatctactgcatggacccgccgtgcgagtctgtcccgagaggtaaatggttctgcacgcggtgtagcgcgcggaggtcagtgcaagggatgcagaggtatgagaagtcgatcctggagaaagtcaagcgtgctcctggtgccaatgggccgaaggtgcaggcatctgctggtccagaaaaataggcagcagtgtggatgatgtttcacaggccatactagggtagaagaaagggaaggatacttttgttcctctgagggagggggtatacattgctctggtagctttgaagaatcgatggatgggttgtgtatacgtggggggaaggaagatgccccgttggctgctgatgttgattcactgtgctgccatttcgtttttggaattcttgagtgtcgctcggcttgttgttgtgctgttatgttgtgtctgatggtaagtggcatcgcttatcgatgatatgtacatgcctgtaactcgttttcttttatttgttggacattgtgtgtgtgtgtgtgtgtgtttgaattgtgatgacctagagaacgctggtgtcaatcaatgcagcgtaccttgtttgcgcctaaatttggtagacaaaagaggagattaccttcgtagcatgtgtaccctgcatgtggaaggcaaacctatcaataattccttgtatgaatttgacatagattattacc

SEQ ID NO: 3357 - DNA, 409 bp, Zea mays
  unsure (1)..(409): unsure at all n locations
  Clone ID: TF_LIB4760-024-R1-K1-C1
ggacaccacgtcatcggccccattctcctccgtcctctccctctcgacttggcgacaggctctctctcctacccgagaggacagaccgcaccgccacgcacccggcaccccctctcctctctgccgtcatgggacgtgccgcgccgtcttcatcgccgagctcgccgcagctcgggcgcaagcgcacggcggcgcccacaccggagcccccgacaccgcagcgccactgctccatggtcgacgtcatgcgccgctcgcgcgccgtcgccgcgccgccccctgtcgcacgcgcgcgggtgtacacctactacgagacccttctctgtgagacctgcggcctcggtgaccgcgacgaccagatgctcctntgcgaccggtgcgaccgcggctgccataccttttgcctccg

SEQ ID NO: 3358 - DNA, 1181 bp, Zea mays
  unsure (1)..(1181): unsure at all n locations
  Clone ID: TF_ZmC24647_2
gggccggcctttttcctgtctcctcccacccttgcctccgagtcacctcctcccttggtctccgccgtcgctgcctccttgccggaaccctaaatggaccccggcgccggcgcacactactccgtccgtaccgcggaggaggttttccgcgacttccgcggccgccgcgcgggcatgatcaaggccctcaccaacgatgtggagaagttctaccagctgtgtgaccccgaaaaggaaaacttgtgcctttatggctaccccaacgaaacatgggaagtaactttgccagcagaggaagttcctccagagatccctgaaccagctttgggtataaactttgctagggatggcatgaatgagaaggattggttagcgctagttgctgtccacagcgattcctggttactagcagttgcattctactttgcagcccggtttgggtttgacaaagaggccagacggcggctcttcaacatgataaataacttgcccacgatatttgaagtagtgactggggttgcaaataaacaaaacaaggagaagggccccaatagtaccagcaaaagcaacaaaacaagttcaaaaatgacatcaagacccgagtctcattccaaggcgacaaaagtggcagtgccccctaaggatgacgatgatgagagcggtgaagaatatgaagaggaagagcgtgataacaccttatgtggatcaggtggaacaaatgacggcaaggacgaattctggatctgttgtgatagttgtgagcggtggtaccatgggaagtgtgtcaagatcactcctgcacgtgctgagcacatcaagcactacaaatgcccagattgcaacaacaagagggcaagagcctagcgtcaagccctggtgtgaccctggagtgaagtaagcgtcaaatcattgatgtctgcagatatatgcctacttgtctagcttgtagacttgcttttcatttcgcatgaacgctattgattcactcggttgccctctgcagctcatattgctcgggcttaattgtgtttaatgttttataagcggttgttgttgtagtaccaggcagtcttgcagacatgtgatagacgtttttggactcggcttaaaaaaaaaaaaaaaaaaaaaaaaaaaaaaaaaaaaaaaaaaannaaaaaaaaaaaaaaaaaaaggggcgggcc

SEQ ID NO: 3359 - DNA, 1704 bp, Zea mays
  Clone ID: TF_ZmC4031_2
gtcccttcaagcagaccaaaacgatgatacctgtgcatcatgtggcgatggtggtgaactgatatgctgtgacaattgtcctgctagttaccatcaagcctgcttgtcttgccaggatattccagatggcaactggtactgctctagctgcctttgcgacatttgtggtgaagtaatcgattcaaaggagcttgtaacttcccttcctgctttagattgctcacagtgcgaacgccaataccatgtaaaatgtgtatctgccaaagttccgtgcaatgaggatggatctggtacctggttttgtggaagaaaatgtcacgagatctatatgaccttccgttctcgtgttggagtgcctgatcacatggacgatgatctgtgtttcaccgttcttcgtaacaacggtgataagaaggttcgcacggcagaggagattgctctcatggctgaatgcaacatgaaactcatgatcgccacgagtatcatggaagagtgtttcctgcctattctagatcccaggacagggatagacattattccctccatattgtataactggaggtctgatttacatttcaattacaaggggttctatacagtagtcttggaaagtgatgatagcatggtatctgttgcctccataaggttgcatggtgcaattttagcagagatgcctctggtagcaacttctaaagagaatcgtcagcaggggatgtgcaggcgcctcatggattacattgaggagatgctgaaatccctgaaggtggagatgctgctcctatcagcaatcccgcacctggcggagacatggacatcgacatttgggttcagagagatagatgagtcggacaagaagaggctgagtaaggtgaggctggccgcagttccggggaccgtcctactgaagaaggacctgctgtgtgaatgttcaggcgcggacgccggtgagccgccgagccctaagcccttccaagtttactcgcgcgtgccgggcgcccgcaccggtttggatgcagtgtgccaataaagatgacgcagtggatcgaatgcgccgcggtcagtcgtcgtcgtcggtgacagggggcagctggtggtcgtcacggggcctcgtctccggttgctgaagccgaggccgagcacatcagcacgcgccggtttgtgtggtggaaatggaaagcctcgttgctctggtaggagctctgaagatcgctgtcgtctgcttgtagtctgtaaatagcttctccgtcggcgagaagcccagggtccacggccattgtagaaccgaacctgtatgataaaactagaccgtgttggcgccccaccagcgtttagtagtttccgttgccctttgaactcaaagtttcaggctagtccattgtgttcgtttcagaagcctgcggttttcagggggaggggaggtgccagaaagggaggacataacgcacgtgcagaccgagtattatgtggtggtgtcgtagacacgcacgagttgacgaagctataggagcagctcgtgatgagcaatggttggtgcagatgatgatgtcaatgagctcctcccgcagggaccggacctgtggacacggatggagctgaacttgtttgaaggatgcgtagtactaataatatatgcagtcaagccagcctgaacttatttgaatgaggtgtagtactaataatatatgcagccaagccagcctgaca

SEQ ID NO: 3360 - DNA, 1426 bp, Zea mays
  unsure (1)..(1426): unsure at all n locations
  Clone ID: TF_ZmC28160_1
ctgtcatctagatgtgtgacttgtcaagactggtaccatggctcctgcgtggaaaacctgtctgctactacacaaacgacaattgaatggatgtgttcattttgctcactcttacagagtgaggaccaattgaagaaccaactatctgtaaagatgtctaaaggaaactgtcctgcacttgccgcccctcgtccgctcatctcttctgcaaagggtttatacactgggattgaggaaattaatttgctaaaagaaattgttgataaggctcgtaacttgaatgcctacttgatgcaaattctggatgattcagactgttatcatggagaagatcttactgtcatattcaaatctcttttagttgctctcaaggcgacatcagcttctggcttgtatgatgacaatgtcagttgcagaattgagtctgttttgagcagatatttgtggaagaaacaaatacataaactattgtatggtggtaaaaagtcatcgattcaagaagtactgtgccttgatgaagagggttcacatttagagatatgtgatcaagatttcttcaagttggagattagtaaaataaaggaaaccagcctgcagtggctggctaaagcagaggaggttgcatgtgattctggtgagcttgcactggatcttgtgtatggacttatagctgaaggggaaaatctctctgtagactttgagaaggaactaaagttactgagggatcgcagtgtcctctactgcatctgctgtaagcccgacgataacagggccatgattgcatgcgaccagtgtgatgagtggtaccattttgattgcatcaacctgcttggaccccctccagaaagcttcttctgccctgcttgccatccaaacaatggtgaagaatctgtatcacttgcacgctcagaggatgatgaggatagatcaagcactggagccggagctcacacgccgccggacagagtggtggagcgagacttaataaagcttcttagctgccatagcggtagctcatggagcgagagcagaagggctcctcatcgaacagctagaaggcgtagtagtttcgtcggattgttatgatgtgcaggaaccttcttagcaccgtgaattgattctttttagttaggttagaagcaggaacgatccatcatctgctgttgtaatttgtagctgttgacaggaggtagatgtagcaaggcagagctgtaagaacccattattattgatcttgtagcagtctgaggttttggaaattgtatcatatactaccgccgttcttgaatatttgtcgcctattgtttcaaaaaacgacaaataaaaaaattaaaaaagaatggagagtatttttatgctgctgctatgcacggctcataaaaaaaannnnnancnannagnanaataaatttttttaacatcatat

SEQ ID NO: 3361 - DNA, 705 bp, Zea mays
  Clone ID: TF_jC-zmshLIB3587P047b02b1
attacaaggcatggagaaggcaagggaaaggagaaacaggaacaggaggaggctgggaagccaatatgcgggatctgtctctcggaggagctgagagctactgtacaagcggttcactacaatcaccaagtcatcaaaggtagatcttggtcttggagtgagaaaagctgtagtcaaggtcgaagagcgtgatcaggtttatcagcccactgaagaagaaataaggcgttggctagacccatatgaaaatgttgtttgtatagagtgcaatcaaggtggcgatgataatctcatgctactatgtgacatttgtgattcctcagcacatacttattgtgttggcttgggtagagaagtgcccgaaggaaactggtactgtggaggatgtagactcggtgacgagggaccatcatatactggaattcagcgtacagtagcttatgaaagacaaaattacagaagtcatgtcggtagttctgtaagttttggcatggctgtaccaggcggtacatttgaaaggccgtcatcaatcaatcctcgccattcttttcaagggattgatctaaatctatctccaagagagtttcccggagaatcacatcctgctgaatcacaagtttcaactgatagcgtatcaactcccactggaagagctggaaaaactatttcaggaaggcgtgaattacaacggtacattcagagttt

SEQ ID NO: 3362 - DNA, 2587 bp, Zea mays
  unsure (1)..(2587): unsure at all n locations
  Clone ID: TF_ZmC877_1
gnttacgaggnatgagntgtggntgatgacgatgacgacgacttcattgtcgacgatgaggtcattgtgaatcggcaccccaanaagaaggccaggatagggagtgggagggagacagtggtggaccctcaagtatctattgaggaagagacatggccagaccttgagtcagactcatcggactttgagtttgcgacgtccgatgaagaacctaacaatgttgaaacacctgtagctgagcagactacagtcagaaaaggaggaagaagaggatatctgagtcagagtcatcctcagattctgaatttgttgtatcaggtaaggaattggaagaattgagggagcctgagcctccaaaggctgcaccaaatctgcatgtgtccttgagaaggatttgtattacaaggcatggagaaggcaagggaaaggagaaacaggaacaggaggaggctgggaagccaatatgcgggatctgcctctcgcccacgcgtccgcccacgcgtccgggaggagctgaaagctactgtacaaggtgtcctcaattgttgctcacactatttttgcttcgcatgcatcatggaatggtctagggttgagtcgagatgcccattgtgcaagcagcggttcactacaatcaccaagtcatcgaaggtagatcttggtcttggagtgagaagagctgtaatcaaggtcgaagagcgtgatcaggtttatcagcccactgaagaagaaataaggcgttggctagacccatatgaaaatgttgtttgtatagagtgcaatcaaggtggcgatgataatctcatgctactatgtgacatttgtgattcctcagcacatacttattgtgttggcttgggtagagaagtgcccgaaggaaactggtactgtggaggatgtagactcggtgacgagggaccatcatatactggaattcagcgtacagtagcttatgaaagacaaaattacagaagtcatgtcgatagtagttctgtaagttttggcatggctgcaccaggcggtacatttgaaaggccgtcatcaatcaatcctcgccattcttttcaagggattgatctaaatctatctccaagagagtttcccggagaatcacatcctgctgaatcacaagtttcaactgatagcgtatcaactcccactggaagagctggaagaactatttcaggaaggcgtgaaatacaacggtacattcagagtttgttcagaccaagtctacctagtagaccagacacgtaccacaatattgcgcagaacagtggtggtgtatcaagaaatgaaccgaaccgctggaacttcccttcttcatcagaagcaaacacatcacagaatctgcctgatggcattcagaaccatcacagtgaccttccatttgttcaagctcacagcaattttgctccatttatgtccctagatggggatgatttccagcaaattgagggtgtcaagagcaacctcaggaacatgcagtagagcccttacggcgttactagaagctcgattctaccctgtgaagcttaccaagggggcaacatgtgccgttttaatggcttgtggaactgaacataacaaaagcttgtgcctgttgcattctcccagaaattgatgtggttcggctcatttgcggagatgtgatgtggtcaacgatataagatacatgctctctttgtttaagtttaggcattttttgttgtcgtcattcttattcattcagtcattaagcacaacctcagattacacagcgaagaaggcatttctgaatgtcttgatagcttcaaatttatacattgtaatattgtggtaacaccaatttcattaggctgaccattcttttcctcgcgagatgctcttttgcctactaggaatgctgataactgagcttcccagcctcttctataatcatataccgcgcggtggcaaactagcctcgttcgggtactggctttctgctctattagcatactggtctagtggatcaaccgagaaaagctatcaacaatcttagtactaacaatctatggtctgaagactcgtcttctttaagtgttttgttgtatagcgcagctgctttttgtacagatgaatgtttgttccatattgcttaagtttgttgtttaagtttaggcattttttgttgtggtcattcttattcattcagtcattaagcacaacctcagattacacagcgaaggcatttctgaatgtcttgatagcttcaaatttatacattgtaatattgtggtaacaccaatttcattaggctgaccattcttttcctcgcgagatgctcttttgcctactaggaatgctgataactgagcttcccagccttttctataatcatataccgcgcggtggcaaactagcctcgttcgggtactggctttctgttctattagcatactggtctagtggatcaaccgagaaaagctatcaacaattttagtactaacaatctatggttctgaagactcgtcttctttaagtgttttgttgtatagcgcagctgctttttgtacagatgaatgtttgttccatattgcttaagtttgtatccagtatccccttc

SEQ ID NO: 3363 - DNA, 753 bp, Zea mays
  Clone ID: TF_ZmC311_1
agcttaccacacttactgcatggatccaccgcgcagttctgtcccgagaggtaaatggttctgcacgccgtgtagtgcatggaggtcggcgaacgggatgcagaggtatgagaagtcgatcctgcagagcgtcaagcgtgttcctgatgccaaagggcccaaggtgcaggcagcagctgctgctccaggaaaataagcagcggcgctgtggatgcgagggtacaaaaagaaatgaaaggattcttgttcctctgaaggtgtatgcattactctgacagactgaatcgagtaatcggaggatgggctgtgtatacgtggggagaagacctgttggcttgtgaagacggagatggtggcatccgagtggacacgcacttttgtctctgtggatggagctgctgatgttggttccctgtcctgttatttccttcctggaattcttctgactaccccaagcgagtaggttgttgttgttgttgttctgttatgttgtgtctgccctttacctgatgctaagtggtaacactgacacccgcccatgttgacattgatatgtacatgtccgttacctgttttctttttgttggacaatccatatatacttttctgcatggcatgtggtcgatgtctgtataagtttattacatatctgattgaacccataaggcagaaagcttgggtgatatctaaacaatgatgcatctccatgttttttcttctttctttcaagtgtcatatttatgttgttggaga

SEQ ID NO: 3364 - DNA, 983 bp, Zea mays
  Clone ID: TF_ZmC350427_1
gttctagatcgcgagcggcctcccttttttttttttttttttttttgacagcagaagcgtgcggcattctacaaggtttttctttctaaaaacatacaatgcctccaactattcgtgtagtacatttatttttgttcaattaagtaagcgcgtgtaatccacacaccatggaaagaccaccacacagcgtacagaaagatcaccttcgcctggaccctctgcccctgcgttcggtgcctctagcatgcttcgtctcggtctcgggctccggcacggcgcacctggggcacatccagtcgtcgtcggggacggcgtccaggggagggtcgcagcagtcgatgtgcatgccgatcccgcagccggcctcgccggcctcgtcgccgcagatcagcatcacgtctccccggtccctgcggccgcacgccgagcagctcaggtcctccggatcgtcgtcttccgacggttccgacttctccgccgttgccatctctacctgcttcttcgtgagtttctccagggacttgctggccacgcagttcgtctcgaagagaacgtgccggtccaggggctggcccggcttgcacacgtactcgaccaggtaatcggcgctgacacagggaatgccgtggctgatgaattcctggacccacgcgtctgttcgtgatatgctctctgataccacggcgaagtcgactccagagtctaggaaccgggtgtatggcggcgatgttgctaaaacggcgccatcgccggcctttactgcacgctttactgtgtccagagttggtaatatgaactgtccgtaggcaacgatctgcattccgtagaaggcgccatggcccatctgctgccttatgtttcgccatttcctgggagcgtcgaaactgattgttcgtccatcgttgaagcctgtgccgaaccattcaaacggttcttcgtccacgaacttgccggcctcaatgcacgcggtcaagtactctctc

SEQ ID NO: 3365 - DNA, 1235 bp, Zea mays
  Clone ID: TF_ZmC21748_2
cggacgcgtggctcgaggccggccgggaggcctacggtctcgcggtattgcgcttctcgtcttctctaatcctcttctgctccctccactaccagtccaccaccaccactgctaccatcggttccccaaaccctagccaagggacacggtggccagcgatggacggcgacagagaaggcgctgcggcggtgcaccaccacgcgcgctcccccgaggacgtcttccgcgatttccgcgcgcgccgcgccggcatcgtcaaggcactcaccacggatgtggagaagttctatcagcagtgcgatccagagaaagagaacttgtgcctttatggtttgccaaatgagacttgggaggttactcttccagctgaggaagtacctcctgagcttccagaaccagcactgggcataaactttgcccgtgatggaatggttgaaaaagactggttgtctctagttgcagttcatagtgatgcgtggctcctgtctgttgcattctactttggagctcgctttggatttgataaagatgcaaggagaaggctcttcaccatgattaataacctgcccactgtttatgaagttgtgaccggggttgctaagaagcaatcaaaagcccccaacggcagcagcaaaagcagcaaatctaactctaaaccatcaaaacagatcaattctaacagtaagcctgtgaagccagcccacccaaacgaagaggaggatagcggccgtgaggacgcagaggaggaccaggcgtacctgtgtgggtcctgtggggaaagctatgcgaatggggagttctggatctgctgcgatatctgcgagaagtggttccatggcaagtgtgtccgcatcacccctgcaaaggcagagcacatcaagcagtacaagtgtcccagctgcagcaccaagcggagccgggaatgacaggcgccctggggcaggactcgctcccacttgacgaagcatttagaatcattaggagcagtgaaagtgtgaaactgtgtcattagaatcacttcctctgtttagtggaccagtgcgtgtgctggctgttgtatttttctcgtcgtgtgttgtacactggtagtaatggacatggtagctagtggtgacgtgttgtgttagcaagcaggctgactgttgtcatcgtagagtcggatgaactgctggagtttggaaacacatgttcagtaattcagtgatgtttagcgtgtatgataattttcttcggct

SEQ ID NO: 3366 - DNA, 477 bp, Zea mays
  unsure (1)..(477): unsure at all n locations
  Clone ID: TF_LIB3591-115-Q1-K6-A4F2B
cnaaacccagaaaagggggggcgattttttataaataaacacccctacccatatcttatatactaccgaacaccgaagatatccaattttcttataaaggttcaaattacactaaaaccacaagaattagcctgcctgcctgctaaatacaatatctatttaccatgtcgggtacaacacaatgactagaaaatacaacaaccggcctgcaccccggttctgctgcttgacggaaagaagttgcaggggaagccgttttcccccctttcaccaattcctaacgattctaaaacatgtcaaccgggaccctcccgtggtcattctcggctccttttgctgctggaaccagggcacttgtactggttgatgcgctctgccttcggaggggtgatcccaacgcacttgccatggaaccccttctcgcagacgtggcaacaaaaccaaaactcaccgttcgcgtaagtttttccccaagcc

SEQ ID NO: 3367 - DNA, 1422 bp, Zea mays
  Clone ID: TF_ZmC1446_1
ttgggtacctcgaggccggccgggaccgggtctcagaaggatggaagcatgatggagcacccacacaggtcgccgagaaaatcctccccccaaacgccgacgaaattctccgcgagcaaaatataaagtttataaacccactcctccccttcccctgttccctctaccaccaccaccggcaccgcgggacagtctgctctcgtcccgccgcagcccgtccccgacccggaaccctagcgactgccattgcccacgcgccgctcgcccgatgaacggcgggggctctgggctggcgcccaacgccgcgcacaccgcggacgaggtcttccgcgactacaaaggccgccgcgccggcatgatcaaggccctcaccactgatgtggagaggttcttcaaactctgtgaccctgcgaaaaggagaacttgtgcctttatggctatcccgatgagacgtgggaggtgaccttgccagctgaggaagttccccctgagatccctgaaccagcattaggaatcaactttgctagggatggcatgaatgagaaagactggctggcgctagttgcagtccacagtgattcctggttactgtctgttgcattctactttggtgcacgctttggatttgacagagaaactaggaggcgactctttagcctgataaacaacatgcccacgatatttgaggtagtgacaggagcagccaagaagcaggcgaaggagaagacacctaatagtagcagcaagagcaacaggcctagttcaaaagtgcagtcaagagcagagtctcgttcaaaggctaaggtcccccaagacgaagaagagagcggtgatgacgatgaggatgaggaggcagacgagcacaacaataccttgtgtggaacttgcggaactaacgacagcaaggaccagttctggatctgttgtgataactgcgagaagtggtaccatgggaagtgtgtcaagatcacgccagctcgagctgagcatatcaagcagtacaagtgcccagactgcaccaacaagcgggccagggcatgagcggcaaacatcggcatcgggcgacctttgataggaaggaagaaaccacctcctggcttcaagatccctagatatggcgtaggtccctagtttacgaagtctgcattttcatgtgttcattaatatatctgctgattagctgttcgacctagcagtgtctaaaacgtgccgtgtgtcttctgtgctgagtgttgacatggggcctcctccctccagcctgtaaacgctgtcactgaaggtacctctcaactgaccatccttcattgttggtgtcgtgcagtgagtagtggccgtactctttgttcccagttcctagcatttgaattgctcaaatgcgtaccttgctgagtaaggccgttggaaaatgactaaacaaaataa

SEQ ID NO: 3368 - DNA, 1341 bp, Zea mays
  Clone ID: TF_ZmC1446_2
tgggaccctcgaggccggccgggataagtttcaaacccactcctccccttcccctgttccctctaccaccaccaccggcaccgcgggacagtctgctctcgtcccgctgcagcccgtccccgacccggaaccctagcgactgccattgcccacgcgccgctcgcccgatgaacggcgggggctctgggctggcgcccaacgccgcgcacaccgcggacgaggtcttccgcgactacaaaggccgccgcgccggcatgatcaaggccctcaccactgatgtggagaggttcttcaaactctgtgaccctggtgagtgcgctcgatctctttggttcctcgccccaggatgtggagtgatagccgaggaggcttccgtggtttttctgcttgggcttcgttgcttcgaaaaggagaacttgtgcctttatggctatcccgatgagacgtgggaggtgaccttgccagctgaggaagttccccctgagatccctgaaccagcattaggaatcaactttgctagggatggcatgaatgagaaagactggctggcgctagttgcagtccacagtgattcctggttactgtctgttgcattctactttggtgcacgctttggatttgacagagaaactaggaggcgactctttagcctgataaacaacatgcccacgatatttgaggtagtgacaggagcagccaagaagcaggcgaaggagaagacacctaatagtagcagcaagagcaacaggcctagttcaaaagtgcagtcaagagcagagtctcgttcaaaggctaaggtcccccaagacgaagaagagagcggtgatgacgatgaggatgaggaggcagacgagcacaacaataccttgtgtggaacttgcggaactaacgacagcaaggaccagttctggatctgttgtgataactgcgagaagtggtaccatgggaagtgtgtcaagatcacgccagctcgagctgagcatatcaagcagtacaagtgcccagactgcaccaacaagcgggccagggcatgagcggcaaacatcggcatcgggcgacctttgataggaaggaagaaaccacctcctggcttcaagatccctagatatggcgtaggtccctagtttacgaagtctgcattttcatgtgttcattaatatatctgctgattagctgttcgacctagcagtgtctaaaacgtgccgtgtgtcttctgtgctgagtgttgacatggggcctcctccctccagcctgtaaacgctgtcactgaaggtacctctcaactgaccatccttcattgttggtgtcgtgcagtgagtagtggccgtactctttgttccc

SEQ ID NO: 3369 - DNA, 682 bp, Zea mays
  unsure (1)..(682): unsure at all n locations
  Clone ID: TF_ZmC831741_1
ctgttccgccgctcgccacaaaacccctctcccctcacgctccccacccacctcctccccctcgaggcaatgccgagcgcccttaacctagtctgagttcgagctcaatccccattccgtcatggatcggccgccgcatctcgtcatcgacctcaacgaggccccgccgccgccgtcgagcgacaccccgccggcgcaggccccgtcgccgccgcaggagttggctccgcccgtccaagctcctcctcctcctcctcctccgccgccgccgccgcagtttcctcctctcctgccgccgcagctgcccctgggtgcgcccaaccaacaggtgcggctccagcaggaggccctcgacgtggtgcttcgggtccaccgccccctcgaactgaggaatacaccttttgggcccatagggaacgtgcccgccggcttgctccctggtctggggctgccgctgctccctctgcagccgccggcgcctcaccctggggaggcggcggttgnggcaacccgccggccccctgctcgncctgcggncgccaggagattctggggggaaccttggtctgcgacgcgtgtgacagggggttccatcccaactgcgtccgcgtctggccggctctcttccccccgcccccgccacccaacgagggactggatctgccctgcgtgggaaaggcgt

SEQ ID NO: 3370 - DNA, 407 bp, Zea mays
  Clone ID: TF_LIB3059-004-Q1-K1-G10
aattcccgggtcgacccactcgtccgcccactcgtccgggggacactatcctgggttatagagcggttcaggttaattggaaagatctggactattgcaatgtttgtgatatggatgaggagtatgaagacaacttattcttgcaatgtgacaagtgtcgtatgatggttcatgctagatgttatggtgaacttaaacaattggatggaggactttggctttgcaacttgtgtcgaccaggtgcacctcgtgtgtctccaaaatgctgtctatgtccagtcacaggtggtgcaatgaatcctacaacagatggccgttgggctcatctcgcatgtgctatatggatccctgaaacatgcttaaaggatgtaaagagaatggaacctattgatggactgagcataatc

SEQ ID NO: 3371 - DNA, 1244 bp, Zea mays
  Clone ID: TF_ZmC1446_3
gcacgagccgcgagcaaaatataaacccactcctgcccttcctccaactcctccgttccccgttccctcctctaccactggccccggcaccgcgggagcgccgaccgcctgctcgtctcgccgcagcccgtccctgagccggaaccctagcggccgccattgcccacgcgctgcgcgcccgatggacggcgggggctccgggccggcgcccaacgccgcgcacaccgcggaagaggtcttccgcgactacaaagcccgccgcgccggcatgatcaaggcactcaccaccgatgtggagaggttcttcaagctctgtgaccccgaaaaggagaacttgtgcctctatggctatcccgatgagacatgggaggttaccttgccagctgaggaagtgcccccagagatccctgaaccagcattaggaatcaactttgctagggatggcatgatgagaaggactggctggcgctagttgcagtccacagtgattcctggttactatctgtcgcattctactttggtgcacggtttggatttgacagagaagctaggaggcggctctttagcctgataaacaacatgcccacgatatttgaggtggtgacgggagcagtcaagaagcagcaggcaaaggagaagacacctaacagtagcagcaagagcaacaagcctagttcaaaagtgcagtcaagagcagagtctcgatcgaaggctaaggtccccaaagacgaagaagagagcggtgacgacgacggggacgaggaggcggaggagcacgacaacaccctgtgtggaacctgcgggaccaacgacggcaaggaccagttctggatctgctgcgataactgcgagaagtggtaccacgggaagtgtgtcaagatcacgcccgcacgggccgagcatatcaagcagtacaagtgcccagactgcaccaacaagagggtcagggcgtgagcaaccgaatccgatgcgaccttgctaggaaggaaaggaagaaacgacctccttggcgccaagatatggcgtgtagttccctagtctgtaagcctgcatttttcatttatggttgttttatctgttgattagctgttcgacctagcattgtctaatgcgtggcatgtctcatgtgctgagtgttgacattggcatgggccccgccctctagtctgtaaacgttgtcactgaaggtacctctcggctgaccatttctccaaaaaaaaaaaaaaaggccggccggcgccgtt

SEQ ID NO: 3372 - DNA, 2151 bp, Zea mays
  Clone ID: TF_ZmC4031_1
aaaaacagaaagcaaacattgcttctttaaataattgcgtaagtatggacaatttaactgtcaatcctattgatcctgtagttctcaatgagggagagcagacaggtacagcaatcactgagcaggttcctgttcctttgaatctagtgcttgagaataaaaatgacaaggaccaaggtgagcaaagcagtgaaacttcagaacaacttatgtccaaagaaccacaaaaaagggacatcaaaaggcaaaagagaacatggtctcatacatgcaagtttgatgatgatgaccttctgatgacagctgtaatatataagctgacagcacgttacaggaactcttttcatcggaagctcagaaataaattcggtttcaggcgtcttccaacataccgctgggagaatgaagataaaggtgacaggaagaagtttcctggagaagcaaggacggtgttgaacaagttacttgaaatgggcattgttgctagagtggatattcttcaatgtcatggtccaggaggcaaaaatgtgttgaaggatgggaacataactgcgagtggcattcaatgccagtgctgtggtaccacattcacaatgtccaagtttaagtgtcatgcaggtctcaggcaagaagtcccatctctgaatcttttcttggatacaggcaaatcttacagtctttgtcagcttcaagcatggtctatagagcagaaggtgaggaaagagcatgcaaaggatacaatgtcccttcaagcagaccaaaacgatgatacctgtggatcatgtggcgatggtggtgaactgatatgctgtgacaattgtcctgctagttaccatcaagcctgcttgtcttgccaggatattccagatggcaactggtactgctctagctgcctttgcgacatttgtggtgaagtaatcgattcaaaggagcttgtaacttcccttcctgctttagaatgctcacagtgcgaacgccaataccatgtaaaaagagtatctgccaaagttccgtgcaatgaggatggatctggtacctggttttgtggaagaaaatgccacgagatctatatgaccttccgttctcgtgttggagtgcctgatcacatggacgatgatctgtgtttcaccgttcttcgtaacaacggtgataagaaggttcgcacggcagaggagattgctctcatggctgaatgcaacatgaaactcatgatcgccacgagtatcatggaagagtgtttcctgcctattctagatcccaggacagggatagacattattccctccatattgtataactggaggtctgatttacatttcaattacaaggggttctatacaatagtcttggaaagtgatgatagcatggtatctgttgcctccataaggttgcatggtgcaattgtagcagagatgcctctggtagcaacttctaaagagaatcgtcagcaggggatgtgcaggcgcctcatggattacattgaggagatgctgaaatccctgaaggtggagatgctgctcctatcagcaatcccgcacctggcggagacatggacatcgacatttgggttcagagagatagatgagtcggacaagaagaggctgagtaaggtgaggctggccgcagttccggggaccgtcctactgaagaaggacctgctgtgtgaatgttcaggcgcggacgccggtgagccgccgagccctaagcccttccaagtttactcgcgcgtgccgagaggccgcaccggtttggatgcagtgtgccaataaagatgacgcagcggatcgaatgcgccgcggtcagtcgtcgccgtggtcgtcgtcggtgacaggggcagctggtggtcgtcacggggcctcgtctccggttgctgaagccgaggccgagcatcagcacgcgccggtttgtgtggtggaaatggaaagcctcgttgctctggtaggagctctgaagatcgctgtcgtctgcttgtagtctgtaaatagcttctccgtcggcgagaagcccagggtccacggatgccgctggccagtggacgcggccattgtggaaccgaacctgtatgataaaactagaccgtgttggcgccccaccagcgtttagtttccgttgccctttgaactcccaagtttcaggctagtccattgtgtt

SEQ ID NO: 3373 - DNA, 2228 bp, Zea mays
  Clone ID: TF_ZmC37301_1
cccgggcgcgcctttttttttttttttactatcacaaaaagacattgattggccagcaaataacaccagcaaccaaatataagtgaataacaaattgtcgagaaactcgtcggaaaactaaacatacaaaacactccagacacggcgctacctgcttctcttacatccaaggtgatctaaaacctcattccctaccctaacagaatctagtcgaaagccaatggggcttccaacaccaaaaaacgatgtctgttacacgctaggctagcgaaacatggcgcaacagatggaagttgcgctcagtatctcgtccagtcagcaaaggctgagaggctctgctccagcggatgtcaaacctcagggggggaggactctacctgccataatcatggcgcaatgtattgagcgagaacaggtcctaagctgcatattatggggaaaaggtttcatcgcttcccgcccttcgatcttgaagcaatcaagcggatggcctgcttccccagctccacgttctcagacctgccattatctaaccgaatacacagtgtgccacccatgacattagacaccatcccttgatgccatttgccatcagaagttagatggacctcaatcctctttccgatcgcatccttgcccaacttgcgtagaatccagtttgcgtccatcacttcatctcgtgctctgctgatgcctcttggctggagttataccgtccaaaccatctgccttctccatcgaaggcctcttcctctttgatctctggcctttagcaacatttaactgctcctcttgctgagaaacccaggaggtcggctcctctggttgagaggcctgggtgtttagctgctcataatgtggacgcttaaacttgagtttgagcaatgatggcttcaagttatcaggagagtcagcagttccctggttctcgtccacctgactagaatgagattgtttctgtgcaaatggccggtttctagtaccagtttcatttccattctccattccagaaattagagcattgctccttttcccagttgcatgcttttttgaggtaccaagatcacccaaaaggctatttctttgttgtaccccagtctctctaactaacttcattacacttctctcttttacctcgcttcttgaacctttcagctggcttgtgacatctattttccgtccatgtattgatcctaaatcttgctctctttgataattggacagctccgacttaggagagccactcctagttttatgccgtgaaccaagatggataaccaacttggtagcttttccagtgtcagtcttggaagtattttcttcaccatctttgtaatgcaaactcgaaaccttactgcctttaatcttgactttgggtatcatatcagcattgtttgtcacagctttcatggatggagattttaaattcttttctgaacttcgagttgaagatgaaatataggcattatcatcattcttaaaagggctcatatcatgattgtcatctatagtttgatctcccaaacagctatttgatgatttaacagcatgccttctctccagaaatatttcatcatggccatcaactgttttattagcctgaccacttttctttttggaaggcttcttatttgatccagagctcttaaaaacaatcttctcttgctcaggtgtatctggtggaggtttactactgttacttttcaatgaaaactttagagtatttctactctcatttttcaatgcatatgcaccgagtttctcatcatcagagttttgataaggtggtgagacatcttcaagagaaggcagtgcagcagcagcccgtaaagtagccataagctcatgatcggcaacatccctcctcttccaaagctcccggattgcatcctcagtgtctctgatctgggagcattcaccacggcatgctgcacatgtgtactgaaggttttgatcagcttggaattgttggtacttttcctcactgatgccatcacactcaatatgcacccacttttcacaaacatcgcagcaaaccataggtatcacttcagagtctctataaaccttcaagcagattggacagtagtttcctttcacaaacaatcgtccacacgcatcacagcatgtgtaccccaaaaaccaccttgtgctgtgtccactaccaggcacaccagatccacagctgtggcaccttgtatgttttggacataaatatggtccatgag

SEQ ID NO: 3374 - DNA, 2326 bp, Zea mays
  Clone ID: TF_ZmC1977_2
ctcgctggtttcccccgctcctccaatttggacagccgcttcggcttcgcttcatcctcccccctcccaccccaactcctcgtcccgctccggcgtgcgtttcctttcccggcttgggttgcccaccgagatcacccccctcaaaccctagcccctcttctcctcctctgaccatctcctcctcctcgcgcttcgccttcccaatctcgctgccgtttcttgggcctgggactcgcgctctgctatctgtgtccgcgtatggcctgcgacggcgccgccagaggccgccctcccaagcgccccgcttcgggaggcctggcccagcccaacgtcgtcacctacaagagacgccgccgcggcaccggcgccaacgccggccacagcgccgtcacgtctggccccgaccccgctgaaatgagcgcggtggtgcacgccatcgattcccagcaaggtgggcgccaaacgctgggcaggcactggagaaactggagggacacgctggagggcgtcctacaatccactgctgggaagcagggctccggagggattcagagctgcatccgagctgcgctcagatttagtggttgccctcccacagaacatgggaacttagctcacgacggaggagcaggcagagatgaccctgttggagctgtacattctgaagagaatagtggtgccttggttcagttagaagacggaacagctgcacctttggaagccaacaaaacgatgtgccataatgctctctttgacattctgatctccgagaagtttgcgatgctgtgtgatctgctagctgcaacattccatgtcagtaagcctgacgatgtgattggtttgcaaataattgatgccaagatgagaaatggggattatgcacagaaccatgcgctgcttgaccatgatatcaagcagatatggaagaagtttgaacacgttggccaagaaatggctggtctggcaagcagtctcttactgatttcacaagcttctaaccaaaagcaggcttctggtgtttcagaaattgatgtggctgaacacaagatagaagaaacaagcctggttggtgttgcccgcaaagccctaagggagttgactccccagtgcgattctggctattctacgataccaaaacgaactgggaggtctggatcggatggaatttgcaaggattgtggcagaaaggcagacagcaaaggaagaattatctgtgacagatgtgaagctgcgtaccatgtttcgtgtctgaagcttgccatcgatgaagaggccccagcaaaatggtactgtcccagctgcgttgagccagacgtagctttgaagcataaaaaccatggcaggtcacatgaaggctgtgatgtatgcgagtggctcgtggtgaagccagaagagcctgctgaagatgttagcgagcctgaactggcggtcaaaacgcaggagagctcagtgtcaagcatgggcgaagacagcgaaccagacctctcaacgactgctctagcgaacttgtgcaagaactgtggcacatgcgaagacgaggacaggaagttcatggtatgcgggcatggtttatgttctttcaagttctaccatgtcctgtgcctgaaagagagacagattgcaagcgagaagcagaagaatctaaagtgctggtactgcccgtcttgcctgtgcagacggtgcttcaaggacaaggatgatgagaaaatagtactgtgcgatggctgcgacgaggcttatcacatctactgcatggacccgccgtgcgagtctgtcccgagaggtaaatggttctgcacgcggtgtagcgcgcggaggtcagtgcaagggatgcagaggtatgagaagtcgatcctggagaaagtcaagcgtgctcctggtgccaatgggccgaaggtgcaggcatctgctggtccagaaaaataggcagcagtgtggatgatgtttcacaggccatactagggtagaagaaagggaaggatacttttgttcctctgagggagggggtatacattgctctggtagctttgaagaatcgatggatgggttgtgtatacgtggggggaaggaagatgccccgttggctgctgatgttgattcactgtgctgccatttcgtttttggaattcttgagtgtcgctcggcttgttgttgtgctgttatgttgtgtctgatggtaagtggcatcgcttatcgatgatatgtacatgcctgtaactcgttttcttttatttgttggacattgtgtgtgtgtgtgtgtgtgtttgaattgtgatgacctagagaacgctggtgtcaatcaatgcagcgtaccttgtttgcgcct

SEQ ID NO: 3375 - DNA, 1200 bp, Zea mays
  Clone ID: TF_ZmC17187_3
gcccgaagatcttgtcatcttccccttttgcccggcagcactcgtcctagtgtactatcatctcgtcgctcggctcccgaccgcatcgcgatcagtcatctcctgcgtctcgttctcgccggagatcagacgcgccaccgccgggcgatggatgcctcctaccgccgcgccggtgccggaagcggttctgctccccgctccgtcgaggacatctacaaggactaccgcgcccgccgctccgccgtcctccgcgccctcacccacgacgtcgaggagttctacgcgctgtgcgatccagagaaggagaacctgtgcctatacgggtacgcaaacgaagcgtgggaggtggcgctgccggcggaggaggtgcccacggagctgccggagcctgcgctcgggatcaacttcgcgcgcgacgggatgaaccgtcgcgactggctcgcgctcgtcgccgtccactccgactcgtggctcatatccgtcgcattctactacgccgcgcggctcaaccgaagtgatcggaagcgtttgtttggcatgatgaatgacctgccaactgtttttgaagtcgtctccggtggtgtgaagcaatctaaggaaagggacagatccggtactgacaacagtggtagaaataaactgtcagcaaagcaaacaagcgagccacggttagaaaataatgccagggagcctgacgagggctacgatgaagacgacggctaccacagcgaaaccttgtgcgggacatgtggtggaatatacagcgcagacgagttctggatcgggtgtgatgtgtgcgagaagtggtaccatggcaagtgcgtgaagataactcctgccaaggcagagagcataaagcagtacaaatgcccgagctgcagcttcaaagagggcgaggcagtagcaaaacccatgaacgcaggaagcctccgaatgtgggatgtatggtgcagaagaggcgcattgcaaagtttgcaggcaggagaaggccaagagacctccatttacaagattagaactatattgctatcttccctgtgccttatgcttactttttttacatatgataagctgatgtgaggaaagataagacatttggcaaccagaggcacttagttaaatgcccctagatatacatgggggtaaaagaagaggaactcatgttttgtcaaatatatggaactttttttcccctcttac

SEQ ID NO: 3376 - DNA, 615 bp, Zea mays
  unsure (1)..(615): unsure at all n locations
  Clone ID: TF_LIB3689-236-Q1-K6-B3
ctgtagtctgagtcgaagttccaaggaggctttgctaaggaacatatcatcaggcaagaagggtgggagtgccggcaaagtaacaaacaagttgggataacagactacacaaattggtctttaatgttctgcttgatggcacagaagtagcttactatgttgatgggcagagaaaggttgatgggtatatcaaggatcatagaatctactgtaatcactgcaacagagtggttagcccatcagcatttgaagctcatgcaggtatgataacatattcacatcaaacggagtatcattgcatgagctggcgatgaaaatatcaaaggatatggaactgtcagaacgcgagacagatgatctgtgcagagaatgtggtcaggggggagacattttcccgtgcaaaatctgtccaaggtcatttcatccagcttgcgttggactgtctaaagtccccgcagaatggtattgtgatagttgtcgcaatcttgtgcaaaaagaaaaggctttagcanagaacaaaaatgctaaagctgctgggaggcaagctggagttgattccattgaacagantatgaagagagctatacgaattgtccccatctctgatgatcttgg

SEQ ID NO: 3377 - DNA, 835 bp, Zea mays
  unsure (1)..(835): unsure at all n locations
  Clone ID: TF_ZmC229769_1
gccccaagaagtatctagaccgacttgagaagaaggtcgtgaagcaataagtttgtatgtctaaaataattcaggccacaaagcataataacagcctcaacaaaaacctgaggcagttttcaaagacggcttgctctctcaaattggagattttcctagaatttaagaacatcccttgcagtttggataccagtaaggtgtatcgagttaagtatcttctcaagcaggtgcaagtgcaacaaagcaaaaagacagataaacgaaacaaatatcctacagcatgttatcatatagcacgcatctcaaaaggcgaatgctgtttgaagatccttgtattttcatcagttcgtgagaggactgcagcaaatgttgttaactgcccttgcccgagccttctgatcctgaggcaggcctctgctctttaaacaacaaactcactttacacggcaaaaggaccgtgtagcaacacgctaatctgtacgagtctccagctgctcatctatcctgagctgctccgcggcagatagcagcaggtccacaccatcaaaattccaactttgtagtccagcatcctccttccggtggagcttcagcgtcctcctctcgtactgtctcatcccctcttatgccctctccacgctgcacgatgagcaataccactgccccttgggtattgaagtatgcgagggtgttatgcagtagatatggtaagcctcgtcgcaactatcgcacagaatgctcaggtcgtcgtctttgtcacacagacaanctcggcaaaggcaagacgggcagtaccagcacgggctgcccatctctacactggtagagatctgca

SEQ ID NO: 3378 - DNA, 3583 bp, Zea mays
  Clone ID: TF_ZmC26156_3
aattcggcacgaggctcatgctggttctgaagtaaataagccatacagaaacatacttgtggatgggctagacattgaccttttgcactgtctcattaatgcatggaatatgcagtctgatgctgaaagacaagatttctttcccgttagcattgagggagatgaccccaatgatgacacctgtggtatttgtggagatggaggcaatttgatctgttgtgatggatgcccctcgacatttcacatgagttgtctaggactggaggcacttcccactgattattggtgttgttccaactgctcatgtaaattttgccatgaacattctagtgatgatgctgaagacactgctgatgttgattcttcattgcatacttgttcccagtgcgaagagcagtgtactgatccctgtttatacttactctgtagtttttttgaatttcgaaatcttttgacactttttattccattttcattattatcttactatattattttgatgttcaatcatgtctttgagtattttatacgataatgtctgcagatcatggagcctgctctcctgatattgattccatagctactaatctttctagtcagacaggcaatttattctgccaacaaagctgcagactggtaacgcttgtcagattattgttcttttttccttgaccttgtttctggatatgctaccttgtggttttcatgatcataatttaaatggtgacacttgctgattcacagtcctgtttgaggcagatatcggtcccttttttaacggctcatgtttgttttgggactaaaatgtttttgtggtttttttatgtttaacaccttaatcaatcatgagatgttaggtttgaggaatatgcttgtccatcatcctcgtattccccaaaagctagttttgattgccaaatggactgagttgatccattatcaacgcatttgtcatggttagtttgtaagtactaccacgaaaaattctgacatctcaccaaatttgaggaatagattcatgatgcaccaccgcatcttggatgaagtgattcctcaaaccaaacacctcctaaatatctgcaccatcccgctctgttagcttcctttcttgatcatatgcatatatgtttttccttctaatagcaatattgcaagtgctgatcccctaggtttggggtggtttttatttacatggatttcattactacaagtgattacatatagtaaggtactatatgagtgtggtattttgtcatggggcggcaacccagggcatggaggcttagattggataagattgagttagttacttgggattagattagataatattgagttagttacttgggatccaagtcttcctatctatataaggatgaactgtacctccttaagaagaaaaaggaatgaagaagaattagtcctagatctctccaatagtctagtccctcccatgctgactctgcccggctaccttcccggcgctgactaggattcataacatatggtatcatgagtcaggtatcctttccatgacttctgctgcggacgatgtacgcacatggcgtgaggagctcgctcgtgccagggcagatctggagcaggcccgatctgctatcctccagctagtgatctactcacggcaaaggtggagtctgactgccgatcagcggcgacaacgcgactgcaggaggctgtgcatgggttcctggcgtgacgtccagtgtggcagcggcttgccgtcttcaggctacgacacgtggcttcctggcgcggcgtcaagcacagcaagcagcggcttgccctcttcaggttgcggcacttggcttcctgacgtggcgtcaagcacgacaagcggcaacacggttgcaggctacggtccgccgttccctggtgcagcgacttgcatcggtattgcgcgttgaacaacacgcggcacgtggggcgacaaggccttcagcagggttggccgatccttagccatgtggacagcaagaacaagtctggttgggtggtgctgtctccactggaactcgcggtagctcaggccgtaagactggtgagctgccacgtcttggcctttgcagcctggaagaggttgttcccatgggatccagggtggcatatgttaggttctttattttatttgttaataaattaaagcggagatgtaaaaggcttatagttagggttgcactttcacatgcatatcaagttagacagcaaggttgtttccatgcaccgagaacgagctgtcttcaaagggtgggggaatgtcatgtggtggcagcccagggcatggaggcccatagggataggctcagggttaggattagtgaataaagattagataagattgacttagatacttgggattagattagataaaataagattgagttagttacttgagagccgagtcttcgtatctatacaaggatgggctgtacctccttaagaagaaaaaggaatgaagaagaattagtcccagatctctccaatagtctggtctctctcaagccgactccgcctgactaccttccggcgctgtttatcacccctatgaactaggattcaaaacatatttgaactattatttagtgacttgagaaccttgtcattttaatccagctattaaaagctctactcttcttttggattgagtcgctatatttttatttctgaaactagacagttggtatttagtcataagaaatgtgtaatgcaaaaacaccatggaagttgtgtatttttgaaaatgctgtattaaacactattttttaccatcaaatcaaacacacatcctgtctagatcctttctatctatttgtggttttatttatcttctagtttattaatgtatgtataccctccctacaagccgcaactgacccaagaacttccaaacttcaaatggtatagttgcataatctgaaattactagttctgtgatgcagctgtttgaggaattgcagaatcttctcgcagtcaagaaggatcttgaaccagaatactcatgcagagttgttcaacgcatccatgaagaggtaccagaagaagtccttgctttggacaaaagagttgagtgtaactccaagattgctgttgcactctcattaatggacgagtgcttccttccgattgttgaccagagaactggcatcaacttgatacgcaatgttgtgtataactgtgggtatgcagctatctttctacaagcaaaaaaaaatccatacagtttcaagtatcctttgtacaacatgcaagctgttggtactatggccttttaattcattccacactattctctctcccccgccctctgtgtattggcggggccatcgggatgagctgatcagacaatattactgaagttattgctcattgttgtcatctttgtgcaaggcataatggagaagtgcatagctcttcatagattgacctgcgtgtattaaacgggtttcctcataaatttaactgccttttagtattgtggagatagtaaagattttagccctgttgattttggatattgaatcattatttgttattctaataatatatcaatcttcatcgttttccc

SEQ ID NO: 3379 - DNA, 812 bp, Zea mays
  unsure (1)..(812): unsure at all n locations
  Clone ID: TF_ZmC147944_1
cattgggtacctcgagatgggccgggagccatggtctctctccgctccgacgcgcccgacccaccaccacatccctcatggctgccctcgccgacatcgactcctcggcacttccgccgtccgagtcatccaaaggcaagggcaagatggacgaggaggaggaggacgaggcggagggcgcggagaagatgtgcggcatctgctatctcgacggccggcgggccatccgcggcgagctcgactgctgcgcccatttcttttgctttgtctgcatcatggcttggggccgcgtcgagtcccgctgtcccttctgcagggcccgcttccacaccatccgccgcccgcccgtcgccggccggttccccgacgagcgaatcgtctcgatccaagagcgcaaccaggtacaccatcctcagggcaacgggagcagcatagtgggcggagatccttacgtgaacaccatatgcaccgtttgcagcagctccagcgatgacgagctgctgctactctgcgagctctgcgactcagctgcacacacttactgtgtcgggctggggaccaccgtgccagagggggactggttctgcaaagactgcgggacgatcagagatgatcaattgagatggcaggctgagaatcagggtgaatttgagatcagcatggatgttcctggagctgagccagttccagccccctcgatttctggtgttgtggatgaggaccatgatctggaaaggcatatgcgcgnagtggtggcgnttcgacggatgacccggttcctccatttatgaaattgtgggtgatgatttgct

SEQ ID NO: 3380 - DNA, 727 bp, Zea mays
  Clone ID: TF_LIB4726-021-R1-K1-B8
ctaatcagggcgctcaccaccgatgttgagaagttctacgtgatgtgcgacccagagaaggataatttatgtttatatggacttcccaatgagacatgggaagtaaacttgcctgctgaggaggttcctcctgaactcccagcatatatgaggttgtcacaggaacggccaagaaagagtccaaagaaaaaactcctaaaagcagcaacaagactaacaaatctggctcaaagccttcacgccaggtagaacccaactcaagggtcccaaagatgccacctccaaaggacgaggagagtgaaggggaggaaggtgaaccacaggaagaccatgagagtgcgctgtgcggcgcatgtggcctaggttatgacgacttctggatctgttgcgacttatgcgagacatggttccacggcaagtgtgtcaagatcaccccaaataaagcggagcacatcaagcagtataagtgcccctcgtgcacaggaagcaagagggccaaggcttgattctatctatctacgatatagatatgaattgcggacaatgctccaagaaccgaggagcctttgacgggagttgtaagatgaatcttccgggtagggcagctaatagatttgaatacttcgtgtggatactttcggcattggtgctcgagatgcctctaaatatagtgtcagtactgatcaactgttaactgttggagtttggggggccctcaggcatctat

SEQ ID NO: 3381 - DNA, 2630 bp, Zea mays
  Clone ID: TF_ZmC183_1
aatagattatacaacactttgtatgtgttttatatatgtgtgtagatttatcatcatccatttgaatatagatataaaaagtaagagctaaaatgaatactatcttggaacggagggagtatttcataactccctcacaaactgctactttttttcatatgaaatgactgggaaatatgccccattgtcacatttgggtgggagattactagttgcacatctttttcattgaacaattgcacattccatctgctaatgttgttgagcagtggacatacaactacaaaatccttgttcaagttgatgccagatggtggcagctgtcagctattttgggtatagtgtcgcttttgaggtcttacattttttttctgttgatgggacttaatatgaacatttcatttgtctagttacttttgtgttatctctatactagtgttgtgctatattcttcagtttctggatgctactgggcctatcttgttattttttaagtaaagtatgtgtcaactggagcattgaatgcatgattgaaggtcggatgtcttgtaagcaaaccagtttgcatattcatgattaggaatagcagcattggctgccacgttgttgtcgattaaatcaaatggacgcaatagtggtttaaataatgttggttattttctcatgtttcacccttgttctataaaaagtttaggaccaggtagtgtaagcctttaagaatgaccttaaaatgctatactgttgtgttttgatgtgtttgacagtagctttttgtattccattgttactttagcactgtcttaccttttggatcatgttttataaatgtttgatactttaatgtgaaatccttttttctcatgtcccctgaattccatattatagattattagattttgatcaaagccacgtgggactaaattttctttgtataactaaagcagtctgatggagtcaccttctggtggtctcattggaaggcccgcgactgcggctgcgcctgcgcccgaccaaacgtaggagacccatctcctctcttttctttccaagaaaagtcttctcttctctgtctcagcgccgacgcttcccaactccttccaatcgattcttcgtctcgtcctcgtgtaatccccagcttgccctcctcgctcttccctcccaaaaccctacgcctccctgaccaagctccggggacgaatggacggaggagccggcttccctggcacgccggtcccgcgctcgccggaggacgttttccgggactaccgcgcgcgccaggccggcctaatcagggcgctcaccaccgatgttgagaagttctacgtgatgtgcgacccagagaaggataatttatgtttatatggacttcccaatgagacatgggaagtaaacttgcctgctgaggaggttcctcctgaactcccagagccagctctcggaattaattttgctcgtgatgggatgaatgaaaaagattggctatcacttgttgcagtgcatagtgattcttggctaatgtctgttgcattttattttggagcaaggtttggattcgacaaggaatccaggaaacgtctcttcaccatgatcaataatcttcccagcatatatgaggttgtcacaggaacagccaagaaagagtccaaagaaaaaactcctaaaagcagcaacaagactaacaaatctggctcaaagccttcacgccaggtagaacccaactccagggtcccaaagatgccacctccaaaggacgaggagagtgaaggggaggaaggtgaaccacaggaagaccatgagagtgcgctgtgcggcgcatgtggcctaggttatgacgacttctggatctgttgcgacttatgcgagacatggttccacggcaagtgtgtcaagatcaccccaaataaagcggagcacatcaagcagtataagtgcccctcgtgcacaggaagcaagagggccaaggcttgattctatctatctacgatatagatatgaattgcggacaatgctccaagaaccgaggagcctttgacgagagttgtaagatgaatcttccgggtagggcagctaatagatttgaatacttcgtgtggatactgtcggcattggtgcttgagatgcctcaaaatatagtgtcagtactgatcaactgttaactgttgtagtttgtggggccctcaggcatctatgttctgtagtctactgtgtggtggtttagataccgtctatgccatttgtgatgaagcagtcgttttaaagttagatcccagtaatttccctactatacatttgtcttcgtgtaatcgtgtttaggcggattccggccgtggcgcccaggtcccgggtgcctttgccggcggtggtgtcgggtatcttccgggtggcgcagcggttcggcttgtttgcgtcctctggataccttcgaaaaaaaagctcgagatgcctctaaatatagtgtcagtactgatcaactgttaactgttgtagtttgtggggccctcaggcatctatgttctatagtctactgtgtggtggtttagataccgtctatgccatttgtgatgaagcagtcgttttaaaaaaaaaaaaaaaaaaaaaaaaaaaaaaaaaaaaaaaaaaaacacccaacc

SEQ ID NO: 3382 - DNA, 1257 bp, Zea mays
  unsure (1)..(1257): unsure at all n locations
  Clone ID: TF_ZmC183_3
cgggtactagtgttgtgctatattcttcagtttctggatgctactgggcctatcttgttattttttaagtaaagtatgtgtcaactggagcattgaatgcatgattgaaggtcggatgtcttgtaagcaaaccagtttgcatattcatgattaggaatagcagcattggctgccacgttgttgtggattaaatcaaatggacgcaatagtggtttaaataatgttggttattttctcatgtttcacccttgttctataaaaagtttaggaccaattagtgtaaggctttaagaatgaccttaaaatgctatactgttgtgttttgatgtgtttaacagtagctttttgtattccattgttactttagcactgtcttaccttttggatcatgttttacatatgtttgatactttaatgtgaaatccttttttctcatgtcccctgaattccatattatagattattagattttgatcaaagccacgtgggactaaattttctttgtataactaaagcagtctgatggagtcaccttcgggtggttgcgttgcaggaaacgtctcttcaccatgatcaataatcttcccagcatatatgaggttgtcacaggaacagccaagaaagagtccaaagaaaaaactcctaaaagcagcaacaagactaacaaatctggctcaaagccttcacgccaggtagaacccaactcaagggtcccaaagatgccacctccaaaggacgaggagaatgaaggggaggaaggtgaaccacaggaagaccatgagagtgcgctgtgcggcgcatgtggcctaggttatgacgacttctggatctgttgcgacttatgcgagacatggttccacggcaagtgtgtcaagatcaccccaaataaagcggagcacatcaagcagtataagtgcccctcgtgcacaggaagcaagagggccaaggcttgatnnnnnnnnnnnnnnnnnnnnnnnngaattgcggacaatgctccaagaaccgaggagcctttgacgggagttgtaagatgaatcttccgggtagggcagctaatagatttgaatacttcgtgtggatactttcggcattggtgctcgagatgcctctaaatatagtgtcagtactgatcaactgttaactgttgtagtttgtggggccctcaggcatctatgttctatagtctactgtgtggtggtttagataccgtctatgccatttgtgatgaagcagtcgttttaaagttagatccacagt

SEQ ID NO: 3383 - DNA, 1218 bp, Zea mays
  Clone ID: TF_ZmC183_4
aattcggcacgaggtctcttttctttccagaaaagtcttctcttctctgtctcagcgccgacgcttcccaactccttccaatcgattcttcgtctcgtcctcgtgtaatccccagcttgccctcctcgctcttccctcccaaaaccctacgcctccctgaccaagctccggggacgaatggacggaggagccggcttccctggcacgccggtcccgcgctcgccggaggacgttttccgggactaccgcgcgcgccaggccggcctaatcagggcgctcaccaccgagaaggataatttatgtttatatggacttcccaatgagacatgggaagtaaacttgcctgctgaggaggttcctcctgaactcccagagccagctctcggaattaattttgctcgtgatgggatgaatgaaaaagattggctatcacttgttgcagtgcatagtgattcttggctaatgtctgttgcattttattttggagcaaggtttggattcgacaaggaatccaggaaacgtctcttcaccatgatcaataatcttcccagcatatatgaggttgtcacaggaacagccaagaaagagtccaaagaaaaaactcctaaaagcagcaacaagactaacaaatctggctcaaagccttcacgccaggtagaacccaactcaagggtcccaaagatgccacctccaaaggacgaggagagtgaaggggaggaaggtgaaccacaggaagaccatgagagtgcgctgtgcggcgcatgtggcctaggttatgacgacttctggatctgttgcgacttatgcgagacatggttccacggcaagtgtgtcaagatcaccccaaataaagcggagcacatcaagcagtataagtgcccctcgtgcacaggaagcaagagggccaaggcttgatcctatctatctacgatatagatatgaattgctgctccacgatccaaggagcctttgacgagagctgtaagctgactcttcgtgctagggcagctaatagattcgaatgcttgttttgatacaaattacgagtactgacgaaccgtaaactgatgtagtttgtgtggccctcaaagcatctatgtcctgatttgtgtggtttaggtttccttcggcacagtttctaatctaatatgagttttgtcaattagagagaagtggctatgctgaatttatgagctgattttataaagtgatgatttt

SEQ ID NO: 3384 - DNA, 1063 bp, Zea mays
  unsure (1)..(1063): unsure at all n locations
  Clone ID: TF_ZmC13516_1
cttccttggataccgtgctcctnttgcactcccccaaaacgcagctccctcagccaatcttccccagagcgcggctaggcacaggcatctgaagtatggacccctctgaacttccggagctgtcccgtactgctatgttgatctgctgcaaggtgtgtggaggacctgaagaggtggacaagaggttcctgatctgtgaccactatctttgcctgtacaagtactaccacattagttgcctgactaccgagcagattgcaagtgatgtgcagatgggcagccagcgctggtactgtccatcttgcctctgccgtgtctgcctgtgcgacacggacgatgaccagatcatcctgtgtgactgctgcgatcagggctatcatctctactgcctcagtcctccaagaagaaaggtgcccaaggggcattgggactgcgaaccctgcaaggagcggagggagaaggagaagaggatactgatgctccacaggaaggattacgatgaagacatcctgaagagtggcgagttccatggaccgaacttgctgcttaaggccgcgaaaaaggtgaagcgcgatgaggaggtgaaggtggctaagactaagagcaccagaaagtaagaggcatggagattgtgagcgagcggattttgtgttctctgccatgatcagctagcgccaagtttctgccctgggaggctcagctctgcccagctgaatgggacgggcggctgagggccgtagaaacctgtgctttctgaactgaatggttagagaacatgaattcgctagaattgctccagtctatttctttacaatcgtttctttcaacccggcagggtcatacttgacaaacttgccagcgcctgaacttgagaaggttgtgatcacccgtgatgcttttaaaccccgtgatgcttttaatggtttatgaaactggatcttggtagacttaattacccgtgatgcttttaatggtttatggaactgaatcttggtagaattaaagtatctgttgctgtgttgagaaatgttatggtttctagttcgttcttgcaggtgcaaaa

SEQ ID NO: 3385 - DNA, 1090 bp, Zea mays
  Clone ID: TF_ZmC2619_1
gccggccggtcacgggaagagccagaaacccccccgctgcgcaaccggaggcgtctcccagccccgcgccgccgctgacggtcgtggccggccccgtctcctcagcgccccggaccgtcgaggacatctacaaggactacgccgcccgccgcgccggcctcgtccgcgctctcacatctgatgtcgacgggttctacagcatgtgcgacccagagaaggagaacctgtgcctgtacggtctcccgaacggcggctgggaggtatcgctgccggtggaggaggtgccgccggagatgcccgaaccagcgctcgggatcaacttcgccagggacggcatgaggcgtcgcgactggctctcgctcgtcgccgtacactctgacgcttggctcgtctccgtcgcattcttcttcgccgccaaactcaacggcaacgacaggaagcgattattcaacatgattaatgatcatccatctgtgtatgaaataatggctgaccggaagggaagggagaataatcctggtgttgataacagcagcaaatccaggcactcaacgaagcgatcaaatgatggaaagataaagaactcaagagtggcagttggtgaatgtaggtatgagaatgatgaagaccacagcgaaaccctttgtggttcttgcagtggtctctacaactcaagtgagttctggattggatgcgacatttgtgagcggtggttccacggcaaatgtgtgaggataaccccagcaaaagcagaacagataaagcactacaagtgccctgattgcagctacaaaaagagcaggcaataaaatcttggagctgctggcctcctattactgactcagctgatcaaccaaacaatacttttcaatttggccgtagatgttaactaccctaggcatttctttgttgtggtacatgctggaaaaagacatacaggatagttgatcttacagtctggtcaattgcttttgtgcttgttttaatgacatctgtttacgggttatgtcttcaaggtggatggtaaaaaaaaaaaaaaaaaaaaataaaaacgtgatgagttatggccattatcgaaatttgagattaa

SEQ ID NO: 3386 - DNA, 562 bp, Zea mays
  unsure (1)..(562): unsure at all n locations
  Clone ID: TF_LIB3957-003-Q1-K6-G5
cggncgcgtgggcggncgcgtgggttttttttttttttttttttttttttaacaaactaacatgagtgatacataatgcacaacttagatctaaaacagtttgagttcagcacaggcgccctggggagaagatgaagaatacaggctactacaattagttgctagttactaacaatagatctagaacgtctttgacatactacagcaaacagcacatcaagaccctacagctggtcctacactgaaagcaacaaccatcgggcattcggtccccatgtgggtgttttacatcaagtcaggcatgagagatggatatatccagcatcatcatgctcgggctctcttgccactaccgctgcagttcggacacttgtagtgcttgatgtgttcggccttggcaggagtgatcttgacacacttgccatggaaccaagtctcgcacgcatcgcagcatatccagaactcatcctgtccgtagttgtcaccacaagaaccacacagcgtgttttcgtgatcttcctcttcctcctcttcctcgcctccgctgtcatcctcatccttc

SEQ ID NO: 3387 - DNA, 2664 bp, Zea mays
  Clone ID: TF_ZmC26156_1
aaacgaacaaccaaagtagagattcaaaggttgagacagaagaaggaaaagaagaatactacaaattcaacaagattgcatttaggcaatgaaagaaaaaagagaggtggctgtgctctactcgttcgtggatcgaacaaggagtctggcagcaccactgatggttttgttccatatgaatggaaacgtacgatcttctcctggctgattgatctgaatgttctatcagtcaatactaagctgaactgtttggatgaaagccactcaaaggttttactagagggttttgtcactagggatgggattaactgcagctgctgtagcgaggtcatttcagtgccagaatttgtgactcatgctggttctgaagtaaataagccatacagaaacatacttggggatgggctagacattgaccttttgcactgtctcattaatgcatggaatatgcagtctgatgctgaaaggcaagatttctttccagttagcattgagggcgatgaccccaatgatgacacgtgtggtatttgcggcgatggaggcaatttgatctgctgtgatggatgcccctcgacatttcacatgagttgtctaggactggaggcacttccctctgattattggtgttgtgcaaactgctcatgtaaattttgccacgaacattctagtgatggtgctgaagacactgctgatgttgattattcattgcatacttgttcccagtgcgaagagcagtatcatgaagcctgctctcctgagactgattccataactaacctttccagtcagacaggcaatttattctgccaacaaagctgcagactgctgttcgaggaattgcagaatcttcttgcagtcaagaaggatcttgaaccagaatattcatgcagagttgttcaacgcatccatgaagatgtaccagaagaagtccttgctttggacaaaagagttgagtgtaactccaggattgctgttgcactttcattaatggatgagtgcttccttccgattattgaccagagaactggcatcaacttgatacgaaatgttgtgtatagctgtggatcaaattttgcccggttggatttccgtggattctatatatttattttagaacgtggagatgaaataatagctgcagcatctgtccgaatacatggaaccaagttagctgagatgccgttcattggtacccggaatatgtataggcgacaagggatgtgccgccgacttgtagatggaatcgaaatgatcctcagctctctcaatgttgagaagttgatcattcctgctatcacagaacttgtggacacctggacatcgaaatttggatttagtccacttgaagattctgagaagcaagaagtgaaatctatcagcatgttagtttttcctggtacaggtctcctccaaaagccattgctaaaggccttgcctaatgaagaacaatgttcccaaggagacaaaactgagaaatcatctgatgtagtcaatgaagattctccttgctctgatgcaagtgctgatcccctaggtttgggggtcaaagagcatgaggacagcagcaaagacgctgatggcacttgtaacggtgacgtttcacaggaatgtccccattcttgatgggaagatttggttgcagttttctaggccccaagctttacatggactaagcctccatttgtttttgcacctcgagtttttgatccagcagttagcatgacatccatccgttggtgagaaagaggcttgccgggtttttttttggcatattatattagttgatggggcaccccttttagttttactcagaaattgatgattgacgcgtcggcctgggaaaagaatcaacccgtgcagttctgaaaagcgtttactccatccagccagctaacttaatgtgcagctgaaaaatcggcatgtagaagaatgtggaggataacgtcccttcttttgttttttttggtcgttaacttgagactccgagggcgagtcgtcgtaaatgttacaccagttgttattttgttaataggtttttttaaatgttttcgctagcgcattcctggaatctaatctcattcctgtaagataattctcacctctgtaagatcagctaatgtatgcgcaaagctagaaatagtccgcctgatccgtcacgcggaattggttacctaaaccctgttaatgtttcgttttgcatcgtgttggaatgtgtgtgttcttcctgtgaaacaataacatgtgttcgttcctgtggaaaggattcgctttgctggaatgtgtttgtttgttcttcctgtgaaggaaagcttttgcaggtcaaatcatcagttcatccccattaaaatgtgcatgcaatacaatgcccctggagaagcaaaatttacaggcaggcaggggtttgcgatgctggtgctgctaaggttatcgaggatcttgttcttgacatcctgtggaaacgggggggacggccctgccagcctgccttggaacaaaactccgccagcgatttgatccccttttccagcgcgacgtgactcctgcagtgcagtgaaaagggtcggcacggggttcctgtaactgtgtcgactatattttgtcaattcgctacccaaaacatttggaacctgcttggaacagctttttatgaaaagcttttctgag

SEQ ID NO: 3388 - DNA, 1382 bp, Zea mays
  Clone ID: TF_ZmC3619_1
ggctgcattggtaccctcgaggccggccgggaaaaattcgccacggtccccgtctctcccctagtcccctccgacctcttctaaaaatcctggtggctggctctcgttgtcctcaagcagtcaagctcctcctcctcctcccccccagtccctcccaggctcccaccccgccttgctcgcagcctccccaaaaccctagccctagccctagccctagccctagctctcccacacccgcactgggagatggacggcggcggcacgcaccgcacgccggaagacgtgttccgggatttccgcgcgcggcgggctggtatgatcaaagcgctcaccaccgacgtggagaagttctaccagcagtgtgacccagagaaagagaatctgtgtttgtatggtcttcccaatgaaacatgggaagtgaacttgcctgcagaggaggttcctcctgaacttccagagccagctctgggaattaattttgctcgtgacgggatggatgaaaaagattggctgtcactagtcgcggtgcacagtgatgcttggttgctggctgtggccttttacttcggtgcaagatttggttttgacaaagaatccaggaagcgcctttttgtcatgattaataacctccctacaatatatgaagttgtcacgggaactgccaagaagcaaaccaaggagaaaactcccaaaagcagcagcaagagcaataaagctggcccaaaaccgccacgccagccagaacccaactcaaggggttcgaagatgccacctccgaaggatgaggatgacagcggaggcgaggaagaggaggaagaggaagatcacgaaaacacgctgtgtggttcttgtggtgacaactacggacaggatgagttctggatatgctgtgatgcgtgcgagacttggttccatggcaagtgtgtcaagatcactcctgccaaggccgaacacatcaagcactacaagtgtccgaactgcagcggtagtggcaagagagcccgagcatgatgatgctggatatatccatctctcatgcctgacttgatgtaaaacacccacatggggaccgaatgcccgatggttgttgctttcagtgtaggaccagctgtagggtcttgatgtgctgtttgctgtagtatgtcaaagacgttctagatctattgttagtaactagcaactaattgtagtagcctgtatttcttcaatcttctcccagggcgcctgtgctgaactcaaactgttttagatctaagttgtgcattatgtatcactcatgttagtttgttaaaaaatgtgttagcattcgtatgaaacgccaaccatgtttacaaattaattaacttcaagtctattttgctcgcaaaaaaaacccccccccc

SEQ ID NO: 3389 - DNA, 2808 bp, Zea mays
  Clone ID: TF_ZmC1774_1
ggcttggtaagtttgtcatgctatcggatgtattataattcaagttttcatccgaccataaagaattgatattttgagcatatggagtctgaactaaacatgctctccatggtccgacaccccatacgataagggactgtaagcacactgtattgtcgtaattactgcttatccttcggcttaaaaaagcctgcttagtctttgaaagatgttttggactggtagatatcactcgggatgttttagttattgggatagcaattagtaattggattagtaatttgaatgtgactgcacagttgggggctccttgttgcaaagttttgtgccgttgctgagacaagacctgaggacaacattgatatttcttttttttttcctgtgaagcgagcggtactccggggagttatcaaacgcattggcatattgtgttcatgctcttcatgcaaaggccgaaaagttgtttcaccttactactttgaggtgcatgctgggagtaccaaaaagcatccatcagactacattttcctggaaaatggaaataatctgcatgatgtgttgagggcatgtacaaatgctacattagacatgttggagcctgcaatacgaaaggcaataggcccagcacctcaggagagaatatccagatgcaaatcatgcaaaagttcattcagtacactccgcagtgggaaatttgctttgttttgtgattcgtgtcttgagtccaagggagctaagaataatatcagttcatccaaagttgggcgaagtcaaacttcatctgccaaggtatataagagtgcatcaccaggagcaaagtcttcaagtgtaggaaggcttacaagaaaggataagggtatgcataaggtcgttttcatgagtggcattttaccagagggcactgatgttggttactatgttggtggaaagaggttactggatggatatataaaggaacttgggatctactgtcattgctgcagcacagtggttagtccttcacagtttgaaggtcatgctggtcgagctgctcgacgcaaaccttaccacaacatatatatgtcaaacggcgtttcactacatgagctgtcaatttcactcttgaaaggtcaaaagatgtcaaacagacaaagtgatgacttgtgcagcatttgttcagatggtgggcaactactcctttgtgatacctgtccaagagcttttcatagagaatgtgttggcttatcttctgccacaaagggaacttggtgttgccgatattgtgagaatagacaacagagggaaagttgtttggcatataacaacaatgcaatagctgctgggagagttgaaggagttgatgccttggaacaaatattcacgcggtcgatacgtattgctacaacacttgagactggatttggtggttgcgcactgtgcaagctccatgatttcagcaaaaagaaattcagtacccgaaccgtgctgctttgtgaccaatgtggtagagaatatcatgttggttgcctcaaggaacataatatggctgatctgacggcattgcccgagggagcctggtattgttctacggactgtgtgaggattaaccagacactgcaagatttacttaacagtggtggagaacctgttcttgccatggatttagatgtcattaagaagaaacgagaagtgaaaggttttaatgatgatgatgctgaccttgatgttagatggagagttttaaaggacaagagctcagacgacagcaaactagtgctctccaaagcagttgccattttccatgaaacttttgatcccattatccaggtttcaactggacgggacctcattccagccatggtttatgggaggagtgcaagggaccaagattacacaggaatgtattgtactgtgttaactgtgaacaatattgtagtttctgcgggtcttttccgcatcatgggtagtgaaattgctgagctgccgttggttgctacaagtagggatagacaaggcttggggtatttccaagcacttttttcctgcatagaacgtctgttgtcatctttggaggtgaaacattttgtgctaccagctgcagaggaagcggagtctatctggactgagcgttttgggttcgcaaagataagccaggatgagctgcgcgaatacctcaagggtgggcgaacaactgtgtttcaggggacgtcaaacctgcacaagctggttgcgaaacttgaatgctagttatgtgagaattgtatggcaagagcaaggacatgaagctaagaagcagctcattgtttgtgtgcctctgggattgatgcagacaggaaagaggcaccctgatccctttcttgtaaatgttggtgagcatgttggcattggcatcttgatctgtttccataggtaaggtgaagaggattgtgtaagataaaagggacaagctgtatgtaaagacaagccaaagctgagtgaatttcaggcaccttattgtgtggagggtcctgtgtttgttgagtaggcaacgctcgggctggtgtgagatgatgactgcatttgtgttgtgttggtggtattttcactgctgacatgactgttgtatcggatgacatcttttctgttttatgacagtggcagtgtgatactaggctgttaggaggggacgggggaggtcaaacccaacgtacatcatgagtggagctgctgtaatgtaacagaagtattgcacccccccccccccccccccccccagtatgctttaacggagatgcacgttgtacccgtggtaatatatataaatttgcgttgtaaagatcaaaaaaaaaa

SEQ ID NO: 3390 - DNA, 768 bp, Zea mays
  Clone ID: TF_LIB5116-009-A1-PF1-G2
gatatccgcgccgctgtctgctgcccccgccctgcgtccccgttccccattcgcacccctccccactgcccgcatctattccaccgccgccgccgccgccccgctccgctcggttccggctctccctccgcgctgctgtgctctgtggggcgccgggccgcgtgatccgccgctgcctccgtcgattcggctccagtttcggggcgctgcggcgaccccccgaggtgaagccgctcccggtactgcggttcagcgcctaattggcatgtgacgtcctccaacggtgaaggagaggagctctttatgtgatagtgcagcagatggaaattgggtttcaaaattcaaaagaaagcgaagcaagttaacagctagctcgtcaaatgagcatgaggctacatcaccaacatcggactctataatgaacaatggttccataaaaaagaggtccaagcatgacactagcatttctacatcagccaagaagataagaggacacgatgggtatttctatgagtgtgtagaatgtgaccttggtggcaatttgttgtgttgcgatagctgtccacggacataccacttggaatgtcttaaccccccccttaagcgtgcaccgcctgggaactggcaatggccaagatgtcgtacgaaacaagttagcttgaagttgttaggaaatgcggatgctgacacttccaaacgtgaaagaaccaagagaatgcgtacaagcaccatagcagatagcccatctccccataacaagtctctctg

SEQ ID NO: 3391 - DNA, 1111 bp, Zea mays
  Clone ID: TF_ZmC2557_16
ggggtaccctccgggccggccgggcgtcggcgcgtcgcatggatatggcccccgcgtctgtctacttcaatccgcgctcggtcgaggaaatcttcaaggacttctccggccgccgcgcggggctcgtccgcgccctcacctccgatgtggacgatttctgcagcttgtgcgacccaggtgagtgagatcgatccgcggcgagctcttcgctgcggtgcgtgcgtgcgtagagtggtggatccgggcggggaatgagcggatcgccgtttccttttcctgcgtgcagataaggataatttgtgtctctacggccttcccaacgggagctgggaggtgtcgccgccggcggaggaggttcctccggagttgcccgagccggcgctcggcatcaactttgcgcgcgacggcatgcagcgccgcgactggctcacactcgtcgccgtccactctgactcgtggctcatctccgtcgcattcttctacggtgcccgcctcaacggcaacgaccggaagcgcttgttcagcatgatgagtgatcttccttccgtcttagaagcattcgcggacaggaaacaagacagggataggtctggggttgatagcagcggcaagtccagacactcatcaaagagaggaaaagatggccatgccaagagttccagggcagcagctcctgccgccaaggagtatgacgaagacgatgacgaggaagacgaggaggagcacacggagaccttttgtggaagctgcggcggcctttacaacgcgagcgagttctggatcggctgcgacatctgcgagcggtggttccacggcaagtgcgtgcggatcacccctgcgaaagcggatcacataaagcactacaagtgcccggactgcagctcgaagaagatgaggcagtaggtgtaggtccccgcgtgatctgactgacccgtgtgatctgatccaaaaccataactccctccgtttgtttgtctcaaggtcgcagctagcagatgtgaattccttcatttgtggggcttgtttatgtggtggtaggaagaggcaaaggactgatagatagagatacatgaccgttttcttttatatatattcgttgttcaccgtttac

SEQ ID NO: 3392 - DNA, 1265 bp, Zea mays
  Clone ID: TF_ZmC2557_28
gcgcgacgaagcaaggaacgcaccccgaatcccaactcctgtgtccgccatcgcctcgtggcggtcgctcctgctcctgctgctgctgctgctcccccagccgctcccgcccggagcacgccgccggcgccgacgccggcgcgtcgcatggatatggcccccgcgtctgtctacttcaatccgcgctcggtcgaggaaatcttcaaggacttctccggccgccgcgcggggctcgtccgcgccctcacctccgatgtggacgatttctgcagcttgtgcgacccagataaggagaatttgtgtctctacggccttcccaacgggagctgggaggtgtcgccgccggcggaggaggttcctccggagttgcccgagccggcgctcggcatcaactttgcgcgcgacggcatgcagcgccgcgactggctcacactcgtcgccgtccactctgactcgtggctcatctccgtcgcattcttctacggtgcccgcctcaacggcaacgaccggaagcgcttgttcagcatgatgagtgatcttccttccgtcttagaagcattcgcggacaggaaacacggcagagataggtctggggttgatagcagcggcaagtccagacactcatcaaagagaggaaaagatggccatgccaagagtttcagggcagcagctcctgccgccaaggagtatgacgaagacgatgacgaggaagacgaggaggagcacacggagaccttttgcggaagctgcggcggcctttacaacgcgagcgagttctggatcggctgcgacatctgcgagcggtggttccacggcaagtgcgtgcggatcacccctgcgaaagcggatcacataaagcactacaagtgcccggactgcagctcgaagaagatgaggcagtaggtgtaggtccccgcgtgatctgactgacccgtgtgatctgatccaaaccataactccctccgtttgtttgtctcaaggtcgcagctagcagatgtgaattccttcatttgtggggcttgtttatgtggtggtaggaagaggcaaaggactgatagatagagatacatgaccgttttcttttatatatattcgttgttcaccgttttgcctggttcgtcgcagtcctatcgctgtgtgaaggcatgaactgatgagtgggttgttctcaatagttgataaagaatttcatcggtttcatgtcatcaaaaaagcatgtccgactccttataaaatccaaacgaaactataatgaatctctcccc

SEQ ID NO: 3393 - DNA, 2216 bp, Zea mays
  Clone ID: TF_ZmC113_1
gcagtcgaaacaatactgtggcatatgcaagaaaatttggcaccacacagatggtggaaactgggtttgttgtgatgagtgccagatttgggttcacgttgaatgtgatctaacatgcaacaacgtcgaggatttggaaaatgcagattatttctgtccggattgcaaatcaaaaagtaaaacagttccagcaactgaaaatttgaatacttccacttcagaatgtgctagcacttctaagggaaaactgaccgcaatgatagctgtttgctgcaatggcgaggatgcactgtatgtacctgagaagcacatgatactatgtcaatgtaagtcttgcaaggaaaggatgatgagtctgaatgagtgggagaagcatactggctcaaggaaaaagaattggaagatgagtattagacaaaagagtacaggggaactactcattaatttgctggatgatattccttgtgggacatcgaagtattctaacccaggcattaagaaagaagagctgctacaattgcaagctaatccttacagtcctgtctgtgctaaatggacaactgaacgatgtgctgtttgtcgatgggttgaggattgggactacaataaaattataatttgcaacagatgccaaatagctgttcatcaagagtgctatggagcatgtgctgtacaagatcttacaacatggctttgtcgagcatgtgaatccccccaacagaaaagagaatgttgtctatgccctgtcaaagggggcgctctcaagccaacagacattgatggactgtgggttcatgttacatgtgcctggtttcagcctaaagtatcatttccggttgatgagacgatggagccagctatgggaataatgagcatccctgtagaatactttaagaagacttgcgtcatatgcaagcaaatgcatggtgcctgcacacaatgctacaaatgctctacctattaccacgcaatatgtgcgtcaagagctggatattgcatggagttgcaatgctctgaaagaagtggcaggcacattacaaaaatggtttcatactgtgattttcatagtactcctgacccagacaatgtgttgatagtgaagacaccggaaggtgttttctctaccaaattttttctccaaaatggtgagaaacagacagctgcaagactcgtcaggaaggaaaatcaccaggagaaagtgcttcctcctataatttctgactgtctagtcgcaaagtgcctgacctatgaaatgtcgaaatacaagaaacaaccaggagaggctattgcccaccggattatgggacctcgtcaccactctcaggattttattgatggtcttaatgcatgcatggatcgtaaggatgaccaatctttttcaacatttaaagagcgacttcggtatttacagaaaactgaaaatttgagggtctcgtgtggtcgatctggaattcatggatgggggctcttcgccgcaaggaatattcaggagggtcaaatggttattgagtaccgtggcgaacaagttagacggtgtgttgctgacttgagggaagcacagtaccatagagaaaaaaaggattgctatttgttcaagataagcgaagatgttgtcatcgatgctaccgacaaaggaaacatagcgcgcctaattaatcactcgtgtatgtcgaactgctatgctaggatcatgaccgtcagcgatgacaggagcgagatcattctgattgccaagagagacgtctctgccggagaagagctgacgtacgactacttgtttgaccctgacgagtccgaagactgcagggttccatgcctgtgcaaggctcctaactgccgtgggtacatgaactagaagactaaccaacctcagaaatagggactaaagactaacgtgacctcagaaacagggaccaaaggctggccatttttcccggaattctaccgttagcttctcggtttatatttactggaaagtttattagttctcgtggctgcccaagttttgaaccattttgtttagatattgcgattgagggcagccacaccattgtatattctttcattgttgtaataagacaccagtataatcaagaatgctgactttgaaatggaaagaagaagaaactcaacttgatgccgtccaaaaaaaaaaaaaaaaaaaaaaaaaaaaaaaaaaaaaaaaaaaaaaaaaaaaaaaaaactcgagggagggc

SEQ ID NO: 3394 - DNA, 2255 bp, Zea mays
  unsure (1)..(2255): unsure at all n locations
  Clone ID: TF_ZmC1899_1
atgatacatacccttaagaagcattataaaggatgggatggttacctgggaaggtattgtttgcaattgctgcaaaaaaaacttatccgtatctgatttcatggctcatgctggtcgtagtcacccacagtcctcattgggcctctttctagagtctggcaagtcatacactttgtgcctggttgaggcttggtctgctgaatctatgagcaggagaagcaatgcatggggtagaaaagttgaggcaatagatgaaagtgatgacacctgtggtttctgtggagatggtggtgaattactttgctgtgacaattgcccatcgacatatcatcaagcttgcttgtctgctaaggagcttccagaaggtagttggtactgccataattgcacttgtcaggtttgtggggggccatttagtgaaaaggaggtttcaacattctcggcgattttcaaatgtttccaatgcggagatgcataccatgacacttgcattgaacaagagaagctacctcttgaggatcaaatatctcagacatggttttgtgggaaatactgtaaagagatattcatagggctgcgtagtcatgtcgggacagataatattcttgacagtgacctttcatggtccatactgagatgcaacaatgacgggcagaagctacattctgttcagaagattgcctgtttggcagaatgtaatatgaaattagcagtggctcttactctattggaggaatgtttcattcgtatggtggatcctagaactggtgtggacatgataccccatgttttatacaacaagggatcaaactttgctcgtgtggattatcagggattctatactgtaatcctggagaaaggtgatgaaatattatgtgtggcttctatcagagtacatggaactaaagccggggagcttccttttattgctacttctgtagactttcgacggcaaggaatgtgccgaattctaatgagcatcattgaaaagatgctctgttcatttaatgttaagatgttggtcctttctgccatcccagagttggttagcacatgggtgtcaggatttggcttcaaacctatcgaagatgctgaaaggaaacaacttcataatgtaaacttgatgttgtttcctggaacatccttactaacaaagagattggatggatttattatggccacaaaaccaggcgaggaaaaggatatacatgaagtttctggagtgcctaatcttaagcgtatgcctaatgggaaagcaaatgagcatttcaaactccatgaccttgatttgtccgggacagagtttaaagctgaggtttccgtgaatggtccattcagaacactgaaacatgaatgtggttcagcagcatggtttcagtctactaagttagctgttggggaagtgtgatattcttacacaaattatctgggctcatgctctgcatcgatactagctgctttgtgttggccaatttcgtcttcccacttcatggctcaaattaatttgcagcagcaaaatcattcgaacacttgctgctgcatgaactcatccttttcaagtaaagttctcacaagactactgggaaatggttgggatgacgcaggcatccatgaatttgggttgagcaaagttgaagaaaccacagattggtgtggtctgttctgcatcgagaaaatggaaattataactgtctctcctgggtgaagtgctctcctgagactgggtaaagtacgcaacacctgagttgatattgcttgcacgttgaacaaagaggatgtatttgcactccaacgtacaaagtgtaacgcattcggccccttttcaaagtaagccatgataggaattaatctaagctgtttggtatatacatcaaaagggtactgcagtaacatgtttggtaccttctcttgcgagttttattttgatatatgtgttttatatgtgtctagattaatcatcatctatttaaatatagacataaaaagaattatattctggaacggagtgagtattattttgccatatgtgctgttaggttgaggcccaaatggcaatgcaatgcatctgtcggcagttgattttcctgagtgccagattggttttgtaatccttgcggctatggaacgattgttcgtcaagtccttaagttattttggtttgtattaaaaaaaagagcaaaaaaaaaatggtgggaggcgtcccctcttcctccaaaaaaacaacaaggggggggtttttnaaaaaaaatngaagg

SEQ ID NO: 3395 - DNA, 1502 bp, Zea mays
  unsure (1)..(1502): unsure at all n locations
  Clone ID: TF_ZmC2849_3
tgatttgtttgtttggttgtaggctggagtgggcacccggtctgcgtgaagcggtaccatttcatcatcgagaacgacagtagccacctttctggccgccggcgcacntgctgcctccgctgcggaacacccatggccgaattgattgcaagcagttcatcaaacattatgatgagcatgctctgcggactccttcaaacccattcctgctctgtgtgaggtgctccattgaactgcttgatcacccaaaagattacacgacacctccagaagaacttgtacttctaccagcaagtgctaccctaggtgacctgaaagtacaggcttcaaaggctttccaagaaacgtacctgatgttccaaagcttccagactgaacagctccctgactttccaaacttcagtgatacaacccccgtgaagcatgtgcttggatcaggccagttgcttcgagtaaggggacgttgcactggggattacaggagaattgtacagttcaggatggagaggggtttggagaactggacggtggactgctcatgtggggccaaggatgatgatggggaacggatgctagcttgtgacatatgtggagtctggcagcataccaggtgctcgggaataagtgattttgaggaagtccctgaaaatttcatctgcagaaagtgtgctagtccacgcaagggagacggacgtgggggtggaggtagcaacggtggtggaacaatggaggttactgcgtctgggaggtgcaaggatgaaattggagcatcagttggtggagcaggcaagtatgggcgcatggcaacagttggatgactgtacataatgtagtgaaacgtaaatagtgagatggagagtagtaaggtgcacctaaaggcttttgtggaccttgagtggtgttaaatggatcttgtcgctgaccactgatgtgatgttaatctgttctccttgcagttgcacccatttcccattgcctgatgtccatcttctgttcgaagcatatcagacttttcatggctgcctaataaacaccataacaaaatcctagcaaatggtgccagaacagaggagctagcttctaacatatccaaagcgtatcgaggacatactcctcacatttccagcacctaggcagcgattagggctgcggccaccggacgggcgcctggacccagccaccgaccttgcggcagccgcgagctcgagctagcgccagcctcgcgccctaacccgcacggcaccgctaggcggcggccccgatcagcgcgattgcttcctggggtgcaatgaggcgtggagagcattgggatggcgtcgcgcgtggagctgctcgaggaaggaagggagagagggaaagaaagggagagagagagggcaggctgaggccggtgcgggaagaatcatcaataacgggagaanaaaaaaaaaaaaaaaaataataaaaataaaataaaaaaaaaaaaatacaaaaaaaaaaaaaaaaaataaaaaaaaaaatat

SEQ ID NO: 3396 - DNA, 414 bp, Zea mays
  Clone ID: TF_ZM4317.C4.o3.fg
atgaagttaaatatcaaaatagagaggagacggctccacatgatgatcaataatcatcccactgtatctgaagttgtgatagggagtggggagaagcaaccaaaagcctgcaacacaaattacgaaaccaagtcaagttctattaaggaacccagttctagcagcaagctagcagaggagcctttgccaaagaaggagcgacagatcatcaaagaagatggaggcggcgaggatgaagcttacccatgcggcacatgtggagggatgtactcggaaaatggagtattctggattggctgtgacatttgcgacaagtggtaccatggtgactgtgttcgcatcacacctgcggaggcaacgcacatcgatcagtacagttgccccgcttgcagcaacaagaggagcagagagtga

SEQ ID NO: 3397 - DNA, 1312 bp, Zea mays
  unsure (1)..(1312): unsure at all n locations
  Clone ID: TF_ZmC1419_1
agtggaccggatctccgaggcggggctccaccacctgccgcgccggccggcgagcctcttcctcttcctccggtcgctccccttcccatctccatcttgatttcgattctctggtggctgggaaagcctgcgagagcgcgataaccggaaagatctgagctgctgcaaccgatctccggcgccatggggttcctcgaggacttccaagccagtgttgaagcattgccatctatgctgcatcggaactattcattaatgcgagagttggataaaagtttgcatggtgtgcaactagaaaatgagcagcgctgtcaacaagaaatagaggacattaagcatggacttgaatctggaagtattacatatgacccagcaaaattgaaattttccgaagaagcaatggaggagcagaaacattgtgttagaattgctgacgagaaggtggctttagccactcagacttatgacttagttgatgctcacatccaacagctagatcagtttatgaggaagcttgaagaaatccggcaagaaaaagaggcagctgctgctgttactgcagggactgctgttgctactactgccactccaaccgtgaatgctggagcgacaactgctgatgctaatccgaagagtggacgatctggcgaaagaggcagagggggtcggaagaaggccaaggtacccacggagcagtcagtgccagtgccagtgccactgccacctattgacttagaattgcctgtggatcctaacgaaccgacatactgcctctgcaaccaagtcagctatggtgagatggtggcatgcgacaatcctaattgcaaaatcgagtggtatcactatggctgtgtgggcgtcaaggagcaacccaagggaaagtggtattgcccaaactgcatcgggttccagaagaagcgaaaaggcaagtgatatgcagtccacaggctgctgtgctagtgtgtccttgcttgttaattgtgttgctgatgttgggtaacaaatgtagtagtagttgctgcctgtgacagtgcataccgttgtagatccagtgttctgtacatgttactcctccttcggtgctcgtagtttagggccatcgaccatttgttaacttcatggcctttttggcgattcatgccccttgtatgggtttcacaatatcatgtctccttttcctggtatcacaatattatgcaatacagccggtttgtaatttaaaaaaaaaaaaaaaaaaaaaaaaaaaaannnnnnnnnnnnnnnnnnnnnnnnnnnnnnnnnnnnnnnnnnnnnnnnnnnnnnnnnnnnnnnn

SEQ ID NO: 3398 - DNA, 1177 bp, Zea mays
  Clone ID: TF_ZmC17187_4
ttgggtacctcgaggccggccggggttagattccattaacgtttcagcggtaaaagaacacgaacaaagcattaacaccggcgccaccgccagcacacaccagctcgccggagatcacaagaagatacaggaccgtgctcctcgacgccgcccgacatggcggacgccgcctctggccgcggccacgtcgtctaccctccccgctccgccgaggacatcttcaaggactaccgcgcccgccggtccgccatcctccgcgccctcactcacgaggtcgaggacttctacgcgcagtgcgatccagacaaggagaacctgtgcctgtacggctacgcgaacgaggcgtgggaggtggcgctgccggcagaggaggtgcccacggagctgccggagcctgcgctgggaatcaacttcgcgcgcgacggaatgaaccgccgcgactggcttgcgctcgtcgccgtccactccgactcgtggctcctctccgtcgccttttactatgccgctcggcttaatcgtaatgaccggaagcgcttatttggtatgattaatgaattgcaaactgtttttgaagttgtctccggtgcgagacaacaacaatctaaagagaggtccagtatggacaatggtggtagagccaagcctgtaaagatagaaaataatggaaaagtcacagacgaagcatacgaagatgacagtgatcacggtgaaaccctatgtggaacctgtggtgggatatacaacgcggatgagttttggatcgggtgtgacatgtgcgagcgatggtaccatggcaagtgtgtcaagataactcctgccaaggcagagagcataaagcattacaaatgcccgagctgcagctccaagagggcgaggcagtagcaaaacccatgaacgcaggaagcctccgaatgtgggatgtatggtgcagaagaggcgcattgcaaagtttgcaggcaggagaaggcccagagacctccatttacaagattagaactatattgctatcttccctgtgccttatgcttacttttttacatatgataagctgatgtgaggaaagataagacatttggcaaccagaggcacttagttaaatgccccttgatatacatgggggtaaaagaagaggaactcatgttttgtcgaatatatggaatctttttttcccctctta

SEQ ID NO: 3399 - DNA, 622 bp, Zea mays
  Clone ID: TF_ZmC3042_5
ttcccgggtgcatttttagcttgcttgtgatgaattgggcacgaggtttctctcaaggtattgcaaatgtgagatgccgtacaaccccgatgacctcatggtgcagtgcgatgcttgcaagcactggttccatccatcttgtgtggctatgaccattgaacaggccaaaaagctagatcactttgtttgctcagactgtttcaaagaaaatggttcaaagagactttcaaatgcatatgccacttcaccaaattttgagcctaaggctgaaccaaaaaggcagaggaggtaacaaactgtgagtggtaacatccatatgggtaaggggagatgtgctgcttctgtggtgaatcagcccttgccctttgctgtggtgagagcagaggtgtacagtgtactagaccagtgtttgctgttaggggaacgggttttgttcgatgtgtagaccgtgtggcatggcatgcagttgttggtagaggtcaaaagaacagtcgttgtgttcacttggtcagcttagcgccttagcccttgttaatgtgttaatgcactgtgttaactcagcgagccccccttgtggctgataatgcaagtcatgcagttgttgattcaaaaaaaaaaaaaa

SEQ ID NO: 3400 - DNA, 597 bp, Zea mays
  Clone ID: TF_21211304
ggttgtcacaggaacagccaagaaagagcccaaagaaaaaactcctaaaagcaacattaagactaacaaatctggctcaaagccctcgcgccatacggaacaacccaactcaagggtcccaaagatgccacctccaaaggacgaggagagtgaagaggaggaaggggaaccacaggaagaccaggagagtgcgctgtgtggcgcatgtggcctaggttatgacgacttctggatctgctgcgacctatgcgagacatggttccacggcaagtgtgttaagatcaccccagctaaagcggaccacatcaagcagtataagtgcccctcctgcacgggaagcaagagggccaaggtttgatccacgatccaaggagcctttgacgagagctgtaagctgactcttcgtgctagggcagctaatagattcgaatgcttgttttgatacaaattacgagtactgacgaaccgtaaactgatgtagtttgtgtggccctcaaagcatctatgtcctgacttgtgtggtttaggtttcctttggcacagtttctaatctaatatgagtattgtcaattagagagaaaaaaaaaaaaaaaaaaa

SEQ ID NO: 3401 - DNA, 758 bp, Zea mays
  unsure (1)..(758): unsure at all n locations
  Clone ID: TF_LIB4740-015-R1-K1-E12
gcattttattttggagcaaggtttggattcgataaagaatccaggaaacgtctcttcaccatgatcaataaccttcccagcatatatgaggttgtcacaggaacagccaagaaagagcccaaagaaaaaactcctaaaagcaacattaagactaacaaatctggctcaaagccctcgcgccatgcggaacaacccaactcaagggtcccaaagatgccacctccaaaggacgaggagagtgaagaggaggaaggggaaccacaggaagaccaggagagtgcgctgtgtggcgcatgtggcctaggttatgacgacttctggatctgctgcgacctatgcgagacatggttccacggcaagtgtgttaagatcaccccagctaaagcggaccacatcaagcagtataagtgcccctcctgcacgggaagcaagagggccaaggtttgatccacgatccaaggagcctttgacgagagctgtaagctgactcttcgtgctagggcagctaatagattcgaatgcttgttttgatacaaattacgagtactgacgaaccgtaaactgatgtagtttgtgtggccctcaaagcatctatgtcctgatttgtgtggtttaggtttccttcggcacagtttctaatctaatatgagttttgtcaattagagagaagtggctatgctgaatttatgagctgattntaataagtgatgatataaaataaactaaaagactagagccgnaaaatgtagcttttctga

SEQ ID NO: 3402 - DNA, 1345 bp, Zea mays
  Clone ID: TF_ZmC183_2
attgggtacctcgagcgcggcttgataggggcgctcaccaccgatgtggagaagttctacgtgatgtgcgacccagagaaggagaacttatgtttatatggacttcctaatgagacatgggaaataaacttgcctgctgaagaggtccctcctgaactgccagagccagctcttggaattaattttgctcgtgatgggatggatgaaaaagattggctatcacttgttgcagtgcatagtgattcttggctaatgtctgttgcattttattttggagcaaggtttggattcgataaagaatccaggaaacgtctcttcaccatgatcaataaccttcccagcatatatgaggttgtcacaggaacagccaagaaagagcccaaagaaaaaactcctaaaagcaacattaagactaacaaatctggctcaaagccctcgcgccatacggaacccaactcaagggtcccaaagatgccacctccaaaggacgaggagagtgaagaggaggaaggggaaccacaggaagaccaggagagtgcgctgtgtggcgcgtgtggcctaggttatgacgacttctggatctgctgcgacttatgcgagacatggttccacggcaagtgtgttaagatcaccccagctaaagcggaccacatcaagcagtataagtgcccctcctgcacgggaagcaagagggccaaggtttgatccacgatccaaggagcctttgacgagagctgtaaactgactcttcgggctagggcagctaatagattcgaatgcttgtttcgatacaaattacgagtactgacgaaccgtaaactgatgtagtttgtgtggccctcaaagcatctatgtcctgacttgtgtggtttaggtttcctttggcacagtttctagagctgattgtctatgaatctaatatgagttttgtcaattagagagaagtggctatgctgaatttatgagccgattttataaagtgatgatataaaacaaaaaaaaaaaaaaaaaagcggatgctgcaaaaaccgaggagcctttgacaaaagttgtacaatgagcagtttccggatagcgcagagtacgcgggtgaatacttcgtgtggatactttcggcattggtgctcgagatgcctctaaaaatagtgtcagtactgatcaactgttaactgttgtagtttgtggggccctcaggcatctatgttctatagtctactgtgtggtggtttagataccgtctatgccatttgtgatggagcagtcgttttaaagttagatcccagtaatttcccaaaaaaaaaaaaaaaaaaaaaaaaaaaagtactctgcgttgttaccctggctt

SEQ ID NO: 3403 - DNA, 490 bp, Zea mays
  Clone ID: TF_uC-zmflteosinte083c04b1
gatttataaccttcccagcatatatgaggttgtcacaggaacagccaagaaagagcccaaagaaaaaactcctaaaagcaacattaagactaacaaatctggctcaaaggtatatagttctttgtttatcacatagctatatcgtttgacatgcctaactccatgattctgctttgatggctgacgctgaacatttgacgcatacacagccctcgcgccatgcggaacccaactcaagggtcccaaagatgccacctccaaaggacgaggagagtgaagaggaggaaggggaaccacaagaagaccaggagagtgcgctgtgtggcgcgtgtggcctaggatatgacgacttctggatctgctgcgacctatgcgagacatggttccacggcaagtgtgttaagatcaccccagctaaagcggaccacatcaagcagtacaagtgcccctcctgcacgggaagcacgagggccaaggtttgatccacgat

SEQ ID NO: 3404 - DNA, 636 bp, Zea mays
  unsure (1)..(636): unsure at all n locations
  Clone ID: TF_LIB3632-049-Q6-K6-H9
ctagttctagatcgcgagcggcctcccttttttttttttttttttttttttttttttttttgcacaacaccaacaatggagaaatggtcagccgagaggtaccttcagtgacaacgtttacagactagagggcggggcccattccaatgtcaacactcagcacatgagacatgccacgcattaaacaatgctaggtcgaacagctaatcaacagataaaacaaccataaatgaaaaatgcaggcttacagactagggaactacacgccatatcttggcgccaaggaggtcgtttcttcctttccttcctagcaaggtcgcatcggttgctcacgccctgaccctcttgttggtgcagtctgggcacttgtactgcttgatatgctcggcccgtgcaggcgtgatcttgacacacttcccgtggtaccacttctcgcagttatcgcagcagatccagaactggtccttgccgtcgttggtcccgcaggttccacacaggngtgttgtcgtgctcctccgcctcctcgtccccgtcgtcgtcaccgctctcttcttcgtctttggggaccttagccttcgatcgagactctgctcttgactgcacttttgaactaggcttgntactcttgctgctact

SEQ ID NO: 3405 - DNA, 1988 bp, Zea mays
  Clone ID: TF_ZmC1927_1
gcctagagtcaaagcaacctcaagaccctcttaccacatcatatacatgtaatggcagttctagtctgactccaagttcgaaggaggctttgctaaagaacatatcatcaggcaagaagggcggtagtgctggcaaagtaacaaacaaggataacagactacacaaattggtctttaatgttttgcttgatggcacagaagtagcttactatgttgatgggcagagaaaggttgacgggtatattaaggatcaaagaatctactgtaatcactgcaacaaagtggttagcccatcagcatttgaagctcatgcgggtgagggatcaaggcgcaaaccgtatgataacatattcacatcaaacggagtatcattgcatgagctggcaatgaaaatatcaaaggatatggaactgtcagaacgtgagactgatgatctgtgcagagaatgtggtcagggtggagatattttcccatgcaaaatctgtccaaggtcatttcatccagcttgtgttggactctctaaagtcccctcagaatggtactgtgataattgtcgcaatcttgtgcaaaaagaaaaggctttagcagagaacaaaaatgctaaagctgctgggaggcaagctggagttgattccattgaacagataatgaagagagctatacgaattgtccccatctctgatgatcttggaggctgtgctctatgcaaacagaaagatttcaacaatgctgtgtttgatgagcgcactgtgatactctgtgaccaatgtgagaaagagtatcatgtaggatgcttgaagaatcaatggcaagtggaactaaaggaattgccagagggggagtggttctgttgcagtagttgctctgagacacgatcttcattagacaagataatctccgacggagctcaactgttggtggagccagatcttgaaatcataaagaagaaacatgtgacaagaggtttatgtatggacaccagtaaagatctcaaatggcaattactttctggtaaaaggactactgaagacggaagcatattgctctctgctgcagtgccaatttttcatcaatcttttgatccgatccgtgaagctctcactggtagagacctgattccagagatggttaacgggaggggacctaaggagggaatgcctggacaagattacagtggaatgtactgtgcactgttaactgtgggctctactgtggtgtcggcagcacttttgcgtgtgatgggaggtgatgtggccgagctgccactagttgctacaagccaggatgttcaggggctgggctactttcaagccttgttctcatgcatcgagaggatgctagtttcgctgaagatcaagcactttgtgcttccagctgcacacgaagctgaagggatctggatgaagaaatttggattctctaggaccactccggaagagctggaagcttatcttaatggggcacacctgactatattccatggaacatcatacctgtacaaggctgttccaatgtcatgatatatgggatgaaaaagatatgggtgttgcaatagctagcaggattttgtcttgtcttttctggagtcgctattgtgatgtacataaagagttgatgaggaaacaaagcattggcaagacaatgaaaggttggtatacaggagctggaagccaaggggaagaaaagagctacaagaggtctggattagttttctttctttgtttactcttgaatcgagtgtagtggcgctggggttggcaagtggtggcacacctagcaaattttggtgtaatactagatgcaatgcaattgaagcagttccgtgagtcctggtccgatagccatattttgcaattgaattttgatgtgtttgacaccgacaagtggcggggctcgtatgtgagtaatcggtggtccttttcttgctgtcctggttaaagttgcgatattgctgttttgaagtaacggcccctttggaatgacttcct

SEQ ID NO: 3406 - DNA, 4348 bp, Zea mays
  Clone ID: TF_ZmC2398_1
ctgctggaaatgctgttcatgatgaaatgctgacagcgatgttccaaacgtgataatgctaaattgctcgatgtcgaaaagaacacacagcgtttcatatcacaactacaaacgtttgtgaatctgaccataagttattccaagcaaggaaaatcagtgccaagtatagacagacagccaagagatgaagggcgagtctctaatgttaaactcgctttaagcaacaactccgagcgaccaaattgcgacaagttcttcacacagaacaacctccggatgaagatcatgcatgtcgagcaaaacgattaccccttgtatatcattccagcaggttccattctcgccaatggccttggttctacttggagaacctctcactgaagattcctgcacgttgggcaaaaccatttccccttgaatctcgtttctggtgtaagacccacacacgtgtaatgaaaccattcacctcctccacaattctcattgtcacaagcaatcatgtcaccatatgaaatctggtggcatatacagtatgtcggttcatttggatcaattgtttgatccacatccatagatgtacctgctttcttgctgctacctggagggggcattaaatcaaagtccatacccctttccctgtcccattccctctctctaaatttttttgatgcttgaggtgtactaaaaccaaacctccttttctcatccctgctaaccaccggaactggaggaaggactgtaggttcatctggaggtatcttcccttcatgctttaaatcttctgcaaactggcccaagtcttcatcaaggcgttttatatggctctctatcaggtcataagcttggcgtgccagtaagactttctcggtgcaaagattcagagcattgtcctggctagcttcaatgtccttcttcatcctctccgactcatcatcatccatgtttgacctgtcatacccatgggatgatactcccagaatatactttatctgttctttggtctgacccataatgccatgtgccctgtcatcgagctcgcgcatggtggagagaatcctttgcaggtcgccggccagggtgctcgagtactcgaggtagtcgtcgacgtacacgccggtccgagcgatcgccatgcctgtctatgattgctcgcgtctccgggcagggttcgatgaatcgatgccccggtttggggaactaggggtggagagacgaaccgtaacgggacgggacggtcctcttctcgctggcgtttggttggatgtgaggagaagtgggatgggctcgtcccacaggcgaatattcaccgtagatgcgggacggggtcgtcccgcttgcagggcgtgaagcgccgtttcccgagaagacgggctcaaggacagcgtggtggtctccggcgaaggagcgggcgcgaagggacaagggggcgtggacaagctccggtgaggacggcgctgaatcgaccttcgacccttggctcggggaaacgcgagcacgcagcgactcggggaagcgctggggatcggaagcgcggaccggcacggggaatgtcgagcgaccggcgacgacggggaggccccagcgaccgggtgggctgtgggcggcggcgaatctacccgccgaggtcgcgataaacaatgttatgtgcaaggataatattcttactaagagctgatttggtgattaggtatcccaaggggatccatgggggaggaatcccttccaattcaattttgaaaagtaagaggatttcttcccctagggatccccgatcaccaaattagtcctacgcgtgttttttttttttttttttcgggccggtgcaaaccattctaaagttcaggtacggccgacccgtgatgtccagcccgggactcccgtccaaggcagcagagaccagagagcgaaggaggccaaggccatcgctctcctagcctcggagacttgcctttgcatacacatccccccggagggcggtggccggagctgacccctgatcggacgcgcttagcgcctgagggcatggctgcaaccgtgaggagggctgcttcctccgtcctctctcgcttcctcctcacaaagccttcgccttcgcctgcttctgccgccggcaataattccgctctcctcggatcaggggctgctgctcttcacaggttcagcaccgcaccggcatccgcggccgcggccgcagaggagccgatccagcccgcggtggaggtgaagcacacccagctcctcatcaatggcaacttcgtcgacgctgcttctgggaagacgttcccgacgctggacccgcgcaccggcgaggtcatcgcgcgcgtcgccgagggcgacagcgaggacatcgaccgcgccgtggccgccgcccgcagggccttcgacgagggcccgtggccgaggatgaccgcctacgagcggtgccgcgtgctgctgcgcttcgcggacctgatcgagcggcacgcggaggaggtcgcggcgctggagacgtgggacaacggcaagacgctggcgcaggcggcgggggccgaggtgcccatggtggcgcggtgcgtccggtactacgccgggtgggcggacaagatccacggcctggtggcgccggccgacggcgcgcaccacgtgcaggtgctgcacgagccggtcggcgtggccggccagatcatcccctggaacttcccgctgctcatgttcgcctggaaggtcggcccggcgctcgcctgcggcaacaccgtcgtcctcaagaccgccgagcagacgccgctctccgcgctctacgtggccaacctcctcctcgaggctgggctccccgagggtgttctgaacgtggtgtccggcttcggcccgacggccggcgcagcgctctccagccacatgggtgtcgacaagcttgcgttcacgggatcgacgggcacggggcagatcgtgctcgagctggcggcgaggagcaaccttaagccggtgacgctggagctcggtggcaagtcccctttcatcgtcatggacgacgccgacgtcgaccaggccgtcgagctcgcgcaccaggcggtcttcttcaaccagggccaatgctgctgcgccgggtcgcggacgttcgtgcacgagcgcgtgtacgacgagttcgtggagaagtccaaggcccgcgccctgaagcgcgtcgtcggcgaccccttcagggacggggtcgaacaggggcctcagatcgacggcgagcaattcaacaagatcttgcggtacgtccagtccggcgtcgacagcggtgccaccctcgtcgccggcggcgacagggtaggcgacaggggcttctacatacagccgacggtgtttgccgacgccaaggacgaaatgaagatcgctcgggaggagatattcgggccggtgcaaaccattctcaagttcagcggcgtggaggaggtgatccggcgcgcgaacgcgacgccctacgggctggcggcgggggtgttcacgcggagcctggacgcggccaacaccctgtcgcgggcgctgcgggcgggcaccgtgtgggtgaactgctacgacgtgttcgacgccaccatcccgttcggcggctacaagatgagcggcgtcgggcgggagaagggcatctacgccctccgcaactacctccagacaaaggccgtcgtcacacccatcaagaaccccgcatggctgtaaatcacatcctccgtccttgcccgcacggcgctgcgccggttctcggagaacgtgacgaataaaacaaacggtttggttaaaaagacaaggacgacggaaaaaaaaaaaaaaaaaaaaaaaatgggtcatttttatctccctagagcatctccaacaatgcctcaaactaatgcctcaaatcgaaatatagggctctacacaggaaaaaccactccaacagtgcctcaattcaacaaattttgtcaaaaaactatagggcaacctctcaagtgcctcaaatatactacaccgtagtgggctgccctataatctagatttggggctttactgttggagcggggtgttttgttggtgccctaaattctataaaatttacttattttaaaattataaggcatttttataggtcacgttgttggagatgctcttaacaagcaccaccctagtcacgttttcatcgaactttaaaagcacgcgaattgctcagctctcaaaaccatttaaattacccattaggagaggttttccatggtgattttagcttttttttaattaatgtttggttgcaatgacaggacaggatgagatgagacgatctcttgtatctcttaaaaaaaaaaaaaaaaaaaaaaaaaaaaaaaaaaaaaaaaaaaaaaaaaaaaaaaccacccac

SEQ ID NO: 3407 - DNA, 805 bp, Zea mays
  Clone ID: TF_LIB4738-035-Q1-K1-E6
gtaccctccggctctccggtgtgtacttgtgtttctccaggcgaaggcggccgagcacgcgaccgagatggaggtggcggtggccgtcgcggctgccgcggaggccgaggaggacgaggctgctgctgctgctgcgacttcgacgctgcagcagtctgggaggaaacagccccgcgcgattgggagtgggcggtatcgctcggtatccagggatttggaggaggctgcccctaagaaaccgctgccaccatcatcgcagggtttggatttaggcggcctccctgttctcgatgtctttcaagtttactcctgcttaaggtcgtttagcaagcagtttttcctcagcaccttctcactggagacatttgtggctgcgttgtggagcacctatgtcaacccgttgatcgactgggtgcatttcacgctgctgcgggctctcaagagtcatctggaggactcagccaatgaaggagacccgtcggcggtacactgcattaggaatcttaactgggagctgttagacctagcaacttggccaatctatcttactgaatacttgctaactaggggctcagaattaaggttgtcagagtcagatggaaacgacgagggcttcaaaagcactggtgtaagaaggaaaaagaggggcagaggctcttctgctaaggtggcagtgggttcttctcaatttccagaaggatctactgaagtggatgatggaaacagcgatgaatgttatctttgtggcatggatggcaacttgttatgctgtgatggctgtccagctgcatttcattcgaaatgt

SEQ ID NO: 3408 - DNA, 1157 bp, Zea mays
  Clone ID: TF_ZmC13126_1
tgcgccagaggcaaagagttcaagaaacctgagaagcccatcaaccataagggaaccaaggagcaggtgtccatgaagccaaggtctccaccacgtgaagggaagcatctggagaagccgtgcgagatcgtcgatgtcgagcagtatgaagctgtggctgaagcgctcaggaaatctgacgaagcggctgatgctaagggagcatcgctcaaagacgtgacgaggaatggagctgatgaagtggcgggccaagaacaagggcgagagcaggagcccgtggacgtggaggacgacgacgacggcgtgcgctgcgccgtgtgcgcgagcaccgacggcgacccgtcggaccccatcgtgttctgcgacgggtgcgacctcatggtgcacgcgtcctgctacggcaacccgctggcgcgggccatcccagacggcgactggttctgctcgccgtgcgtcgccgggaggggcaagccggcggcggcgcggcgccggagctgctgcctctgcccggccgggggcggcgccatgaagcgcacgacggaggggaagtgggcgcacatctcgtgcgcgctgctcgtgccggaggtgttcttccgggaccccgacgggcgcgacggcatcgactgctcccgcgtccccgcgcaccggttcgccaggggctgctacgtctgcgggggcaacaacaacgggtgcgccctcgagtgctcccagcccaagtgcggcctgggcttccacgtctcctgcggcctcggcgccggcctctgcatcgagtaccaggaggggaagggcggcggcggcgccatcgtcgccggcttctgcagagagcacaccgagctatgggagaagcaacaattgacaggcaagtacaagattgtggcgagaggacaagaatgatgatatgggagatggataaaattgggtgcctgaagatgcgcttgttgttattaggatttgttgtacgtaggagagtctcgtgtactatgttaagaatagtcgaataagttgcttttcatttaattattttgcacattgtcctcaagatcacgatcagaaagtgtgctgttgtcggtaggttcatgcagaactaataagcttaagatctccattggtattgtacttccatccatttgttgagcaagtttccagtttcagcattc

SEQ ID NO: 3409 - DNA, 588 bp, Zea mays
  Clone ID: TF_LIB4073-010-Q6-K2-B4
tacaccaaggcaggtgggcaggcctccgccctcctcccctactccagggcccactgcagcctcagcccaggagccaccagatctcccaacaccatggtccgataccgcgtgaggagcctgagcgaacgctcgcacgaggtgtacaggcagcagttgcatgggcaagagcaaggacaccacggccaagaggagcaagggctgagcccggagcacgtcgaggtctacgagaggacccatggccagtctcactataggcgcagacactgctctcgaaggaggctgcaccggatccacaggcggcagcatcgctcctgcagaaggcgcaaaagacgctcctgcaggcaccggaggaggcatcgcagaggctgcagaaccaggaagagaacatgcagaaggcactaagcttcctgggcccctcacccccagctggaaattaagaaaaagtcgcccgaaacaccaagtgaggccatagcaattcccctacatcaaatgctcaagcccccagctggaagttaagagaaagtcacctgcccaagaaacaccgagtgaggccatagcaactcccctacatcaaatgctcaagccctg

SEQ ID NO: 3410 - DNA, 404 bp, Zea mays
  Clone ID: TF_LIB3357-002-P1-K1-H2
gacaggggagtccaagcttcagatggccagcgtcggtggagcagtggccgggggcgtgggggcgccgacgccgcacgtcctcgcggtggacgacagctccgtcgaccgcgccatcatcgccgccatactccggagctcccggtttcgtgtgactgcggtggaaagtgggaagagggccctggaactgttaggagccgaacgtgagtatgataatcaccgattactgcatgccagagatgacgggatacgagctgctcaagaaggtcaaggagtcgtccaagctgaagcagatcccggtggtgatcatgtcctcggagaacgtctcgaccagaatcagaagatgcctggaggaaggagcagaggatttcctggtgaagcccgtccgcgcgtcggacgtgtcgcgc

SEQ ID NO: 3411 - DNA, 2164 bp, Zea mays
  Clone ID: TF_ZmC617_1
ctttcttgtggatcaaatcgcccctgggaaggggtgggacttcactattattggcgaagctcgaactacaagcaagcgactgtgatgtcatcccaagattctattggcacggtgctcaagtgtatgcagaagggtgcggtggacttccttgtgaaaccagtaagaaagaatgagctgggtaacctgtggcaacatgtgtggaggaggtatgcaatgaattgccagacaaatgtccatcagaaaataatgcagtcagcaatcatgtaagtaccaatgttgcagatgggtcaaagataggagaatacattgatgaggaaagcgatgcctaaccaggcgaacgcttcggcgggtgttgctgcccgccctcgccttagttcccgtggtacgtgctccaagtgaaagtgagaagaatgtgcgttccaaatgccttaatggtattacttctgcaaaggtggctgagcaaataatggataatgccttgaggatcacggatgcaagttcacgtcgtccaaccaatcttggcaaagatttggctatgactgaaccagcagctgatagaaaatgccaatctttagtgatggaaaataatgctgtcaaagaaaagaaccctggtgaaaagtcgaagagtgctgtaataggtcatgctgattcttacccctcccaatttctcgagaccaacttgggaaaacaacagtatcgtaatggttacaagaatcaagaattcagggaaaaagatatctttaatcactcgaattcctctgccttctcgagatatggcaataaaaggatagaaccatcaggtgagattcagtttttcccttctccctgcgtcattgggcaagggcatgttcatggcaagaacccagttttccaacccaatggggtgttgctgcctcccaatgaacataatacaggtgagagtacaaggcaagctcgaatttctctggacagtaggacagagggtgctgccatcctgtgttccactagtgccagggaagatgctggtgcaaatagttcttcccatagaaaggacagtatgagccatccctcatatgggtttatacctgttccaattcctgtcggtgccatgatgccctaccattgtggtgcaattctgcagccagtatactacccacagggtccacttatgcactgtaattcatctgcaatcaacaaggcaacaattcatcaaacctctggccaatctaactaccgtgaagattgtggtagtggtagaccatctcaggttgatgaacacaaacagtcagaggaaaagcaccagttgcatcattcaagacaaattcatcgggaatcaggacaaccagttgacatggttagagctcacatggatcatgctaaccagagtgcaagctgcagccgggatatctgtaaaggaagcggatgcacgggtagcggtgaagccgataccaatgcgaacacgacggttgccctagagagtggcaacgagagtggcatccaaaatagtgacaggtctcgccgagaagctgcgttgatgaagttccgcatgaaaaggaaagacagatgcttcgataaaaaggtcaggtatcatagcaggaagaagcttgcggagcagaggccaagagttaaggggcagtttgtaagccagaagctgaaagcagctatggcaacggaagccgaaactgactcgtgacgggcgctagtccagaactgtaattttggttcttcccttcgcgccaggtgtgggcgattggactggtaagtctgaaggctggcaaaagtttttttttcttccttccatggttagcctttctgtacaaaggtgaactccacgtcgggtgtttgttggcatccaagccttattttttgcgaggtacatcaagttgacaaaatgttcggagggatagggtgaaaacggtgcaagcgccatatttcgtccatacgcttaggtgtttgtggagtgtgaaagcagagcctgtacagcatattcaccacccattcttgttgccattacaattgtagtaacttgtaattactactatgacaaaagtagacactgttgtagaacttacagccagcaggtcttttccatatgggacagtagcattttatttattaattggttgatcatatgaggacagtcctgaatgcaggacagttatttgtttgccttaaaaaaaaaaaa

SEQ ID NO: 3412 - DNA, 222 bp, Zea mays
  Clone ID: TF_LIB3180-050-P2-M1-A9
tgtttttttttcctcctggaatccacgatcatggaacatgatgcgttcaagaacatccccattataatgatgtcatcgcatgactcagtaagcattgatttcaaatgcatgctaaagggtgcagcatattttcttgtttagccgataagaaagattgaattaaggaacttgtggcatctcgattggagaaaaacaacatgctaacggtagtcctaatgctta

SEQ ID NO: 3413 - DNA, 1162 bp, Zea mays
  Clone ID: TF_ZmC8_2
atacatactatcaggctagaccggtagagtatattaattctaaacagctcgtgtgatgtttcacccagtcatcgccgtcgacagcgcgaggaaggcgatggagttcctcggcctcaaggacggcggcgaggagcaggccgtcgacatggtgctcacggactactgcatgcccgagatgaccggctacgacctcctcaaggccatcaaggcactgaaccccctggagccgatcccggtcgtcgtcatgtcgtcagaagacgagccccagaggatcagccggtgagccagccggctctgttctttcctctttttgagcaccgtttcctttggtccctatcccgtcccctgtgaatgcatgctgaatcatcccgtgagatagaatagcagacggggccaaaagccctggcccgtgtgtactgacggggtaacatttattcattcatccactcgacccgtgtgtactgacggcctcgttattctccggagcagatgcctgagcgccggcgccgaggacttcatcgtgaagcccctgcagagcaaggacgtgcagcgcctccggaactgctccgccgccgcgaggcccagcaagggcgccgcgccgtgcgaggccgccgtcgtggccaagaggaatcaaaagccgccgcatcctgccggcgccgcgtcgccgtctggacggcgagcgagcctcgccggagtcgccatggtgctgcactcgtcgggcgtggagtacctgccgctcctgctcaagctcgtcgtgctggcgtacgcggcgctgtgcctgggagagctcctgcacaggtgggcgtcgtcggacggccgctgctcgctctccccgtggtgcgcctgagcagcggtgcgtgtcctgggcaccagcaggagactggtgatgcaaatgcagagtttttcagctgctgaaccaaaaaaaaaaacctccaacagccgtggaggtctagcttagcctttaatttaggcactgtagaagattgactgctttgggattgggtacgctcgcgtctgccgtctgcgtggcgtttgtttcttgatttgagggagacgtatgtatgtacgtacgatacgaggccacggggggtacgctcccctgtatcctctcctctgtatagaatccactgaatcagaatgcaacgcgtgacccgagccccgt

SEQ ID NO: 3414 - DNA, 350 bp, Zea mays
  Clone ID: TF_uC-zmrob73055d04b1
cgtacgcgtgggccggctcttgctctgctcggttcctcctggcagcaaccgaatgtctcccgacgccgacgccgccgccgggggaggaggaggtggagaggcgagcgctcggcgccggtgccggcgcgtagtcgcctcccgcgtccgcttccgcggcggcgaacggccgggcgctggtgcggtgggaccagatcctgccgcgccgcttcctgcgggtgcttctcgtcgagcacgacgactctacgcgccatatcgtcactgctctcctccgcaagtgcggctaccgcgtggacgacgtcgcggacaggatgaaagcgtgtgacgttatgctggagcgtgcctacgacttc

SEQ ID NO: 3415 - DNA, 615 bp, Zea mays
  Clone ID: TF_LIB4172-033-R1-K1-B10
ggctggggcaaaaatctaacccttggtttatccgggggtttaacaaaggaaggggtctaacctttcccagtaggacctttccaaaattttgtcccttcctggccccggggcccttcattactggggacccaagcgagaagcaggggccttccagtttttcctatacatttcctttccccggcccccaaaggtttggggaaggttgggatctaaccaagctacaggggttttttgaaaattttgaaagcaaggaaaaccatcggggggccttttaaacggttttgaaggaccctatacagttaatttcccagggcagttaacggggccggtttttggatcaggccgtttatccccgaccttgggcatccgtttgggaccttggaatcgatcctcgcagttagggcgacaatcaggggcagccagtttttgttactgaacttcctgatcgggcgggccattttaagcccgtccgtcctttgaagggggaggcccaggaccaccacctgaaaggacggttcgggggcaaaggacctcgtgctttggacaccggaggcaaccgaagggacccggaagccgagcttttccagaagcctgggggtaacggctctgtggggg

SEQ ID NO: 3416 - DNA, 1629 bp, Zea mays
  Clone ID: TF_700170928_FLI
ctgaggtttttatgcccggtgtatctggtatttctctgctgagtagaatcatgagccacaatatttgcaagaacattccagtgattatgatgtcttcgagtgatgctatgagtacagtctttaaatgtttgtcaaaaggtgctgttgactttttagtcaagcctatacgtaagaatgaacttaagaacctttggcagcatgtgtggagacaacggtgtcacagtgtaagttgttcatggtctggtttgaatatttggtagtggaagtgaaagtggcattcagacgcagaagtgtaccaagtcaaaaggtgccatcacttgagctgagtttgaagaggtcgagatcatgtggagatggtgccaacgatacagtcaatgacgatgaacagcggaatagtgcattaaggcgatcgaatctctcggcttttacaaggtaccatacatctgcggcttccaatcaaggtgggacaggattggtaggtagctgttcgccgcatgataacagctcggaggctgtgaaaacggattctacttacaacatgaagtcaaattcagatgctgccgcaataaaacaaggctccaacggcagtagcataacaatgacatgggttccactacaaaggatgttgtgacaaaacccagcacaaataacgagagggtgatgttgccctctgctattaaggctaatggatacacgtcaacattccatcctgtgcagcagtggatggttccagataatgcgacagcagggaaagcgaaggctgatgaagtggccaacaatgcaggcagaaatagtcatcctggtgacgtgcagagcaacctgacgcaacaacatcgtccaacccttcattacgtccattttgagaatagtggatcaggtgccctgcaatgtggttcctccaatgtatttgatcccccacttgaaggccaggctaccaataactatggtgtgaaagccgggagcaactcaggcagcaacaaggggcagaataatgggagtacagctggtgcgagcacggctgctgcaaatgctggacggacagatacagagatacgggctatcgataaaagtggacctggaggtggcagtgggagtggcaatgacacatatgtcagacggcttgctgcgagcatgacaccacgacaagaacagctaaagaaatatagagagaaaaagaaagatcggaactttgggaaaaaggtgcggtaccagagcagaaagaggctagccgaccagcggccaagggttcgtggacagttcgtgaagcaagctgtgcaaaatcaagagggagatggagagagatgacccccccccccctctggcttcagctcatggttgttagacgtggcggttgatgattcttccttctctggtgtgatctgatatgatcgacaacacaccatccttccttttcttcattggtttcttcacatctagaatttactgcctgaccgggaaaaaataagctaggaacttctatacatgtgtatgcatttctaatcatgtagaagaataagtgtgtcttgactctagataattttaggtagagtcatgctcgctctcctacattatgtgatgtaactgaagtgttgttgtgttgtcatgtatggtcttggatcactttctgtc

SEQ ID NO: 3417 - DNA, 1196 bp, Zea mays
  unsure (1)..(1196): unsure at all n locations
  Clone ID: TF_ZmC751_14
aaaaaaataacccttctcccccaaccccatctctctctctgcctgcgttctcctggtgctgctctccctctcctcccctgctttgacctccccgcctttccccgccgtttcttggatttctaggatccagacaaccgcccctgtgagcctgccttcctgcctactacctgcgtacgtacaggagggtccttgcttgggtgatccgggtgcttggtttctcggttccccggctttcgctgctgttggattcgccgagccggagccgccggagatgactgtcgacgagctgaagctgcaggcgagggccagcggcggccacggcgccaaggaccagttccccgtcggcatgcgcgtgctcgccgtcgacgacgacccgacctgtctcaagatcctcgagaacctcttgctccgctgccagtaccatggcagccacggccctgaagctgctgagggagaagaaggaccagtttgaccttgtgatcagcgacgtccacatgccggacatggacggcttcaagctcctcgagcttgtgggcctcgagatggacctcccggtcattatgctgtctgcaaatggggagacacagacagtcatgaagggaattacccatgnagcatgtgactacctgctgaagccagtgggcattggcattcgaaaaaaaataaaaaaaaaaaaaaaaaaaaaaaaaaaatgtgaaaaaaaaaaaaaaaaaaaaaaacaaaaaaaaaaaaaaaaaaaaaaaataaaacaaaaaaaaaaaaaaaaaatgaaacatacataacaatcccgctgacgaagtgaacctcggatgagcaggagcgggaccaggtcgtgccgggacaccgagcaatgggaggcgcacggcgtcgcgcaggccaccgggtcgctggtgcacattcccgccgtcgcgctgcggagctgaccggccgggacggaacggaagcctacgatcgactgtacatacaggggttgggacttgttgggttttcctttgggtggagagcgagggagcgcagtcgagagccagcgagcagtctctcgtgcagtgcagtgcagtgcagctccggcgtagatgagattgtattgtgaccaagccgggagggaaagcagggaggggaggacaaagatgttttgtcacgtttcaggctccggccatcgccggagtttgtccggggaatatatcgatttcctccag

SEQ ID NO: 3418 - DNA, 825 bp, Zea mays
  Clone ID: TF_ZmC2028_4
cagtaacacacaggctcctggagaagctcggctgccgggtcctttcggtcgcctccggtgtccaatgcacgagctccttcgccgccgagccgtccttccagctggtggttctggacctcgccttgcagaggacggacgggctcgaagtggcccgcgcgatcaggaagttcagtagcaatagctggctgccgctgatcgtcgccctagctgcgaggatcgatgacaaggtccgagacggatgccagaggtcggggataagcggcctgatccagaaaccggccacgttagctgcgctgggagatgagctgtatagggtccttcagaacagttgaaagtgccgcctgatggttctcattgctttcagaattctcaatagaccgctgtagcttggttagatccatacattcacaaaacatttgggggcaggcgaagggaaatgtataggaaaagctggaagaccgctgcttctcgcttggttcctcagtagtgaaggacgacggtgacaggaaggtacagaattttggagagatcatactggtagagcttagactcattcatttgtaaaaccctcggataatccaaggtttagattcttgcactagcactaaccacgatataaatagtttggacgaaatccatggatgggttcagtgaatgctggcatagtagatgcctaaagggggcaaggaacttttgttatcggttagacatgctgaaaagcaggccggatgagattgcggacaggaaggcagctgatacggccgatgctgaccttgtatcttgttgaagattaaatactatggtagtagtacttgcagcccgtgc

SEQ ID NO: 3419 - DNA, 545 bp, Zea mays
  Clone ID: TF_11041691
gctcgtgtcgtttctgaagctagctagctagcgagcgacagtcgatggcgagccgcaagtgtctcggaggcgagggaagcgcgccggcaccgcacgtcctcgcggtggacgacagctcggtcgaccgcgccgtcatcgccggcatcctcaggagctcacagttccgcgtgacggccgtggacagcgggaagagggcactggagctgctgggcaccgagcccaacgtgagcatgatcattaccgactactggatgcccgagatgactggatacgagctcctcaagaagatcaaggagtcgtccaggctgaaggagatccccgtggtgatcatgtcctcagagaacgtgccgacaaggatcaacaggtgcctggaggaaggcgccgaggatttcctgctgaagcccgtccgcccgtccgacgtgtcgcgcctgtgcagccgcgtcctgcggtgagcacggcggcaagtagtagcacagcatgctggcgcgcatgctcgtggtagttcttttggggatgcatggtggtagctgtagcagcggcattcc

SEQ ID NO: 3420 - DNA, 537 bp, Zea mays
  Clone ID: TF_ZmC8939_5
agctcggaattcggctcgagggcccattggcatgtaccaatattagctatgacggcagatgtaatccaagcgacttttgaaaaatgtatgcagtgtggaatggatggatatgtgtcaaagccatttgaagaacagcagctctactctgctgttgctcatttcttagagactgatgaaatagaataacaaatccaacttcgtaggagattgatttgccacaacactgtttcaacatctgccaaaagacccatctgttcaacaggttctgaaaaacagcgatcggcagcatatttgcaatggaattgaggtcccagttcttatatatagaacttgctccaggaaacaaaatacatgggactcccactgaccagaagaaagaagataagaagatagtagggggtacaaaatgtttggtctggtttccgcagcaatttttttttctggccgtgttttctggaaccaatacaacatgaccttgcaacagtggtgtcagctgcttctgtaatgccttatgacaccacgatattttcaaatgct

SEQ ID NO: 3421 - DNA, 1465 bp, Zea mays
  Clone ID: TF_ZmC5787_2
atggagccgattagttgtggagattcgggtgcgtgatccggtcggatcttgctttcccgggggagtgggggcggggatcgaggccacgccgctgcgtgggcgcgcgtctgacgtgccgtgccgtaccatggctgccaggctgcgccgctcgcctatatcctcccccatccccccgccttccctctgcatctccctctacccgccgccacattcatcagtagaaaccacctatcctgcctgctctacctacctccgctccccagccatgacggtgctggacgccgagtcgcggttccatgtcctggcggtggacgacagcatcatcgacaggaagctcatcgagatgctgctcaagagctcgtcttaccaagtgaccacggtggagtccgggaacaaggcgctggagctgctggggctgagggacaacggcgcggaggacgcgtcgccgccgtcatcctcctcatcatcttcgtcgtcgtcctcccctgaccatcaggagatcgacgtgagtctcatcatcactgactactgcatgcccggcatgacaggatacgatctgctcaagcgagtgaaggggtcctcatcgctcaaggacattccggtggtgatcatgtcgtctgagaacgtgcctgcccggatcagcaggtgcttgcaggatggcgcggaggagttcttcctgaagcccgtgaagccggccgacatgaagaagctcaagtcacacctgctgaagcggaagcagcccaaccagaagaacaagcctcaggcgcaggcggtggagtctcctgagcagcagctggacccgcatccgcagccggtgcacgagccggaggaagccgcggcagatcgcaacggcgtcaacaagaggaaggcagcggccatggaggaggggctgaccgtggtggtgacggcgccggagagcaccaagccgaggaggctgtctacgagcagcctgactgtggagacctgatcaaccgtggcgacctacgggctacggctacgcacattaatctagcagtggatgcaagccccagtcccagccccgccgccaagaaacacattttggttctgggagctaacggagggaagtgacaaacaattaaattatatgtagcggctgctgcttcggcctgcaaattttgttgcgctaacggtcatggacatggacatggacaccatcccttgtgttcgttaatcgttcggaaggggaaaagaagaagaagctgtagataaaaaaaggacaggcggctaattgttaatttccgcatggcttaattctggcaacgacctgctggctcaatcaaaaacctgtgacggacagacggatggatcaactgatgatgttgttgttttggctcggttcttcttccttgtacactgagtgttcagatgaacatgttgtaatctgaacatccgttcatgtcagcctgcctgacgatggaggcaaaagttcttctacatcatggtc

SEQ ID NO: 3422 - DNA, 1195 bp, Zea mays
  Clone ID: TF_ZmC5787_4
cctcgaggccggccgggctacccgccgccacttcatcagtagaaaccacctatcctgcctgctctacctacctccgctccccagccatgacggtgctggacgccgagtcgcggttccatgtcctggcggtggacgacagcatcatcgacaggaagctcatcgagatgctgctcaagagctcgtcttaccaagtgaccacggtggagtccgggaacaaggcgctggagctgctggggctgagggacaacggcgcggaggacgcgtcgccgccgtcatcctcctctcatcttcgtcgtcgtcctcccctgaccatcaggagatcgacgtgagtctcatcatcactgactactgcatgcccggcatgacaggatacgatctgctcaagcgagtgaaggggtcctcatcgctcaaggacattccggtggtgatcatgtcgtctgagaacgtgcctgcccggatcagcaggtgcttgcaggatggcgcggaggagttcttcctgaagcccgtgaagccggccgacatgaagaagctcaagtcacacctgctgaagcggaagcagcccaagcagaagaacaagcctcaggcgcaggcggtggagtctcctgagcagcagctggacccgcatccgcagccggtgcacgagctggagctggaggaagccgcggcagatcgcaacggcgtgaacaagaggaaggcagcggccatggaggaggggctgaccgtggtggtgacggcgccggagagcaccaagccgaggaggctgtctacgagcagcctgactgtggagacctgatcaaccgtggagactacgggctacggctacgcacattaatctagcagtggatgcaagccccagtcccagtcccagccccgccgccaagaaacacaaagtcgtgcctgctgcttttggttctgggagctaagctaacggagggaagtgacaaacaattaaattatatgtagcggctgctgcttcggcctgcaaattttgttgcgctaacgggcatggacatgcatggacaccatcccttgtgttcgttaatcgttcggaaggggaaaagaagaagaagctgtagataaaaaaaaaagggcaggcggctaattgttaatttccgcatggtgtgacggacagacggatggatcaactgatgatgttgttttggctcggttcttcttccttgtacactgagtattc

SEQ ID NO: 3423 - DNA, 1084 bp, Zea mays
  Clone ID: TF_ZmC8_3
cgagaaagagcagagggacaccgaaacagagaggagcagaggggagcgacgacaggtcagcggagatggaagcagcggcaggaggagtggaggcggagggggtgatgagggtgctggtggtggacgactcccccgtcgaccgccgggtggcgcagctgcttctcagcagcgactcctgcgccggctcattccacgtcatcgccgtcgacagcgcgaggaaggcgatggagttcctcggcctcaaggacggcggcgaggagcaggccgtcgacatggtgctcacggactactgcatgcccgagatgaccggctacgacctcctcaaggccatcaaggcactgaaccccctggagccgatcccggtcgtcgtcatgtcgtcagaagacgagccccagaggatcagccgatgcctgagcgccggcgccgaggacttcatcgtgaagcccctgcagagcaaggacgtgcagcgcctgcggaactgctccgccgccgcgaggcccagcaagggcgcgacgcagtgcgaggccgccgtcgtggccaagaggaatcataagccgcatcctgccgctgccggcgccggcgccgcgtcgccgtctggacggcgagcgagcctcgccggagtcgccatggtgctgcactcgtcgggcgtggagtacctgccgctcctgctcaagctcgtcgtgctggcgtacgcggcgctgtgcctgggcgagctcctgcacaggtgggcgtcgtcggacggccgctgctcgctctccccgtggtgcgcctgagcagcggtgcgtgtcctgggcaccagcaggagactggtgatgcaaatgcagagtttttcagttgctgaaccaaaaaaaaaaaactccaacagccgtggaggtctagcttagcctttaatttaggcactgtagaagattgactgctttgggattgggtacgctcgcgtctgccgtctgcgtggcgtttgtttcttgatttgagggagacgtatgtatgtacgtacgatacgaggccacggggggtacgctcccctgtatcctctcctctgtatagaatccactgaatcagaatgcaacgcgtgacccgagcc

SEQ ID NO: 3424 - DNA, 820 bp, Zea mays
  Clone ID: TF_ZmC339_6
cccgcgggccgggccggggctgcagcctgactgtctgttttcagcacccgcaccacctgactgtctgtttgcagtagccgcacctgtgtcccgtccgtccctgcaatggccgccgccgctgccgctccaacctctgtggtgccgtcgccgtctcctgcgcccaaagccagcgacagcaggaagacggtggtgcccgtggacgcttcggagctggagaagcacgtgctggcagtggacgacagctccgtggaccgtgccgtgatcgccaggatcctccgtggctctaggtacaaggtgaccgctgtggagtcggcgacgcgagcgttagagctgctcgcgctgggcctgctccccgacgtcagcatgatcatcaccgactactggatgcccggaatgaccgggtacgagctgctcaagcgcgtcaaggagtcggcggcgctcagaggcatccctgtcgtcatcatgtcgtcggagaacgtgcccacccgcatcacccgctgcctggaggagggcgccgagggcttcctcctcaagcccgtccgccccgccgacgtctcccgcctctgcagccggatccggtgactgcgtgtggtgctatgttaggagctaggatcctcaacaaaaaaaaaaaaaatcctcttctttctttctctcttgcttggacatagatcttcaaacaaggagctaacatttggggggagactttttagctttagggatctcaacaagttgttcggaacggggggctgttcttttctccattcttcttaataacatcaggtgtcaatgtcatgagaaaaaaaaaaaaaaaaaagcggcc

SEQ ID NO: 3425 - DNA, 1171 bp, Zea mays
  Clone ID: TF_ZmC10160_1
cgacagacgatgcaagggaacatctgggcagttctcgacggccaaggactcccggagagcatgaccctggtcctgaggttccagctccaaccatcgctggcgagctccaacctcctcggagggtcgtttgatcaggagcactactcatcattgccatctaaccaaatagccgggctgaaggttctgctcatcgatgacgacgagatcaacctggtggtggcccggaagctcctggagaggctaggctgcaccgtttcctcaggctcgggactcatggactcttcctctgcctgtgcctcgttccagctcgtcatggttaacctcgagatgtcagcgatagatcccctggatgctgcctcgaggatcaggcagcagtacaggagctcgcactggcccctggtgatggccatgacgtcggagcagaacgtgtgggagaagtgcgcgcagtccgggatcaacggcgtcctgaagaagccgcttgttctgctggaagtgaaagaagagctcgagcggatccttcagaacacatgatgcctgccatgacccatgagctactaccatgatgaatacgacccccgtccgtccgtctagcatactacatagcagaggggaggggacatggatctcgagttgagaagtggatgcaagtctcctacgctgctgtagttgagtgactgctgtgaggacggaggtggtgacgacgacggatttggcaggcaagcacgagggccgcgttatccgatccatgcccatgccgcgtaaggaggcttcacctcgattcaccaactacataatcacctcgattcacacacgtcaggctttcagtcgataaattcattagtttcatcagaaacggaatgcagttgccagttaatgttggcgtcagtcgcaggggatcttcggccatcgtcgccgcatcagaagcaatgcgcagctccagtggcctcgaccgaacaggacaagaaataggtctagttggatttcttttcgcctttgggtttttgtttaaaaagaaagagaacttgattttccttaaactagaattctctgtcttccattatagtgcacccttttttatactcagattcaaaaccaaaatataaaagaattaagtagatctcaacttgtcatacttctcagcatatttgttatctatccacacttgttaagg

SEQ ID NO: 3426 - DNA, 1078 bp, Zea mays
  Clone ID: TF_ZmC33_1
ggtaccccctcgagccggcgggacaaaaattgtaacaaactacatatactaaagtttagtacattgagagcttgtctagctagtccatggccactcaaagtccccatgttctcgttgtggatcattcccgtgttgattgccttgttgcatcgattgtcctcaatagtttcaacattcgagtaactgttgcgggaggtgccatggaagcattggaattcttagatgcgaacaacagtcatgtggaccttattttgactgactactgcatgcctgatatgactggctatgatttgcttagggaagtgaaggaatcgccaagactaaagcacattccagtggtgattacatgcactgatgtcataccagaaagaatcattgagtgctttgaaggaggagcagaggaatacatgataaagcctctcaaggtttctgacgtgcctcgtattcttagctacatgtgatgcacttgagggagaaaacgaataaaaaggaaatgcaagcataaacagtctttgggttatagttctctatcaatcatgcttaagtgtgaccatatatggtctttttattatgtcacctgttgttttgaataatttgtagccaatgcaagcctaatcagtatttggcttatagttctctatcaatcatgcttatgtgtggccatctatggtacttttaatgtcatccattatttttttaaaaaaaaaaaaaaaaaaaaaaaaaaaaaaaaaaaaaaaaaaaaaaaaaaaaaaaaaaaaaaaaaaaaaaaaaaaaaaaaaaaaaaaaaaaaaaaaaaaaaaaaaaaaaaaaaaaaaaaaaaaaaaaaaaaaaaaaaaaaaaaaaaaaaagggggggccccttttaaaagaaaaaaatttttggccccgggtatggaaaaaaaatttttttttttaggggccccaaaaaaaaaaaaacgggcccggttttaaaaaccgtgggaggtgaaaaacccggggggaacccaaataaaaaccgtttgaaaaaaacccctttttccaaagtgggaaaaaaaaaaaaaggccccccccaaagccccttccaaaaaattgccccccct

SEQ ID NO: 3427 - DNA, 2854 bp, Zea mays
  Clone ID: TF_ZmC131_1
tcctagggatgctccaaatgctcatggatactgatttggacacaacgcaacaagactatgttagaaccgcacaagccagtggcaaaactttggtatccctcatcaatgaggttcttgatcaggcaaagatcgagtctggtaaacttgagcttgaggtggtaccctttgatcttagaacagtttgtgatgacattttgtctctcttctgtgggaaagcacaggagaaaggactggagttggcagtgtttgtttctgatcaagttccacaaacactaattggcgatcctggaagaataaggcaaatcattacaaatcttgttggaaactctataaaattcacagagaagggtcatatctacttgacggttcatgtcgttgaagagattatgcattgtctggaggttgagacgggaactcagtatacaaataccttaagtggctacccagtggcgaacagaaagcgcagttgggaaaactttcgactttttagtagggaactgaactcatccgagatgccttttgcacccattgcatcagactcaataagcttgatgatatcagttgaagatacgggtgctggaatcccgttcgatgctcaatcccgtgtcttcacccctttcatgcaagtaggtccatccatcgctcgcatacatgggggcactggcattggattaagcatcagcaaatgcttggttggactcatgaggggagagatcggatttgcaagtaaaccccaagttggttctactttcaccttcactgcagtgcttacgagagtccattccagcagaaatgagaataaatcatcagaatttaaagagatcaatgcattggtggtagatcatagaccggtccgtgccaaggttactaagtatcatttgcagagactgggagttcagactgaattgacaactgacctagatcagtatatttctaaaaataattgtggatcacagattgcaaagcttgtgctcattgacaaagaaacctggctgaaagaatcccactccatgcctcttttggttactaaattgaggaacaaagatcagccagactctacaaagttatttcttttggagaaccctaaaagttctgtcaagagcaattcacatatattcagggaatataacttgaatgtaattatgaagccacttcgtgcaagcatgcttcaggtttcgctacaaagagcattgggtgggatagataaactgcattgcaggaatggagtagtcggaaattcaacactgggcagccttcttcacaagaagcgaatcatagtggttgatgataatattgtaaatctcaaggttgctgcaggcgctctgaagaaatatggcgcggaagtaacttgtgctgacagcgggaagaaagcaatcacgctactgaaacctcctcacagttttgatgcttgtttcatggacatacagatgcctgaaatggatggatttgaagccacaaaaaggattagagtgatggaaagagatctaaatgagcaaatagaacgtggagaagccccaccagaatgcgcagggctccggcagtggcgaactccaatattagccatgacagcagatgttatccaggcgacgcatgaacagtgcttaaaatctgaaatggaaggtaatgtatccaagccattcgagggcgagcaattgtacagagaagtagctcgccatttctcaaatcgaggcgaacttcagtaggtacgcttatatggagtgtaaactaggcgacgcacgcacagtgcttaaaatctgaaatggacggttatgtatccaagccattcgagggcgaacagttgtacagagaagtagatcgctttttcaagcatcaattcgcagagttaggggccctattaaaacgctagcaacgctgggatgtggcctccagttaggtggaaaacactttaggctggagatggaaccacccatgttcggttccttggtacatctgaccaaactgcaaaactaaatgtgcaatgtcttgaaatcaaggtgcatgtggagctatttactcgacaatctgaagtcaaggcgtgtgaaaaaaaagcccagctgcattcactaaccgcagatgtcctctgccactataatatagagtagggagagaaattttccttccccggaaggtaccggctgtacatattaggtattggttgtttgtgcaggcatttgttggcattttgttgtgcatcgtcttcggtctgtattgtttgggtcgaagctgtaaaatgtaaatggcattttcaaagatggaagttttgtttgacaaaaacatcggtcgtcatcgtgaataaaattaataagataaaaaaaacagtgggcatcaattcgcagagttagagggcccctattaaaagattagaaatgctgggatgtggcccaatccagttcgaacaaggcctcaggtggaaacgatttaggctggagatggaaccacccatgttcggatgcttggtacatctgaccaagctgcaaagctaaatgtgcaatgtcttgaaatcaacatgcacgtgcagctattcattcgacgatttgctgaggtcaaggcgtgtgaaaaaaaaatcagctgcattcactaactgcaggtgccctctgccactatataatatataagactagggggagaagttttccttcccccggaaggcacggctgtacatattatattagggattggttggttgtttgtgcaggcatttttgtatgcatcatattcggcctgtatgggtcgaagctgtaaagtgtaaatgacacattcaaagatggaagttttgtttgaccaaaaaaaaattataatataaaaaaatataaaaataaataaaaaaaataaaatataaatattaataataaat

SEQ ID NO: 3428 - DNA, 817 bp, Zea mays
  Clone ID: TF_ZmC339_3
ttgggtacctcgaggccggccggggccgcactgtctgtttgcagcacccgcaccacctgactgtctgtttgcagcagccgcacctgtgtcccgtccgtctctgcaatggccgctgccgcaccggctccagcatctgtggcgccgtcctctgcgcccaaggccaccggcgacagcaggaagacggtggtgtccgtggacgcgtcagagctggagaagcacgtgctggcggtggacgacagctccgtggaccgtgccgtgattgctaggatcctgcgtggctccaggtacagggtgaccgccgtggagtcggcgacacgagcgttggagctgctcgcgctgggcctgcttcccgacgtcagtatgatcatcaccgactactggatgcccgggatgaccgggtacgagctgctcaagtgcgtcaaggagtcggcggcgctaaggggcattcccgtcgtcatcatgtcgtcggagaacgtgcccacccgtatcacccgctgcctggaggaaggcgccgagggcttcctcctcaagcccgtccgccccgccgacgtctcccgcctctgcagccggatccggtgactgcgtgtggtgctatgttaggagctaggatcctcaaccaaaaaaaaaagattcctcttctttctttctttctctcctgcttggacatagatcttcaaacaaggagctaacatttggggggagactttttagctttagggatctcaacaagctgttcggaacgggggggatggagcacagcgttggctgttcttttctccattcttcttaataacatcaggtgtcaatgtcatgcacg

SEQ ID NO: 3429 - DNA, 814 bp, Zea mays
  Clone ID: TF_ZmC353097_1
ctcgaggccggccggggccacggtgccaccgcatcgcacttgattgggccggggcgttgcgctctctggtctggtcaaggcgtcgagcgtccgtcctccaatggctggcgcggcggcggagcgcaaggcgatcagggtcctcctcgtcgaggacgaggagatccacagggttctggcgagggcgctgctgaggtcggcctgcggcggcgtggagctgcacgaggcggggaccggcgccgaggcggtacggcgcgtgcgggatggcggtgccgccgccgcctacgacctcatcatcaccgactggaagatgcccgtcatggacggccacgaggcgacgcggcagattagggcgatgggcgtcacgacgccgatcgtcgggctgtccagcgacaccctcccgccagacgtcgacgcgttcatcaaggccggggccgacgacttcacccccaagcctctgtccaaggagaagctcgtccgtatccttaccaagttccatctcgcttagctctctatttgctgtccaaggagaagttcatccgggtttttttttttggttgccaaattggcaaatacaatctccactttgctctatgtttgggtgcaaatctcaatgagtggataaataaagggtctcgaagaatcgggtgggctttcttccactatggaccttgggccttatatcagctcgtgttatccttctcgcatataattcacacccgctctgtaatctgtacgttggttggtattggcatcacatgacaacaaggccctctttgttaaaaaaaaaaaaataaaattttaaaataaaataaaa

SEQ ID NO: 3430 - DNA, 2244 bp, Zea mays
  Clone ID: TF_ZmC745_1
atttgacctgagatccatccttgatgatgtcatctcattattttcttcaaagtcaagagagaagggaattgagcttgctgtatatgtctctgaaagagttcctgaactcttgttgggtgatcctggaaggtttcggcagataattacaaatttagtgggcaactcaattaagttcacagaacggggacatatttttgtacaagttcatctggcagatcactcaaatcttgcaacagaacccaaagttgagtcagtggctaacgggatgaatggacataaagatgagaaaactgctgtagcaaccagtgtttctctcaacacactaagtggttttgaagctgctgatagccgaaatagttgggaaaacttcaagcttttgctttcttatgagaaaaatgagatgccctatgaaagtgtatctgataaagttactcttgtagtaagtgtggaagatacagggataggtataccattggatgcccaagccaaggtgttcactcctttcatgcaggccgatagttcgacttccaggacatatggtggtactggaattggattgagcatcagcaaatgtcttgttgaactaatgggtggtcagataaactttgtcagccgaccacatgttgggagtacgttcacatttactgcggttctcaaaagatgtgacagaagcgctattggtgacagtaagcctgttatgttgcatcctcttccatccagtttcaaaggtttatctgcactattggttgatagaagaccagtaagagctactgtaactaagtatcacttgcaaaggctgggaattgcctgtgatgttgttgctaccattgaactggctcttggtgtgctgtccgggagaaatggcagttccctaaccagtatgaagcaaccatgcatgttattgatcgagagtgattcatggggcttcaatattgatgtttctttacgatctagactcctggagatgaagcagaatggtcacacacatgtattacccaaaatcatccttcttgcagctgcagaatcgggcaaactcaaagaacactatgcagttgattctgtgatcacgaaacctctgaaagcaagcgcacttgccgcttgtctattccaaacacttggtatcaaacagtcaagcaacgagagaagtgacaactcaggttctctttacgggttgcttcttggcaagaacatattggtggttgatgacaacaaggtaaatcttagagtggctgctggcacgttaaagaaatttggagcaaaggtggagtgcgtggagagtggaaaagatgccctcgccctcctacaggtcccatataagtttcatctttgtctcatggacattcagatgcccgaaatggatgggtttgaggctaccaagcaaataagggcaatggaagcgaaggcaaatgagcaggcagtcgcctgtgacgattcagaaatagatggcgcgacaagggcagcaagatggcgcctgcctgttcttgcaatgaccgccgatgtcatccaggccacccatgaagagtgcacgaagtgcgggatggatgggtacgtcacaaagcccttcgaggagaagcagctcttccaggcgttgcagaagttcttggaccccggcatgtcctgctaacgccgaagtgatgcgttggagaccgtgcagcgcgggctgctcgtcgatcatgccagcggggaacagcaggcagacaaggcagcacgcaccacgggccttcgctggtctgcctgcctgtgcaggcgtcgtgtaaatgtattgtatttgcagggatactgtttacagcgctagtatgccccgtgccacaatgtccgagctacctgtggctgatgcacgttgcgcataggtggttttttttgtacagcttccaccatttttgtgctccagatcagaccaccgaaggaggcaagcatgctcgctggtgcagtgcagcactggaaggaaaacctgacttcctgagagtagatttttgctgtttaattgcattgggatttatgatgtattataatcagataaatgtgtgatgtaagctggcgtaattggcccaatgcatttccattgttatggatgagttgaaatggcattggttagacatacactattgggtgtatgcccttccacagttccattttccctgcaaaatatcaaaatgtgcaaagggatagtggaatcatggcttgaattatatgaattttctttggtgtttttttcccgtaaaaaaaaaaaaaaaccgtctagag

SEQ ID NO: 3431 - DNA, 776 bp, Zea mays
  unsure (1)..(776): unsure at all n locations
  Clone ID: TF_LIB4977-010-R1-K1-B10
ttgggtccctcgaggccggccgggccgggatcgttggcagcgccattcatccatttgtctttttgatttgttttgacctgagggcaaggcagggcagaacagagagcattcgtctcgatcaaccagatctcgatcaatggaggtggcgggggcttgctgccacgccggcgaggagaggaaggtggctgtgcctatcggcaacgatgcggaggtggagccatgcgtcatcgccgtggacgacagctccgtcgaccgcgccatcgtcaccgcgctcctccggcgctccaagtacagagtcactgcggttgacagcgggaagagggcgctggagatactgggctcggagccgaatgtgagcatgatcatcacagactactggatgccagagatgaccggctacgacctgctcaaaaaggtcaaggagtcttcgaagctgaagcggatcccagtggtgatcatgtcctcagagaacgtgcccaccagaatcaccagatgccttgaggaaggcgcggaggacttcctgctgaagccggtcaggccgtccgacatctcccgcataacaaccaggatgctgctacactgaacttctttcaccagtggccacccaagccaggcgtagtgttttcaattcaagtcacagtagaggtataggaacggagtcaatttagggtagcaattagccgcaggaagtttgatgtaatgtggcctttcattcattagtgcttcgagctttctttggcgtcttactcgnatcagaacaggcagggattagttgt

SEQ ID NO: 3432 - DNA, 556 bp, Zea mays
  unsure (1)..(556): unsure at all n locations
  Clone ID: TF_ZmC8939_3
gagaaaaaaataancgatatgatcatgatgggtgaaatatccgctaataattatggaaataaggcccattggcatgtaccaatattagctatgacggcagatgtaatccaagcgacttttgaaaaatgtatgcagtgtggaatggatggatatgtgtcaaagccatttgaagaacagcagctctactttgctgttgctcatttcttagagactgatgaaacagaataacaaatccaacttcgtaggagattgatttgccgcaacactgtttcaacatctgccaaaagaccatctgttcaacaggttctgaaaaacagcgatcggcagcatatttggtgatttcctctacatgctttttaagagcaagctaatgcaattaaatatttccccatgcagttctacaagcttatgcatttacattctttgtggagcgataaaactttgcttgtatacttgtctgccaaatatctactataacatcttgttatcaagaaagaaacctattgtaacattgacttgcctagctctgaatgcagatgaagcatcaatattttgg

SEQ ID NO: 3433 - DNA, 3621 bp, Zea mays
  Clone ID: TF_ZmC2028_1
gaaaccaggggaaggcgcagcggtttgccggcagacgggcgggcccaggccgaggaaacaggcaggtgcatccatccagagccacgccggcgaaacgcggcgaacagatacgagcacgcgagagtggtgcagcgaggttgaagcaacgacccgcatccggccagcccccgagctgcgctgctctgctcttgctctcgttcgtcccactcctttcttcccaccgaggggagagacaaccccctggctcctgcctgctcgacggacccaaagcatcgcctcctcttcctacccctctcctcaatcggctcgtccggtcgtcgcttagcgccctccacccgccagccaccccactgcgacgccgcgttctccccttcttccgacgtcgctgtctctctctcagcccagctccaggggcgaggctgtgaaagaagagggaggaaagggagaaaaaaagaccctcttttcttccgtcggcaggcctcgtgaccatggatccgccgcccgccgggctctcgacgctgccgaggtctgctggagatccgtagccagcccacgtgtagacggttatggtgctagtaccggtgccaacgctgtgtttcttggcgggcgttgctgctcctcctccgcttgaggattgctgctgcatccggcaggagggatggtcggaggcggaaggagcgtcggcacccgcagcgtggaatcgacgacgggcgcctccagtcggttcagaaatgcgcaaatgcgcgtctgaatgaagcctggttggaggtggtagagccgatggtggtgggaacggcactgctgcgcggggtttcctccgcgtggatcctcctgttcctctcctccctgctcctctcgccgtcagcggcgtctgtcgatttcggccactgcggcggctgcgacgacgccgacgacggcgccctctccagcacctataacatcctgcaatgccagaaggtcagcgacttcctcatcgccgcggcctacttctccatcccgctcgagctgctctacttcgccacctgctccgacctcttccccctcaaatggatcgtgctgcagttcggcgccttcatcgtgctctgcggcctcacgcacctcatcactgtgttcacctacgagccgcactccttccacctcgtactcgcccttaccgtcgccaagttcctgacggcactggtctccttcgcgacggccatcaccctgctgacgctgataccacagctcctgagggtgaaggtcagggaaaacttcctgatgaacaaggcgcgtgagctggaccgggaggtggggaggatgaaaaggaaagaagaggcgagctggcatgtgcgcatgctcacacaggagatccgcaagtcgctcgacagacataccatcttgtacaccaccatggttgagctctcgaaggcactggaactgcagaattgtgctgtctggatgcctgatgagaccaggagcacgatgatcttaacacatcagctgagggaaagggatataatggacccacagaaacactcgattcctattgatgatccggatgttcaagaaataaaggcaaccaaggatgcaaaagttcttggcccagattcggcgctaggggtttctagccgaagcaagcatgaagcagggcctgtggctgcaataaggatgccgatgttaagggtgtcaaatttcaaaggagggactccggaagtgatgcagacgagctatgctatcttggttctggttttgcctaatgatggttcattagggtggggtcgaagagagttggagattgttgaggtagttgctgaccaagttgcagtcgctctgtcacatgctgcactcctagaggagtctcagctgatgcgagagaagcttgccgagcagcatagggacttgctgcaggcaaaggatgaagccatgagggcaggggacgctaggaattccttccagactgcaatgtacgatggaatgcgaaggccaatgcactcaatccttggtctcgtctcaatgatgcaacaggagagcatgaatccagagcaaaggcttgtgatggatgccattgccaagacaagcagtgttgcatccacactgatgaacgatgtgatgcaaacatcgacaatgaactgtgagcacttgtctttggtcaggaggccgttcaaccttcattccttcattaaagaagttgttggagtggtcagatgtctaactggttgcaagggtgtggagtttgagtttcaagtggagaattctttgccagaaaggatcattggtgatgagaagagagtcttccatattgtcctgcacatggtaggcactctaacagaccgatgtaatgctggctgtatctcattatatgtaaatgtccataatgaggttgaagataggcataatcatgactggatgctgcgaagagcaaacttctctgggggctatgtatgtgtgaaatttgagattaggattagaaaatcaaagggctatctgttgagttcatcaagcagtcagataagtcagggatccaaacccaacaattctgagatggggcttagcttcaatatgtgcaagaagattgtgcagatgatgaatggcaatatttggtcagtatcagattctaaaagcatcggagaaactatcatgctagtcctccagttccagttggaacctgtgactccggtctctggagcgtcctcagatttgtacagatcatccgcaattcccaactttaatgggctcagagtcctccttgcggacagcgactgcaccaaccgagctgtaactcacaggctcctagagaagcttggttgccgagtcctttcggtcgcttctggcgtccaatgcatcagctccttcgctgcggagtcgtccttccagctggtggttcttgatcttgacatgcagacgatggatggattcgaagtagcccgcgcgatcaggaagttcagtagcaatagttggctgccgttgattattgccctagcagcaagaatcgacgacaacatccgggatcgttgccagaggtcaggagtaaatggcctgatccagaaaccggtcacattagccgcgctgggagatgaactgtatagagtccttcagaacaattaaaagagcctgacggttctcatttctttcaatctcaatagattgctatagcttgatcggtaactaatttctgccaggttagctccatacaatcacaaaaaaaaacattttgaggcaaaagggaaatgtataggaagctgaaagcatcgctttctgcttggttcctcggtgaaggaggaggaggacgactacgacaggaaggtacaaaaaacttggagagatcatactgttagaacttagacccattcatctgtaaaccctcagataagcaaagaattagattcatgcactaacactaaccacgatataattagtttggacgaaaaaaaaaaaaaaaaaaaaaacatcgacgatccatagatgggttcagtgaatgctggcatagtagatgcctaaagggggcaaggaacttttgttatcggttagacatgctgaaaagcaggccggatgagattgcggacaggaaggcagctgatacggccgatgctgaccttgtatcttgttgaagattaaatactatggtagtagtacttgcagtct

SEQ ID NO: 3434 - DNA, 3314 bp, Zea mays
  Clone ID: TF_ZmC2028_2
atcgcctactcttcctactcagctccgtctggtccggtcgtcgcgtagcgccctcacccccaagccacccccaccacgaaggccgcgcgctccccgccttccgacgtcgctctctccgcccagctcaagcgcccagcggtgagggaagggaaggaaaaacagacctttttttttcttctcctcggcggcctcgtgactatggatccgccgggctccggtctcccgccggtgccgaggtttcctggctcgatccgtgaccggcccacgtggagacggtgctggtgctagtaccggtgcctccaccgtgtttcttggcgaccttactacctccttctctcctcctctggaagattgctgctgcagcctgcaggaaagatggccgaacgccgaaggagcgtcggcgcgtgcagtgtggaatcgacgccgagcgcctccagtcggtgcaggaatgcgcaaatgcacgtctgaatgaagcctggttggtggtagagccgatggtggtgggaacggcgccgtgcggggtctccgtctcctccgtgtggatcctcctgctcctttcctccctgctcctctcgccgtcggcggcgtccgtcgatttcggccactgcggcggctgcgacgacgccgacgacggcgccctctcgagcacctacaacatcctgcaatgccagaaggtcagcgacttcctcatcgccgcggcctacttctccatcccgctcgagctgctctacttcgccacctgctccgaccttttccccctcaaatggatcgtgctgcagttcggcgccttcatcgtgctctgcggcctcacgcacctcatcactgtgttcacctacgagccgcactccttccacctcgtactcgcccttaccgtcgccaagttcctgacggcactggtctccttcgcgacggccatcaccctgctgacgctgataccacagctcctgagggtgaaggtcagggaaaacttcctgatgaacaaggcgcgtgagctggaccgggaggtggggaggatgaaaaggaaagaagaggcgagctggcatgtgcgcatgctcacacaggagatccgcaagtcgctcgacagacataccatcttgtacaccaccatggttgagctctcgaaggcactggaactgcagaattgtgctgtctggatgcctgatgagaccaggagcacgatgatcttaacacatcagctgagggaaagggatataatggacccacagaaacactcgattcctattgatgatccggatgttcaagaaataaaggcaaccaaggatgcaaaagttcttggcccagattcggcgctaggggtttctagccgaagcaagcatgaagcagggcctgtggctgcaataaggatgccgatgttaagggtgtcaaatttcaaaggagggactccggaagtgatgcagacgagctatgctatcttggttctggttttgcctaatgatggttcattagggtggggtcgaagagagttggagattgttgaggtagttgctgaccaagttgcagtcgctctgtcacatgctgcactcctagaggagtctcagctgatgcgagagaagcttgccgagcagcatagggacttgctgcaggcaaaggatgaagccatgagggcaggggacgctaggaattccttccagactgcaatgtacgatggaatgcgaaggccaatgcactcaatccttggtctcgtctcaatgatgcaacaggagagcatgaatccagagcaaaggcttgtgatggatgccattgccaagacaagcagtgttgcatccacactgatgaacgatgtgatgcaaacatcgacaatgaactgtgagcacttgtctttggtcaggaggccgttcaaccttcattccttcattaaagaagttgttggagtggtcagatgtctaactggttgcaagggtgtggagtttgagtttcaagtggagaattctttgccagaaaggatcattggtgatgagaagagagtcttccatattgtcctgcacatggtaggcactctaacagaccgatgtaatgctggctgtatctcattatatgtaaatgtccataatgaggttgaagataggcataatcatgactggatgctgcgaagagcaaacttctctgggggctatgtatgtgtgaaatttgagattaggattagaaaatcaaagggctatctgttgagttcatcaagcagtcagataagtcagggatccaaacccaacaattctgagatggggcttagcttcaatatgtgcaagaagattgtgcaggtaaatcaaaataatagaatatcttaagcatttatacccgcaaatttttttgtacagctaggcactagcagcttagacttggccgtcacatagatagtttgctatacaccaattgaactgccaaactacagaatgtgtttagtggctatagtgtggcctttttgtgcaagtgcttggaatatttattatctcacctcaaactgggcatactgagaggacatattggtccttatgttgaacttacgttttagtcataactatttttatggtatttcttccgtagtatgtgtgacttgcatagatatatttaattggtatgcttgtagtagcccgaacctcagcgactctatttgattgttatgttttggtttgcaatttgttcatccagttgtggaagtggccaatgtatacttgatttgatgtgcaatcattagtgtgcttactgatacgagccctcctttgtgctgcagatgatgaatggcaatatttggtcagtatcagattctaaaagcatcggagaaactatcatgctagtcctccagttccagttggaacctgtgactccggtctctggagcgtcctcagatttgtacagatcatccgcaattcccaactttaatgggctcagagtcctccttgcggacagcgactgcaccaaccgagctgtaactcacaggctcctagagaagcttggttgccgagtcctttcggtcgcttctggcgtccaatgcatcagctccttcgctgcggagtcgtccttccagctggtggttcttgatcttgacatgcagacgatggatggattcgaagtagcccgcgcgatcaggaagttcagtagcaatagttggctgccgttgattattgccctagcagcaagaatcgacgacaacatccgggatcgttgccagaggtcaggagtaaatggcctgatccagaaaccggtcacattagccgcgctgggagatgaactgtatagagtccttcagaacaattaaaagagcctgacggttctcatttctttcaaaaaaaaaaaaaaaa

SEQ ID NO: 3435 - DNA, 981 bp, Zea mays
  Clone ID: TF_ZmC745_2
catcacacagtcaagcaacgagagacgcgacaactcaggttcccttcatgggttgctccttggcaagaacatattggtggttgatgacaacaaggtaaatcttagagtggctgctggcacattaaagaaattcggagcgaaggtggagtgcgtggagagtgggaaagatgctctcgccagcctacaagttccacataagttccatctttgtctcatggacattcagatgcccgaaatggatgggttcgaggccaccaagcaaataagggcaatggaggcgaaggcaaatgagcaggcagtcgcctgtgatgattcagaaacagatggcgcgacaagggcggcgagatggcacctgcctgtccttgcaatgaccgccgatgtcatccaggccacccatgaggagtgcacgaagtacgggatggacgggtacgtcacgaagcccttcgaggagaagcagctcttccaggcgctgcagaagttcttggaccctggcatgtccagctaacacccaagtgctgcgtttgttgcaagtgaggcaccattctcctccgttctgtagttcgctaaccatggacgcaatctgaccccgaagaaagatcgtatatcgcgggctgctcgtcgaccatgccagcggggggaacagcaggcagcacgcagcaggggggctttgctgcctgcctgtgcagtgcaggcgtcttgtaaatgtattgtattagcagggatcctgtttatagcgctagtatgggcctgcgcgacaatgttggagctgcctgcggctgatgcacgtcgagcataattttgttgtacagcttccaccatttttgtgctactgtggcaggcatgctcgcaggtgcagtgcaggactggaaggaaaacctgactgcctgagagtagtgtttttttttggccgtcaacattgcattgggattcatgatgtattacaatcagctaatgtgcgatataagctcatgtaattggctc

SEQ ID NO: 3436 - DNA, 419 bp, Zea mays
  Clone ID: TF_uC-zmroteosinte077a02a1
ggtgctgatttttatacgggtgcggttgccatggcatgaattatataatctgggcataccagccacacatgttacagcaggaagaagaaaaaagaaactagggctaggggaaaatgaactcccaagaaactagagaagtcaagaacttactctcaagaacatgggatctctgacagaattctttcagcctcgatgggtgaaccccgatatcctccactattttacactccatataagcctacctactgaacttggtcttgatttaggaaaaagcgagctacttctctgtacaattgctcgccctcgaatggcttggaaacataaccatccatttcagatttcaagcattgttcatgtgtcgcctggataacatctgctgtcatggctaatattggagttcgccactgccgaacccctac

SEQ ID NO: 3437 - DNA, 2987 bp, Zea mays
  unsure (1)..(2987): unsure at all n locations
  Clone ID: TF_ZmC8939_1
ttacgnttcccggtcaacaggtaaaggggccctaacatccccttttaagcttctgaagtccaaccatctcggtgtggtgcttacattcactgtatataaatatgatctgcctccaaatgcaacaccacaggagcgtattcatgctacattgggctatcttggtgcctcatttgatgtcccttctctggttgataaactcctagaacaactcgctagcaaacgaaagatagtagttaatttatatgacaccacaaatcatacctctcctattgaaatgtatggttctgattttactccatctggtgatctgcatattagtagcattgattttggagacccaacacgcaaacatgagatgcattgcagatttaaacatgaaccttcactgccatggtctgcaataataatatcaacagctgtagctataattgttttgcttgttggacatattatttatgcaactctgaactcccttgaaaaggctgaacatgattatagagtaatgagagaacttaaaggacaagctgaagctgcagatatagcaaaatctcagtttctagcaactgtttcccatgagattcggactccaatgaatggtgttttaggtatgctgcagatgctaatggacactgaacttgatacaactcagcaggattttgtagtcaccgctcaagaaagtggaaaggtattaataaacttaataaatgaagtccttgatctggctaagatagagtcaggaaggattgagctggaagcagtgccttttgatgtccgtgatattcttgacaatgtgatatctcttttctacgataaatcacaagctaaaggcatagagttggccgtgcttgtatctgaccaagttcctgatgtcctaattggggatccatggcggttccggcagatcattacgaaccttgtggggaattctatgaagtttactgaacagggccacatctttgttcaagtccatttggtcaaggaactaaacaggaaaggaaacaatttttgtgatgtttctgctcataacagagaaattctgtatgattctgacaactcgatgctatggaacacactaagcggacttgaagtagcagatagctggaggtccttggagaattttacgatgttcaagaattcaaatggtgaaacagatacaattaggttagctgtcagagttgaagacaccggcataggaataacaaaagatgctcaaatgcgtatttttacacctttcatgcaagctgacagttccacctcacgaacatatggtggaactggaattggcttgagtattacaaaacgtttagttgaattgatgggtggagaaatagggtttactagtaaatcaggagttggtagtacattttcttttactgccattttcaaggagaacagaggatgtcctggagatatgaaaagatactattctgaacctactccgttggattttcaaggaatgagggctcttattattgatggaaggagtgcacgtgcagaggttactatgtaccatcttcgtagacttggaatacagtgcagtcttgttgccacatctgaatctgaatctgcatcttcagctttgatgaaagcctgcacctcaagcaaaaacaatccggacatggtccttgttgatacagaagcttggggtaaaggttcaggtttggcattctatcatcgttttgtagattgtcaactaaagggcgcacacaagttttctcagcccatgccaaagactattcttttgggaagctcaataagccctgttgaatctgattatttaagattgacaggatttggtgattgcataaggaaacccctccgtcttagtactattgttgcctgtcttcgcaaaaccttaggggttggggttacaaggcagcagagtagagaccaatctttggttcttcaaagtgtactaactggaaaacagattctggttgtggatgataatgcagtcaaccgtaaagttgcagctggttctttgaagaaatatggatctaaagttacatgtgttgatagtgggagtgatgcaattgatatgctcaagccacctcacacatttgatgcttgcttcatggatgttcagatgcccgagatggacgggtttgaagctacaagattaatccggtccatagagaaaaaaataaacgatatgatcatgatgggtgaaatatccgctaataattatggaaataaggcccattggcatgtaccaatattagctatgacggcagatgtaatccaagcgacttttgaaaaatgtatgcagtgtggaatggatggatatgtgtcaaagccatttgaagaacagcagctctactttgctgttgctcatttcttagagactgatgaaacagaataacaaatccaacttcgtaggagattgatttgccgcaacactgtttcaacatctgccaaaagaccatctgttcaacaggttctgaaaaacagcgatcggcagcatatttggaaacaaaatacattggactcccactgaccagaagaaagaagataagatagtagggggtacaaaatgtttggtctggtttccgcagcaattttttttctggccgtgttttctggaaccaatacaacatgaccttgcaacagtggtgtcagttgcttctgtaatgccttatgacaccacgatatttccaaatgctgtgttgtaagtgctttacagacaaaccgaggtccagctttctaaaacattgagttcaatgacatcacttcatccattatttaagaaagcgagggtcttcaaatcaggaggatacaattgtatcaccaagtcaggcacacagtttcaaggtgactttgttctgatctgattgttaatgcaatctgtaaagaggcaactatgagttagggattgtttgatgccttgaatgtcgtatattcatattccatcatttttgtgggcacttgtatatacattgatgattaattgtattgctagataaaaaaaaaaaaaaaaaaaaaaaaaa

SEQ ID NO: 3438 - DNA, 2024 bp, Zea mays
  Clone ID: TF_ZmC131_2
tccacaaacactaattggcgatcctggaagaataaggcaaatcattacaaatcttgttggaaactctataaaattcacagagaagggtcatatctacttgacggttcatgtcgttgaagagattatgcattgtctggaggttgagacgggaactcagtatacaaataccttaagtggctacccagtggcgaacaggaagcgcagttgggaaaactttcgactttttagtagggaactgaactcatccgagatgccttttgcacccattgcatcagactcaataagcttgatgatatcagttgaagatacgggtgctggaatcccgttcgatgctcaatcccgtgtcttcacccctttcatgcaagtaggtccatccatcgctcgcatacacgggggcactggcattggattaagcatcagcaaatgcttggttggcctcatgaagggagagatcggatttgcaagtaaaccccaagttggttctactttcaccttcactgcagtgcttacgagagtccattccagtagaaatgagaataaatcatcagaatttaaagagatcaatgcattggtggtagatcatagaccggtccgtgccaaggttactaagtatcatttgcagagactgggagttcagactgaattgacaactgacctagatcagtatatttctaaaaataattgtggatcacagattgcaaagcttgtgctcattgacaaagaaacctggctgaaagaatcccactccatgcctcttttggttactaaattgaggaacaaagatcagccagactctacaaagttatttcttttggagaaccctaaaagttctgtcaagagcaattcacatatattcagggaatataacttgaatgtaattatgaagccacttcgtgcaagcatgcttcaggtttcgctacaaagagcattgggtgggatagataaactgcattgcaggaatggagtagtcggaaattcaacactgggcagccttcttcacaagaagcgaatcatagtggttgatgataatattgtaaatctcaaggttgctgcaggcgctctaaagaaatatggcgcggaagtaacttgtgctgacagtgggaaggaagcaatcacactgctgaaacctcctcacaattttgatgcttgtttcatggacatacagatgcctgaaatggatggatttgaagccacaaaaaggattagagtgatggaaagagatctaaatgagcaaatagaatgtggagaagccccaccagaatgcgtaggggttcggcagtggcgaactccaatattagccatgacagcagatgttatccaggcgacacatgaacaatgcttgaaatctgaaatggatggttatgtttccaagccattcgagggcgagcaattgtacagagaagtagctcgctttttcctaaatcaagaccaagttcagtaggtaggcttatatggagtgtaaaatagtggaggatatcggggttcacccatcgaggctgaaagaattctgtcagagatcccatgttcttgagagtggaaaacactttaggctggagatggaaccacccatgttcggttccttggtacatctgaccaaactgcaaaactaaatgtgcaatgtcttgaaatcaaggtgcatgtggagctatttactcgacaatctgaagtcaaggcgtgtgaaaaaaaagcccagctgcattcactaaccgcagatgtcctctgccactataatatagagtagggagagaaattttccttccccggaaggtaccggctgtacatattaggtattggttgtttgtgcaggcatttgttggcattttgttgtgcatcgtcttcggtctgtattgtttgggtcgaagctgtaaaatgtaaatggcattttcaaagatggaagttttgtttgacaaatacatcggtcgtcatccgaccgatgtatttgtcaaacaaaacttccatctttgaaaacgccatttacattttacagatggaagttttgtttgacaaatacatcggtcgtcatc

SEQ ID NO: 3439 - DNA, 1761 bp, Zea mays
  Clone ID: TF_ZmC779_1
gctccttcgcagagagtcccggggactgccgggctgcaggctgggtggcctccctgtcttggccggggcactgccagaggattaccgggggcctccggcccttcgcggtgcctcagggacttgccggctagcgccgagcaggcggggaagctgggtgggccagggctgggccgtgcaatctcctaccagttcgttggctggatggcggggcctctgactgtcgcctccggggggcgcggacgttctgcatctgcccttgtgcccccccctgtaagccctggagctgcggaccctggtcttgagccccccgttgggctccgtggcctgtccctgtccgcaaacagtgatatagaaggttctttcttttttaagccacaaatgcgggcttcccttctgtctcctggtgtttcaataatgaacaacacaaagttattcagtaccaagcttatgtgctatgacccgcctgacataccagatgaccgcaaattgtcctgaaataatttcccttagacaagacgaaattttacaaatacttctactactcaacaaccgaatggtgctagtgttaggagcacagctgaagaagaacatgataatgcaatggtccttgaactgaatagtcaagctgaacgggtttccagttcccgaggagatttggtatccgtttcaggtgctgctccatgcaaagttcctgaagaacaatcactccacaagaaatcaaaatgttctccaaccagcaacaaagcaaagatcctcctagttgaagataacaaggtcaacataatagtggcaaaatcaatgtcgcagcagctgggccatggaatagatatcgtaaataatgggatgcaagcaatccgtgcagtacagcagcatcaatatgatcttattctgatggatgttcacatgccagaaatggatggcctgcaagccactaaacttatccggtcttttgagaataccggctgttgggatgtttctgtaaagcctgaagataatccgatgataactgactcagctatttcatcagattctgcacatgcaaaaaagcaagggcagagggttcctataatcgcgatgacagcgaattcattcgcagagagtgccgaggaatgccttgctgcaggcatggattcctacatatctaagccggtgaacttccagaatataaacgagtgcctgcagcggtacttggtgtctcagtgactaaccgactattgtaaagtagaaaggtaatctgtgtaggccaggaaagttttgtggaatcacctacgagttcgtttgctgtaaatcgatgcgtaataaattctagcgtatcctgccttgtcgaccattttaccttcaccttctgggagacagagacatactgaatctgacctaaccccaccagtaagatcaagagctaactctgaactttaggatcccatttggttacgaggcatatccctgtatataattgtcacggaggttcttatcctttagcagttagtcttctatctgtatcgtaattgatgagcaacatcggttttatgatgatgtgatggagaagcaaaggtgtaatacagcaataagtgtacatgtattgctggaacatttatagatcaaacctgccatctttttcggtgcaaaatattctaataatccacgttcaaagatttcaaagttaaaaaaaaaaaaaaaaaaaaaaaaaaaaaaaaaaaaaaaaaaaaaaaaaaaaaaaaaaaaaaaaaaacaaaaagggggagaaaaaaaaaaaattctggg

SEQ ID NO: 3440 - DNA, 3903 bp, Zea mays
  Clone ID: TF_ZmC887_1
ccggccgggtatccgcgaggatccccccacaccttgcgacgctgcgttgtcacccacccataaggttggggccgccagcaggctcagacgttcctgttcttgattaaacgagagaaggatggcggcagggtctcagggaggtggcctagtctccgtttggatgatcttgagggaacaaattctgatcaaagtgattcagaccgccggacagttattaatgcccgcgagcagctagtcgtaggcgtaactattttaaggcagctgtcgccgcttggaactttcgagagcttcgcttcttttgataagctgtgcaacaggcgtcgttccgccccgctccctctccaccagctccaagcttcctttaggctcgctgttgctagtgctgccttgctgctagtgataggggtcccggggccctcaagttctgggtgggcggcgagcatatggtgggcactgggcgggggaataaggaggaagagaaagaggaggaggagcggcagtagatttgggccgcacaggcagggatggggggcaagtaccgcgcggcgaggacgaagaggtggtggagggggctggcagcggccgggtgggtgctaaccgcggtggtctgctccgcggtgatgcactggaccctgcgccgggacaccatggaccacgccgtatggatgctcagatgcaagtgatggacgggtttgaggcagccgcaggaacaaggcaaatggagttgaaagcgaacgaggaaaggaagaacaagttggctccgattgaaggcccgacaactgccgagtaccatctgcctgttctggcaatgacagccgatgttatccaggcaacttacgaagagtgcataaaatcgggaatggatggatacgtatctaaacccttcgacgaggagcagctataccaagcagtctccagattggtagtgggaacgacagattcggctgtttgatgttcaaaatacgatggaccggacttctcattcatcgatcgaagtgaagcatcaccatcttgcctctgtccagctgactctatcccttgacaatgggcctgacatggcctctcacaagactagatgaaaaaaaaagaagatgaaagtgccgtgagttagctacgtgtcacacatgacatgaagttgctgcggcagcccagaggagtgtaggtagatcaccctgtaactctcttgttctttgatgtttataggctgttgtgtcttctgacaattcattggaaataccacaactagttgcgctcgaaataaggatatagaagtaactggctatgatgtcacaaatgcttcagatgctatggttttgtatggaccttcaagtttggacgagcaagtgcctttcttgcatgttagcatgttggattttggagatccatttaggaagcatgaaatgagatgcaggtatagacaaaaacttcctatgccgtggtctgccataaccaatcctttgggcacatttgtcatatggatgcttcttgggtatagcattgctgctgcatattctcgatatgacaaagttactgaagattgcagaaagatggaagagctaaaaacgcaggcagaagctgctgatgttgcaaaatctcagttcctggcaactgtgtcacatgagatcagaacacctatgaatggcgtccttggaatgctggatatgcttttaggaacagatctaactatgacacagaaggattatgctcaaactgctcaaatgtgtggcagagcattgattacactgataaatgatgtccttgatcgagcaaagattgaggctggaaagttagagcttgaagcggtgccttttgacctgcgttctctcatggatgatgttgtttccttgttttcttcaaagtcacgggagaagtgcattgagcttgccgtatttgtatgtgacaatgttccgaaggttgttattggagatccttggaggtttcgacagatactgacaaatttggtcgggaatgcagtcaaattcacagaacgaggtcatgtatttgtgcgggtgtgtttggctgaaaactcaaatatggaagccaatcaggtcctacatggagccatgaatggcaaaggtggtagagttgagtcaacagctaatggtgccttcaatactttgagtgggtttgaagcagcagacagacgaaatagttggcaatattttaaactgctcctctctgataaggagtcgcttttggatgatcttgagggcgaaaactctaatcaaagtgattcagatcgtgtcacactagcaataagtattgaggacacaggtgtcgggataccactgcaagcacaagatcgtgtttttacaccgtttatgcaggctgacagttcaacttcaaggaattatggcggtactggcatcggtttaagcatcagcaagtgtctagctgaacttatgggtgggcagataagtttcaccagccatccttctgttggaagcacgttcactttctcagccacactgaagcactcatacaaagatatttcgggtgattcaagtaggagcttgacagaggcactaccaactgcttttaagggaatgaaggccatcttggtagatgggagacctgtacgtagtgctgttacaagatatcacctcaagaggttgggaatacttcttcaagttgtgaacaatatgaacgcagtagtaaaagctttcccaggacaaaatggagcagccggttctagggaaaaagcatcaattctttttattgagagtgacttctggaggcctgagacagatgttcagttattgaaccatctacgcgagcagaagaacggtcagttgtcggatgggcacaaggtagttcttttggtcacctctgaagccgacaaggacaaatatggatccatatttgatattgtgatgtgtaagcctataagggcaagcacaattgcttcatctattcaacaactgctcaaagtagagatagccgaaagaaaagataatcaaaaccggccgtcgtttcttcgaagcttgctggttgggaagaatatattggtcgtagacgataataaagtcaacctcagagttgctgcggctgcactcaagaagtatggtgctaatgttagctgtgttgaaagcggcaaggatgctatcagtctacttcaacccccgcatcgcttcgatgcatgttttatggatgttcagatgccagagatggacgggtttgaggcaaccggacaaataaggcaaatggagttgaaagcgaacgaggaaaggaagaacaagttggctccgatcgaaggcgcgacaactgccgagtaccatctgcctgttctggcaatgacagccgatgttatccaggcaacttacgaagagtgcataaaatcgggaatggatggatacgtatctaaacccttcgacgaggagcagctataccaagcagtctccagattggtagtgggaacgacagattcggctgtttgatgttcaaaatacgatggacctgacttctcattcatcgatcgaagtgaagcatcaccatcttgcctctgtccagctgactctatcccttgacaatgggcctgacatggcctctcacaagactagatgaaaaaaaaagaagatgaaagtgccgtgagttaggtacgtgtcacacatgacatgaagttgctgcggcagcccagaggagtgtaggtagatcaccctgtaactctcttgttctttgatgtttataggctgttgtgtcttctgacaattcattggaaataccacatctcgttgcaatcccctagtttcagaaaaaaaaaaaaaaaaaagcggccctgccttgttgtctcatccacatgatccagaaaactgtttcttccagcgccaagaaaaacacgggtaatggcctgtagacctacttcagtattggtatatgctaatggatactaatcagtctcttgac

SEQ ID NO: 3441 - DNA, 1025 bp, Zea mays
  Clone ID: TF_ZmC339_1
cattggctccctcgcgtccggccggggctgcagcctgactgtctgttttcagcacccgcaccacctgactgtctgttcgcagcacccggacctgtgtcaatggccgctgcagccgccgctccagcatctgtggcgccgtcctcgcccaaggccgccggcgacaacaggaagacggtggtgtccgtggacgcgtcggagctggagaagcacgtcctagcggtggacgacagctctgtggaccgtgccgtgatcgccaggatcctgcgtggctccaggtacaaggtgaccgccgtggagtcagcgacgcgcgcgctggagctgctcgcgctaggcctgctccccgacgtcagcatgatcatcaccgactactggatgcccgggatgactgggtacgagctgctcaaacgcgtcaaggagtcggcggcgctcagaggcatccccgtcgtcatcatgtcatcggagaacgtgtccacccgtatcacccgctgcctggaggagggcgccgagggcttcctcctcaagcccgtccgccccgccgacgtctcccgcctctgcagccggatccggtgactgcgtgtggtgctatgttaggagctaggatcctcaaccaaaaaaaaaaagattcctcttctttctttctttctctcctgcttggacatagatcttcaaacaaggagctaacatttggggggagactttttagctttagggatctcaacaagttgttcggaacgggggggatggagcacagcgttggctgttcttttctccattcctcttaataacatcaggtgtcaatgtcatgcacgatctccttcctccccatgaccatttcatccagtgacctcatatgatcctgctgccgaggatgtcagtgtagtaggttgtgcgaatccaatcggaccagagattgttattcctcttaaaaaagctgttgttgtgtaatgcgactagtacggtggtgtaattgcaaatcgatttattattattatatattacaaatataaattactagtagagaggcg

SEQ ID NO: 3442 - DNA, 2699 bp, Zea mays
  Clone ID: TF_ZmC4195_2
cactttttgcctttttcggaggccacgggtcaccgctaacctccatccatccatttgccgattcacctacacagcaggaacaaacgaggagccctccaaggatatgcgccccgccgcttatacattaaccaaagacttgcctccaatcaatcccaccactcgtgtctacctcttcgagttgcgaggatgcctgcgaatgaccaccatcccaacggcctgctccaggagtcagcccctggactccagcatgatgatatggaaaaccagcagcagcaagtctgctgggagcgcttcctcctaaaggacactctcaacgtcttgctcgtggagagtgatgcttcaaccaggcaggttgtcagtgccctgcttcgttgctgcatgtaccaagttatctctgccaaaaatggccagcaagcatggagttatcttgaagataagggaaacaacatagatcttgttttgactgaggtttttatgcccggtgtatctgggatttctctgctgaataggatcatgagacacagtgttttcaagaatattccagtgattatgatgtcttcgagtgatgatatgagtacagtctttaaatgtctgtcaaaaggtgctgttgactttttggtcaagcctatacgtaagaatgaacttaagaacctttggcagcatgtatggagacaacggtgtcacagctccagtggtagtggaagtgaaagtggcattcagacccagaagtgtgccaaatcaaaaggtgtcaatgaatccggtaacaacagtggtagcaacgatgacgaagcaggcatgggacttaatgcaagggatgacagtgataatggcagtggcactcaagcacagaacttgtggactaagcttgctgtggagatcgacagtccacaagctacgtctctggatcagttagccgatccacccaatagtacctgtgcgcaagtaatccactcaaagtcagagatatgtagcaacagatggctaccagataagagcaacagaaactgcaagaagccaaaaaacactaatgatgactttaagggaaaggacctggagataggtggccctgaaaatttatatatgggtcaccaatcttccccaaatgggagatccatcaaagcagcagaccatgaaaacaattcaaaggaatcaatgatggaaaatttagaggagccaactgttcgagctgctgacctaattggttcaatggccaaaaacatggatacccaacaggcagcaagagctgcagaagatacccctaatttctcttccaaagtgccagaagggaaaggtaagaataaccagaatgataagtatgttttgccatcacttgagctgagtttaaagaggtcgagatcatgtggagatggtgccaacaacaaaaatacagtcaaagacgacgaacaacggaattgtgtattaagacgatcaaatctgtcggcttttacaaggtaccacacatctgcggcttccaatcaaggtgggacaggattggtaggtagctgttcgccgcatgataacagctcggaggctgtgaaaacggattctacctacaacatgaagtcaaattcagatgctgccccgataaaacaaggctccaacggcagtagcaatgacaatgacatgggttccactacgaaggatgttgtgacaaaacccatgttgccctctgctattaaggctaatggatacacatcagcgttccatcctgtgcagcagtggatggttccagctaatgcaacagcagggaaaacgaaggctgatgaaaatacagccagaaatcactacgtccattttgagaatggtgggtcaggagccctgcaatgtggttcctccaacgtatttgatcccccacttgaaggccaagctaccaataactatggtggtgtgaaagccgggagcaactcaggcagcaacaaggggcagaacaatgggagtacggctgctgcaaatgctggactggcagaaacggagatacaggccatggacaaaagtggagttggaggtggcaatggcaatgggagtggcagtggcagtggcaatgacacatatgtcagacggcttgctgcgaacatgacaccgcgacaagcacagctaaagaaatatagagagaaaaagaaagaccggaactttgggaagaaggtgcggtaccagagcagaaagaggctagccgaccagcggccacgggttcgtggacagttcgtcaagcaagctgtgcaaaatcaggacggagctagagagagatgaccgacatcccccctcccctgtggctgtgctgctctctggcttcagctccctactgactccgactccacctctgctggcatgcatggttgccgctttggactcaaaacacttgacagttagacgtgcggttgatgattcttccttctctcgtggtgtggactgatatggtcaacaacacagcctccttccttttcatcattggtttcttcacatctagaatctactgcctgaccgggaaagaataaacaaggaacttcttcttctatacatgtgtatgtatgtatgcattcctaagcatgtaatgtagaagaataagtgcgtggcttgactctagatggactttaattttagacagagtcttgctcgctctcctacatcatctagtgtaactaaagtgttgtcatgtatggtcttggatcactgtctatcaatatattatatcgtggcgttcc

SEQ ID NO: 3443 - DNA, 901 bp, Zea mays
  Clone ID: TF_ZmC887_2
gtgcaagcctataagggcaagcatgattgcttcatctattcagcaactgctcaaagtagagatgcctgaaagaagagataatcagaatcggccatcatttcttcgcagcctgctggttgggaagaatatattggtagtagatgataataaagtcaatcttagagtcgctgcagctgcactcaaaaagtacggtgctaatgttagctgtgttgagagtggcaaagatgctatcagtctacttcaacccccacattgctttgacgcatgttttatggatgttcagatgccagagatggatgggtttgaggcaacaagacaaataaggcaaacagagatgagagttaacgaggaaaggaagaataagttggtgttgattgaaggctcaacatttgttgagtaccatttgcctgttttggcgatgacagccgatgttatccaggcaacttacgagaagtgtataaaatcgggaatggatggatacgtgtctaaacccttcgacgaggagcagctataccaagcagtctccagattaatagtgggaacgacagattcgactgtttaatatttagatggctatgaatctgatttctcattcatcgaattgaagcacaccaccatgttgcttctgtccaagcttgactctaacccttgacaattgtctgacctggcctctcgcagcactagatgaaaaggatgaaagtgccacgagttggctatgtatcagcaccacagatgaagttgcctcaccccggagtgtaggttggtagatcactctcttctttgatgtttataggttgttgtatatcttctgacaattcattggaaaccacatctcgttgcgacattggaggacatcttcaatgctggtaaatttgttataggaatatcctttaatgctggt

SEQ ID NO: 3444 - DNA, 3011 bp, Zea mays
  Clone ID: TF_ZmC4195_1
cactttttgcctttttcggaggccacgggtcaccgctaacctccatccatccatttgccgattcacctacacagcaggaacaaacgaggagccctccaaggatatgcgccccgccgcttatacattaaccaaagacttgcctccaatcaatcccaccactcgtgtctacctcttcgagttgcgaggatgcctgcgaatgaccaccatcccaacggcctgctccaggagtcagcccctggactccagcatgatgatatggaaaaccagcagcagcaagtctgctgggagcgcttcctcctaaaggacactctcaacgtcttgcttgtggagagtgatgattcaaccaggcaggtcgtcagtgccctgcttcgttgctgcatgtaccaagttatctctgccgaaaatggccagcaagcatgggcttatcttgaagataagagaaacaacatagatcttgttttgactgaggtttttatgcccggtgtatctggtatttctctgctgagtagaatcatgagccacaatatttgcaagaacattccagtgattatgatgtcttcgagtgatgctatgagtacagtctttaaatgtttgtcaaaaggtgctgttgactttttagtcaagcctatacgtaagaatgaacttaagaaccagtggcagcataattgaagacaacatcgtcacattctctcttgcgtgttcgagaaaaaaaaaatgttttcttatttggaacacagtcttgaggtagtggaagaaaaagtggcaatcagacgatgcagttctctcttaattatattaatagctaaaaatgttctcacagtggaagcccggtggaagaagctagtaagagacccaatgcaagtaacgagtgtgagagtattaataataatcaacagacgaactcattatgaaattacgtagtgcagatcgactgtccacaagctatatctctggaccagttatccgattcagccactaggaccggtgcaccagtaatccactcaaagtcagagatatgtagccacagatggctaccaggtagcagcaacagaaactgcaagaagcaaaaatacactaatgatgactttaagggaaaagacttggagatagatggtcctggaaatctatatatggatcaccaatcttccccaaatgagagacccatcaaagcagcagatcatgaaaacaattccaaggagtcaatgatgggaaatttaggggatgcaactgttcgagctgctgacctaattggttcaatggccaaaaacatggatgcccaacaggcagcaagagctgcagatacccctaatttctcttctgaagtgccagaagggaaaggtaagaatgatgactttaagggaaaggacttggagataggtggccctagaaatttatatatggatcaccaatcttccccaaatgagagacccatcaaagcagcagatcatgaaaacaactccaaggagtcaatgatagaaaatttagaggagccaactgttcgagctgctgacctaattggttcaatggccaaaaacatggatacccaacaggcagcaagagctgcagaagatacccctaatttctcttccaaagtgccagaagggaaaggtaagaatgaccagcatgataattatgttttgccatcacttgagctgagtttgaagaggtcgagatcatgtggagatggtgccaacgatacagtcaatgacgatgaacagcggaatagtgcattaaggcgatcgaatctctcggcttttacaaggtaccatacatctgcggcttccaatcaaggtgggacaggattggtaggtagctgttcgccgcatgataacagctcggaggctgtgaaaacggattctacttacaacatgaagtcaaattcagatgctgccgcaataaaacaaggctccaacggcagtagcaataacaatgacatgggttccactacaaaggatgttgtgacaaaacccagcacaaataacgagagggtgatgttgccctctgctattaaggctaatggatacacgtcaacattccatcctgtgcagcagtggatggttccagataatgcgacagcagggaaagcgaaggctgatgaagtggccaacaatgcaggcagaaatagtcatcctggtgacgtgcagagcaacctgacgcaacaacatcgtccaacccttcattacgtccattttgagaatagtggatcaggtgccctgcaatgtggttcctccaatgtatttgatcccccacttgaaggccaggctaccaataactatggtgtgaaagccgggagcaactcaggcagcaacaaggggcagaataatgggagtacagctggtgcgagcacggctgctgcaaatgctggacggacagatacagagatacgggctatcgataaaagtggacctggaggtggcagtgggagtggcaatgacacatatgtcagacggcttgctgcgagcatgacaccacgacaagaacagctaaagaaatatagagagaaaaagaaagatcggaactttgggaaaaaggtgcggtaccagagcagaaagaggctagccgaccagcggccaagggttcgtggacagttcgtgaagcaagctgtgcaaaatcaagagggagatggagagagatgacccccccccccctctggcttcagctcatggttgttagacgtggcggttgatgattcttccttctctggtgtgatctgatatgatcgacaacacaccatccttccttttcttcattggtttcttcacatctagaatttactgcctgaccgggaaaaaataagctaggaacttctatacatgtgtatgcatttctaatcatgtagaagaataagtgtgtcttgactctagataattttaggtagagtcatgctcgctctcctacattatgtgatgtaactgaagtgttgttgtgttgtcatgtatggtcttggatcactttctgtcaatatattactagcccacaactactattaatttgatgagatgtatataatt

SEQ ID NO: 3445 - DNA, 935 bp, Zea mays
  Clone ID: TF_ZmC131_3
caggcgctctgaagaaatatggcgcagaagtaacttgtgctgatagcgggaagaaagcaatcacgcaactgaaacctcctcacagttttgatgcttgtttcatggacatacagatgcctgaaatggatggatttgaagccacaaaaaggattagagtgatggaaagagatctaaatgagcaaatagaacgtggagaagccccaccggaatgcgcagggctccggcagtggcgaactccaatattagccatgacagcagatgttatccaggcgacgcacgaacagtgcttaaaatctgaaatggacggttatgtatccaagccattcgagggcgagcaattgtacagagaagtagctcgctttttccaaaatcaagaccaagttcagtaggtaggcttatatggaggagtgtaaagtagtggaggatatcgccaacggttcacccgtcgaggccgaaagaattttgtcaaagatctcatcttcttgaaagtgggcatcaattcgcaaagttagagggcccctattaaaacactagaaatgctgggatgtggccgccagttaggtggaaacgatttaggctggagatggaaccacccatgttcggatgcttggtacatctgaccaatctgcaaagctaaatgcgcaatgtcttgaaatcaacatgcacgtgcagctattcattcgacgatttgctgaggtcaaggcgtgtgaaaaaaaatcagctgcattcactaactgcaggtgccctctgccactatataatatataagactagggggagaagttttccttcccccggaaggcacggctgtacatattatattagggattggttggttgtttgtgcaggcatttttgtatgcatcatattcggcctgtatgggtcgaagctgtaaagtgtaaatgacacattcaaagatggaagttttgtttgac

SEQ ID NO: 3446 - DNA, 752 bp, Zea mays
  unsure (1)..(752): unsure at all n locations
  Clone ID: TF_ZmC311956_1
tttggnaccacaaacaccagcctaccctgtagaatatatgggcactcaaatagtaagggaacaaacgagtggtagcctcactgccattgttgtggacgaaaatctatgccatgccagggctgcaagctgcatgcttgccaacctccagtgtaaagtgattgtgtatgcgagtcctgttgatgcgctcaagtttcttaaggatcaccaaagagatactgattttgcgttagtggaagtcaacatgaaagagatgcatggttttcagttccttgacatgtccaggaagttgcacaaaagccttcaagtgatcatgatgtcagctgatacgacatggcccacgatgaagagaagtgtcgagcttggtgcacgtttcttgattaaaaagcctcttgatgcaaatacgatgaataacctgtggcagcatcttgacctaaaatttcaacggaccgacaagatcaaggccttattcccaggttggagctactgtgacatgttttctttttccttttgaaaaacgatgtggcacttgttgaactccgtagacaacagcaaaaggtgtacatcgacttcagttaccgtttcaatcaaatgtttttttttgtcaaatcaccattagtattgtagtccgaaaaaacgcatattactcgctaccttgcatgtgaatcatataggtattgaagggaaaacggggaatgcatttgaggaagggaccaagcagaggggaactcacttgatgtggactccattcctgc

SEQ ID NO: 3447 - DNA, 833 bp, Zea mays
  unsure (1)..(833): unsure at all n locations
  Clone ID: TF_LIB5117-009-Q1-PF1-H11
gccttcaatggatggcctacaagccactaaattgatccgttgctttgaaaatactggctgttgggatgcttctgtaaagcctgaagacaatgagatgatagctaactcagctatttcatctgattgtgtgcaagacaagaaagggaagagagtacctataattgcgatgacagcaaattcattcgcggagagtgctgatgagtgccttgctgcaggcatggattcctacatatctaagccaatgaacttccaaaaaacaaaagagtgcctgcagcgctatttgttgtctcagtaactaaccaattgctgtaaagtgtaggaaggtgatcctggagctgctgcataaagatttggccctgctttttggcgctgcttattcctgctccctgcgagtgctggtgtcactagcagcagtgaaaggggcgtgctgaaggggacctgacaaatgccatggataatgctcctcccctttcttcaggtttggggcaaggataatgctcctcccctttcttcaggtttggggcaaggggtttttcctgggaagtgctggtgcaggagagcagttgagcacaagggctgccgtgagttagaggggccggtgcaccgtactaccaccgaacaggcttgtgggcgacggcgcggtcgctgtcacgcgttgtgctcgatgcccggttcgtcatctcgacggcgaccggtcgtgggaaagagctggtacagatcagcacagncattcctaccggncggcggacggcgaggttcagctgcagtatggcgccaccatcttcttcaggtacaaaaggngggcacaagttgttgatgatgatggcataatg

SEQ ID NO: 3448 - DNA, 632 bp, Zea mays
  unsure (1)..(632): unsure at all n locations
  Clone ID: TF_ZmC353097_2
gggcgctgctgaggtcgcccgtcggcggcgtggagctggacgaggcgaggactggcnccgaggcggtacggcgcgttcgggatggcggtgccgccggcgcctacgacctcatcatcaccgacgggaagatgcccgtcatggacggacgcgaggcgacgcggcagattagggccatgggcgtcacgacgccgatcgtcgggctgtccagcgacaccttcccgtcagacgtcgacgcgttcctcaaggccggggccgacgacttcacgcccaagccactgtccaaggagaagctcgtccgtattcttgccaaattcaatctcgcttagctctctgtttgctgtccaaggagaagctcatccgtattttcttgccaaattggcaaaatacaattcttgcttagctcttcgtttgggtgcaattttttttgaggggataaataaaggctctcgaagaagtattttgctctatgtttcggtgcaaatctcaatgagtggataaataaagggtcttgaaaaatacgggtggcgccttcctcccctatggaccctgggccttatatcagctagtgttatccttctcgcatataattcacacccgctctgtaatctgtacgttggttggtattggcatcc

SEQ ID NO: 3449 - DNA, 334 bp, Zea mays
  Clone ID: TF_LIB3205-080-P1-N1-G10
atgcgggaaatataaagtgctgtgtgaacatattagattgagaaccaggcctagtagaaaagttaagaggaactgaatgagtagcatgtagttcattagctcagaaggtgtttttgggagttcagtactatccataaaacatgggagatgaatcgaatgaaatggtgtatgcctgagggttgctcatacgagcattatgatgcatgagacgcctacgacaggttcgtttgttatgatcaaactccgtttaaccatgaaaactacaaacagagaaggtttaaagaaatgagggaaatgggggcgaaattatgtgaacgaacagataaaaaggtaa

SEQ ID NO: 3450 - DNA, 1015 bp, Zea mays
  Clone ID: TF_ZmC9712_3
atagaatgcaacttccattacttataaaaattctgttgctgtgccaccaacttccattacctgtaataaactgggatcaagggcgcgtgaatgaacacacctctgtttgtcgcatcaatcgcaggttccaccagctgcctgaattcgaccagctaaagaagagctgccgcaaacgcctcgcaggccacaacgagcgccggaggaggccgccgcctggaccccttgcgtcacgatacggccgtcacgctgcgtcgctcggcggtaaccaaaagctggtttttaccctgtgatgtcgtctcggcgaccaaagttcccgtcttttttttgtaaccgctaatgttcatgtgcttggtccagaagagcccggcaggctcagaagcttcatgctggatttctcgtacccgagggtctcaagcgccatgaggggtgggtttccggcggtgaggcccggtggtgaaagggtgcctggcggtatccagtggcaagcgggcttggatcctcgtcaccaccaaggcgcggtcgcgggatacggcgcccactatgggagcgagggtggtagctcgtcgtcggcgaggccgccggtgttccctggcccggagctgcccccaggtggatgccttgcaggagtccccgcggactccagctgtgctctctctcttctgtcaactcagccatgggatgctgcccacagccacagccacagccacgctgcgccaacagcgggtttcgacggcggcagccctgtggcgccctccctcatggcggcgagtagctacatcgcgccgagcccctggaccgagaccgactcctggggccacgaaggcgggcggagcgtgcctcagctgccacctgacgacgtccccctcggcgaggtgcactccggctcgagcagccaccacggccagttctcaggtgagctcgagctcgccctgcagggaaacaggccagcgccagggtcggcggcaccgccagcgccgcgcaataatcagggctccgcgggcacgttcgaccaggc

SEQ ID NO: 3451 - DNA, 1063 bp, Zea mays
  Clone ID: TF_ZmC14746_1
tcgacgccgacaagcgcagctgcagaaagcgtctggacgggcacaatcgccgccgcaggaagccacagccagacaccatggcttctgctagctttatcgcaagccagcaaggcacgcgattctcaccatttgcgcatccaagactggaggcgagctggccgccgggggtgatgaaaaccgaggagagtccatatcacatcactcaccaaatccctctgggctccagcagcagcagcaggcagcagcatttcgtggctctgggagccgccacgcctgcctacgccaaggaaggccggcgcttccctttcctgcaggagggcgagataagcttcgccaccggcgtggtgctggagccgccggcggcggctccagcgtgccagccgctcctcaggacgggagcaccatccgagagcagcggcgccggcggcagtaagatgttctccgatcaggggctggctcgcgtgctcgactcggactgtgctctctctcttctgtcagcgccggccaactcctccggcatcgacgtcagcaggatggtccgcccgactgaacacgtccccatggcccagcagcccgtggtcccgggcctgcagttcggcagcgcgtcgtggttcccgcgcccccaggcttccacgggcggctccttcgtcccctcctgccccgccgcggtggagggcgagcagcagctgaacgccgtgctgggccccaacgacagcgaggtgagcatgaactacggcgggatgttccacgtcggcggcggcagcggcggcggcgagggctcctcggacggcggcacctcgtcgtcgatgcccttctcgtggcagtagtcgtcgtcacttgtcagcagccgctgcgttctctcatctttcgcgcttcagacgatctggtagggagatactggctttagtgatcactgatcagcattgatttctgttctttttcctgcattcgctttgttgaatcggctctgctcgccagcattcgtgtggacattttttgaacataattctgtgttcgtttccctccgtcgcgaactagaccaacgcgtccgcccacgcgtccg

SEQ ID NO: 3452 - DNA, 578 bp, Zea mays
  Clone ID: TF_cC-zmle189110e02d1
gacccacccgtgcggtatttgccaagttacttttttttggcatctttaatgatgttaggtagctttgaaaatgtgaccagctgagggcagggaccagccactcaagttgtagagcgaagtggacttgtgctagtctatatgatgctcaattattttgcttggctcagactctcatgatatttatgttatttaatcttttctaattaaggtacacaggaacgctagcatgaaatgaatagtgaagaaaaattggcaattccttttgtttctggcactagctgtaatggtgtaggactgcctaagtggagtgttgaactgttgatgcaacatcttgagaaggagaaattgtacacaagcttataactaacatttacactttgatctgttgttgacataatgaagctccatttccctcttttctttaatccttctctggttgtagttttcatggtttagcggagttttgatcagaacaaacgaagctgtcgtaggcgtttgatgcatcataatgcacggaggaggaaacctcaggcagacacaatttcattcaattcatcgacaatgttttatgatacaag

SEQ ID NO: 3453 - DNA, 955 bp, Zea mays
  Clone ID: TF_ZmC200243_1
cggacgcgtgggtgccgccctcgcccgccttcaacaccggcagccgcaccacaaattcctccccacgcgttgccttctccccaccaacggcgcccttccccaacggctgcgaacgctaacgcgcttccccaatcgttgctccttcgaccaggtgcttcggtagaaggacgtcgcctagagccatcccatctctgagcatcgtggtctccccgatgtggatggggaaagaatataggttgcccaatatctacaaagctgaacacaccctatcatctgcaccagcaagcagcctagcagcagtcctcacccatcagcaattcagcatgcatctggaagactacgtgtgtctacgtctgctactgctgccgaggtgtctactctcttaggatcaggggaaaatgattgaaagaatggaaggatctatgaattgtcaatgtcctcagaagaatggataactcatgtgtttcagtgtggacctcatccttttcgattccaccagctacttgaatttgaccaactaaaggagagctaccacagacgtctcataggccacaatgaacgtcgaaggaggccgcctcctggacctcttgtatcacactacggtcgtcttgctgcgttgtttggtggtgacaaaagctaattttaccttatgtcattgaatatcttcatctgatgcatactatgaacatcatgaagtcactaccaggggtgagaatgttcctgccccatttatgatatttgagtccactggatccctagatattctgagagagggatgcttataaaggatttgcgggcttcatacgactttttttgtttttggatgcttatagggaacgacatgacatagaaggcatgtgtaaatttatctcatgcctatattatttataatgatttcctttggcattatatcagcttatttgattgttgttccttttaactgcgaatgctactc

SEQ ID NO: 3454 - DNA, 144 bp, Zea mays
  Clone ID: TF_ZM5059.C4.o2.fg
atgatctaccgggccgacctgagcaagtgtcgcgactaccgccgccgccacaaggtctgcgaggcgcactccaagacgctcgtcgtcgtcgtcgccggccgcgagatgcgcttctgccagcagtgcagcagccttttcatatga

SEQ ID NO: 3455 - DNA, 169 bp, Zea mays
  unsure (1)..(169): unsure at all n locations
  Clone ID: TF_LIB3069-037-Q1-K1-C4
tccacgcgtccggcttcttgctgcaggtttcatctgctcggggagttcgataaggtgaagcggagctgcaggaagcgcctcgatggacacaaccgtcgncgtcggaagccgcagccggaccctctaaaccccgccggcttgtttggcaatcaccacggagtgacaagat

SEQ ID NO: 3456 - DNA, 1018 bp, Zea mays
  Clone ID: TF_ZmC18262_3
gcggcgtccggcgacggctcggacgactccggggcggccaacaacaacggcgcgctgccgctgccgctgccgccgccgcacggggtggaggacaacaacagtcccgcggagctggcgggcgcgggtggcacctcccgggcggtggcgaggagggtcgcggcggccggcgcctccccggcggcggcggcgaggaggggcgccgccttgaacgccgcggcggccggcggcgccgggccgagctgccaggtcgagcggtgcagcgccgacatgggcgtggagaagcggtacaaccggaggcacaaggtgtgcgacgcgcaccgcaaggcgtccgtcgtcctcctggccggcctccgccagcgcttctgccagcaatgcagccggttccacgagctgtcgcacttcgacgacaccaagcgcagctgccgcctgcgcctggcggggcacaacgagcggcgccggaggaaccccgcggaggcgcaggaccagcacggcgggcggggcgacccggggagccaccacctccagatcagataaaaacctactacgtcagcatgctctctctcttctgtcatgcaggacgcacgcacctagcgtcgtcaccgatccatagtccgatatgtgtctcaagtgttgtgtgtgcgcgctctcgccgcctacccctgtcctgcagtgttgcgtagtatatggttctacgacctacacgtactgctgctactactgcgtgctaactttaatctgatggcagtccacagctagctagcacatcacctcctgtaagtaatgtgcttatctatatgtgcaccgaccggaaccggaggcgtgcgtacgctgatctgccacgaagcctactagtagttaaatgtaacgtaacctgcaggcaattaagcagggcgctgctatatatagcgtaattaattgtgcgtatgggtatgggtggttcgattatcggatgtgtaatccctgtacgtggccgggcccgtgccaaacgtacggtgacctgtgcaggctctgtgtgtcg

SEQ ID NO: 3457 - DNA, 487 bp, Zea mays
  Clone ID: TF_ZmC182445_1
gcccgggccacgcgcagcaggcggcgccggcgtgctccgtgcagggctgcgacgccgacctgtcccagtgccgcgactaccaccgccgccacaaggtctgcgtggcgcactccaaggcgcccttcgtcaccgtcgccggccagcagcagcgcttctgccagcagtgcagcaggtttcatctgctcgaggagttcgacgaggtgaagcgaagctgcaggaagcgcctcgacggacacaaccggcgccgccgcaagccgcagccggatcctctcaaccctgctgccggcttgtttggcaatcaccaccatggaggagtgacaaggttcacatcgtacccacaccgcttcaccaaatccatcgcaaagcccgaatgggcggtcgtcaagacggagaccgacgcgttccaagaccagtactaccctgccgtccacctcaacggcgccggcgccggcgccctctttcacgacaaggaccggaagcactttcc

SEQ ID NO: 3458 - DNA, 1188 bp, Zea mays
  Clone ID: TF_ZmC1701_1
gtcaggttgaaggctgcaaggttgatctctcttctgctaaagagtaccatcggaagcacagagtctgtgaacctcattctaaggctcccaaggtggttgttgctggtctggagcggcgcttttgtcaacagtgtagccggttccatggattagctgagtttgaccagaagaagaaaagctgccgcaggcgcctcaatgatcacaatgcccgcagacggaaaccacaacctgaagcactttcttttgggtcatcaaggctgtcggcaatgttctatgacacaagacaacacacaagccttctgtttggtcaaggtccttatggtcaaatgagaagttgtgcaagttcttcatgggataacccaggaggcggcttcaaatttgcagagacaaaaggtccctggttaagagctggtggtgttgatgggttgcatcaatcaagtcagcaggtgtggaacaactttatgccgcatggtgtccatcaagattttgatgggttcacagctttcaaaggaaccaatgcaaaggtccttcatcaaggcgttgaagcttctgcggtcgcctccaaccagaacggagccccacaaccggaccttcatcgtgctctctctcttctgtcaaacagctgggctggtgccggtaccgaccagcacccgacggcccagctgcgccaccacgctgccctgagcagcagcctcgccgccagctccgtctccgtggcgcaggcctcgccagcagggctgtggcaggacggcggcggcggcgcggccctgagccaccacgactatgcccacgcacaggcacggttccaggctatcgacgcgctgggcggcgccggcgccgccgccgccgttgcagcgggtcaggagcttctccagctcccgcgtccgccgtccccgtacgacgacggctcctcgtcccgctacgacctgatgcgctgatccttcttccctttgggcttctggtggagcgcggggtttcgatttttgaacgaactctggatggaactcggagttttgaacgaactgctgtatgcttgctatcaaggtctgctggctcgggctcggacgctcgtgggatcgccagcagctccgtgtgcttgaataaatccacagttttttttgtgtgacgctagctatttatttatttcacttgtgtaatgtgatgcgaggaaaaaaaaaaaaaaaaaaa

SEQ ID NO: 3459 - DNA, 1134 bp, Zea mays
  Clone ID: TF_ZmC18238_6
aactggcgaagaaaacatctgctggtggggtttttcttctccgcgggttgggcccagcaagcctacgccggcagctcctcttaccctcgtcaaactccgcgagtgggtgaaatctactacactgctggcagaagcgctgcgcctggttggcgacgacggccctgatggtcttgctgtgggtctcgcagaccttgtgcctcctgtggtaatccttggcgccggtcagatccgctcggcagtcatccacctggcacatcgggtagcccgcgcctccgttggcagccccgccaccgtcaccgcccgcgctgcccggcgatcctgaccgcacccgcttgctcggcctgaccaccgggtcctgccccgatgcaggcggggacggcgacagcgacgccgcgggaggcgtcgggctggcgtccatcggggtcgtggagtcttcccgcaggccgagctggaggttcagcgcgccgggccccctggcgctgcgcctcagcagccggctggggctggccaccggcgaggcggagcgcatcggaggacggcctggcggtgagcgcgcggctgtcccagtcccacagcctggggttccagttcccagcgccggcctccgcggcgccggccgcgggccacgggtggccgcgcttcttcgcggcggcggcggcgtggggaggcatcggctggatctggtgaaggaagagcggaggggccacctgcggccccacctccctctgcatcgctcctcaaggtctccgggcctcccaactcagccgcggcaaccgatcagggatctctcacgcaagtcttcggcgccagtccacgtcacctcgccgcctccccagccgtccagaaatagggccagagcagaaaatatcccttccctgcccacctgcgtagtgctggaatcggcggaggatgaagaagtgggagtgggagagagagaggaatgtgctgcccgccctgatggtgtggtgcggcgctgggaggaaggcgtgtgtagagagactagagagagaggcagcggggaatcgagcggagaggaggcagcagcgcaaagcgggcgaggaagaggacctcccgcgtgggtaagcgtcctggcgcggcgacggacgggggcctggtggcgcctcgtgccgaatt

SEQ ID NO: 3460 - DNA, 1196 bp, Zea mays
  Clone ID: TF_ZmC735_1
tccgcccacgcgtccgcccacgcgtccggtcaacggtctcgagctacgcttctgccagcagtgcagcaggttccacaacctggccgaatttgaccagcaaaagaaaagctgtcgcaagcgtctagcaggccacaacgaacgccggagacggccacctcctggaccccttgcgtcacgatatggccgtctcgctgcaccgctcggtgaagagcccggcggcaggttcagaagcttcatgctggatttctcatacccaagggttccaagcgccatgagggatgggtttccagcggttcgacctggtggtgaaagggtgcctggcagcaatatccagtggcaagcagcgagcctagatcctcctccccctcaccatcagagcgcggcagcaggatacggtgcccactcgtacgggagcccgggtagctcgtcgtcgtcgaggccaccggtgttccctgctggcccggagctccccccaggcggtggatgtctcgcaggagtccccacggactctagctgtgctctctctcttctgtcaactcagccatgggacgctgctggccacagcgccggccacggccacggccacgccgcgtcactgcccgcaacagcaggcttcgacggcaaccccgtggccatggcgagtagctacatcgcgccgccaagcccctggaccgactcccgggcccacgaaggcgggcggcggaacgtgcctcaactgccacccgacgtccccctcggcgacgtgcactctggcccaggcacccatcacggccagttctcaggtgagctcgagcttgccctgcagggaaacaggccagccccggcgccgcgcaatggccagggctccgcgggcgcgttcgaccaggccggcagcacgacggagtggtcgctctaggaggccaaataaaagcgcggcacatcgtcgtagccgcacagcgagatggagcttgaagcctggctccgctagctacctgcatgcgctgtttgcttgcctagaggctagagcatccagtatgataataagcgaggaactagtgcagtgccggccaggagactgatttcttttgcgcttgtccatgaactcgtctgttgcgtctatgtacacctccatggtttgaactcgtcggggacttcgctcgatgtgttattaatctcatgctcatccttccgctaaaaaaaaaaaaaaaaaaccgatt

SEQ ID NO: 3461 - DNA, 1309 bp, Zea mays
  Clone ID: TF_ZmC18262_1
agccggttccacgagctgtcgcacttcgacgacaccaagcgcagctgccgcctgcgcctggcggggcacaacgagcggcgccggaggaacccggcggaggcgcaggaccagcacggcgggcggggcgccccggggccccgccgcccggcgcgccgataaaaacctactacgtcagcatgctctctctcttctgtcatgcaggacgcacgcacctagcgtcgtcaccgatccatagtccgatatgtgtctcaagtgttgtgtgtgcgcgctctcgccgcctacccctgtcctgcagtgttgcgtagtatatggttctacgacctacacgtactgctgctgctgcgtgctaactttagtttgatggcagtccacagctagctagtactgtgcttatctctatgtgcaccgaccggaaccggaggcgtgcgtacctacgctgatctgccacgaagcctactagtagttaaatgcaacgtaacctgcaggcaattaagcagggcgctgctatatatagcgtaattaattgtgcgtatgggtatggtggttcgattatcggatgtgtaatccctgtacgtggccgggcccgtgccaaacgtacggtgacctgtgcaggctctgtgtgtcgatgatgttgtctgccgcctgcgcctggcggggcacaacgagcggcgccggaggaacccggcggaggcgcaggaccagcacggcgggcggggcgacccggggagccaccacctccagatcagataaaaacctactacgtcagcatgctctctctcttctgtcatgcaggacgcacgcacctagcgtcgtcaccgatccatagtccgatatgtgtctcaagtgttgtgtgtgcgcgctctcgccgcctacccctgtcctgcagtgttgcgtagtatatggttctacgacctacacgtactgctgctactactgcgtgctaactttaatctgatggcagtccacagctagctagcacatcacctcctgtaagtaatgtgcttatctatatgtgcaccgaccggaaccggaggcgtgcgtacgctgatctgccacgaagcctactagtagttaaatgtaacgtaacctgcaggcaattaagcagggcgctgctatatatagcgtaattaattgtgcgtatgggtatggtggttcgattatcggatgtgtaatccctgtacgtggccgggcccgtgccaaacgtacggtgacctgtgcaggctctgtgtgtcgatgatgttgtactctgataatgatataatccattgtggtaatgtatgctatttaataaaaaaaaaaaaaaaaaaaa

SEQ ID NO: 3462 - DNA, 1614 bp, Zea mays
  unsure (1)..(1614): unsure at all n locations
  Clone ID: TF_ZmC117363_1
caagactgcagcctgattcgacgattccagaagtgcataacatgcacatatttttgcccaaaaaaaaacaaacacatatatacaaggaaaacgaagaaaaaaattgaacgggcgcatttgaatttaacggctaaacactctgcacagcagctaccacttcctttcagatgccagcactagtcgtcgtgtcacttgtatacatctctgacggaccacaacctgagtctgcaagtgcacaggtaccccgaattcccagccatcagacactagagtatcgatcgagaacacaacaggagcacataaaaacaggacaacaaaacaatcctactgccaagagaatggcagtgcctgtgatggatcctcaaacatagcatcaggaacaaacacatggtggccagcactggccgcgaatgcagcagtggccacagctgccgttgcagcctgcgacacggcagcggcagtggtcgaagaggcagtaacctggggttggccaacggcggggacgccagcagttgaggggcgacgcagcgacgatgacagaagagagagagcacactcggggcccagtgtgccggagagagcgttgtcgcgtgtgctgcttccagtgtggctgctgctgccttcagcgtgatggccagggcgggctgcatggaggtggtggagcacactgctaccgccaccctgtccctgtgggtgagggaactcgtctggtggtgttcttgagaacgatatggagaagggctgctgacggcccaccaagtgcacggcgtccgaattctggccaactgttggaattgtttgtgggnagaactcaaactgattcacttggnggtatggaaagaaaccccctagatttgtcagatcatgctgtggctttcttcgacgcctattatggccatccagacgcttccggcaacttcttttttcctcgtcaaactcggacagcatgtgaaaccggctgcattgctggcagaagcgccgctcctgtccgccgacgaccaccaccggcgccttggagtgtgcctcacagaccttatgaagccggtggtactcgcggcaccggctgagatcagagcggcagccgtcgacggagcacgcctccgcgccggcacctcccacggccgcgcgggacctcctcccggctcccggcgccgccccagtcggccgcgagctctgggcaagacccgcggcgaaatcctggagccgcacctcggcgtcggcggcggaggaggacgggcctgcgaaggacagcatggtcggaccggggtccgtcgccgccgcgccccacgacggagacccggacgccgctgcccagtccatgccgccgccggcgaagaaggaaagaaacgcctccgcctgctcccaaacaagaaaccttcaagacggcgaggacaagttcaggaaaaaattcctctgcaagaaacaaacaaatagccaagagaggagcatccacgcaagaaggcccgcaggatgtgcaataaagctaccgcaagagaagatatacgtatggcgcgaagcagaaggtggctattcaagtgcaagcaaaacagaaggggatgaggcagactgcaggcaggcaggcaggaggagctcggtacatacaatcggagaaag

SEQ ID NO: 3463 - DNA, 416 bp, Zea mays
  Clone ID: TF_jC-zmXLIB3527P102Dc10d1
ggtgaaccgaggattgggggaggtcgatttgctcagaagagctaacaaaatgcggccggtatcgccgtatgaggacaggcgactggtgggggcacttatactctgatctccaatgatgacatcacccacctcttgtgtgtgcggggggggcggacttctgcttacattatacccagaaaaagtgcctcggcgagcacttcttcttgttgccagattgacgggagccgagctcctgttagtgtggccagcgaccaccatgctatgcacaacgggtgcagaccactgacgaccagaactgcgctctacacaccttgtgcctagtatgggatctgccggcaccgctaaaagcagcacgttcttcacgaatttgatgagagggagaggagctgccaatcacacctggcctagctattgga

SEQ ID NO: 3464 - DNA, 2429 bp, Zea mays
  Clone ID: TF_ZmC749_1
gttctgtcagcagtgtagcaggtttcagcttcttcaagaatttgatgaagggaagaagagctgccgctcgcgtctagcacaacataatggaaggagaaggaaagttcaaccacaagctgttgtgaatgggaattccatgagtgaaaatcaatctctaagtagcaccttaatccttctgttaaaacaactttccaggctagagtgtacagacatagtcattctaaatgtgtgcttgtatgggtggcagctggtagctcctctgagccaatcaatcatcctaattctttggttaaccttttgaagaaccttgctgctattgctagcacacagtcatatcaagatattctaaagaatgcaaattcaaattcaatattgtcaaatgatggtaataatgctgcaaatggatctactgtgcatgagcaaactatacggtcaattccaatcagtggagaatcattagcagaagagcctgctgtgaaaagccgagtacatgattttgatttgaatgatgcttgctttgaagaagttgagagccgaacagataaaattgtgttcaaactgtttggaaaagagccaaaagattttcctgtagatctacgggaacagatcctacactggttatcgcattatccaactgatatggaaagctatattaggcctggttgtgttattctaactatttacctccgcctccctaattggatgtgggatgagcttgatgatgatccagcttcgtggatagaaaagcttattagcttatccaatgatggactttggagaaaaggatggttgtatgctagggtacaggactgcctaacactgagttacaatggtagtcttatgtttgcatctccctggcaactggtaattggcgacaagcatcagagactgtgtgtaactcctattgcagttgctatgtgcttcgtctgtaaaagtctcagtgaaaggcagagctcatgtctcggttaccatgcccagcacaattgatactgtcggaaagcatgctagccgaatgaagcctgccgatcaaatcacatttggtgttgagaaaaaacaactaagcatcaaccaaacattgagctgcagacagtgtgtccagcaggcccagcagcttgcattccatccccgaacaaataaggtttctgtctaataggactgcgatgctttccttggtctccattgctgccgtctgcgtctgtgtgggattgatcatgaagagcctgccacaagttggttgtatgaagcctttcctctggggcaatataggttggggccccaattgatagactgcagaagagccagcccgatttgtatcaggtgtatgatgaagatgtttgcgccgagcgaagctagtttcttgtaatgtacatgtttctgtatactaaatgtctaacttatttctgtttatagtaaaacctgtgaacttgcctagcttgtaactccattgcatttgcatcctgactgaagtaaagcttttacttgttttaaaaaaaaaaaaaaaaaacaaaatgtgttgcttactgctgttaaaaaacgctcaaagcctttagttgagtttctattaagatacacagcaacagattatgctccagtgggcggtggagccggcgctccagttcagttcttgttcactcctgcgatgactggactgtcaaatatcacacctcttcatattgcagccacaatcagtgatgctactggtgttttggatgctttaactgatgatcctcggcagttgggaatcaaagcgtggaagaacgctcgtgacgccactggcttcactcctgaggaatatgctcgaaagagaggccacatatcctatatccaattggtacaggacaaaattgacagaagggtgagcagagctcatgtctcggttaccatccccagcacaattgatactgccggaaagcatgctagccgattgaagcctgccgaccaaatcacatttggtgtggagaaaaaacagcgaggcatgaaccaaacattgagctgcagacaatgtgtccagcaggtccagcagcttgcattccatccccggacaaataggtttctgtctaataggactgcgatgctttccttggtctccattgctgccgtctgcgtctgtgtgggattgatcatgaagagcctgccacaagttggttgtatgaagcctttcctctgggacaatatacgttggggccccaattgatagactgcacaagagccagcccgattgtatcagtgtatgatgaagatgtttgcgccgagcgaagctagtttcttgtaatgtacatgtttcttatactaaatgtctaacttatttctgtttatagtaaaacctgtgaacttgcctagcttgtaactccattgcatttgcatcctgactgaagtaaagcttttacttgttttggttgagaggaaaaaactaatcaaaaaaacaatct

SEQ ID NO: 3465 - DNA, 954 bp, Zea mays
  Clone ID: TF_ZmC229717_1
agggagcagagaataaattactaaaacgaggaaagaagagggaactggtgcgatgaccactagtacagctgaaacgatagactgctggacgcttgaatcggaaagctagcttctgccacgagaacgggagcgaaggggacgtcccgtcggaggatccgtcgccgccgacgtggaatatgccgtggtagttcatctcgtggccgccacgtcggagctcggcaccaggacggtgttgagctgctcgctctccacgcccggggggcaggcgaacccgccggcgggtagggacggcgccggagccggcctgggagcaggcgaaccagtccggcaccggggagacgccgaactggtggtgctggaggccggggacgaggggctgcgccatggggatgcgctccgcgggctggaccatccggctcacgtcgacgctggaagagttggcgggggatgacagaagagagagagcacaatccgagtcgagcacgggggcgagcatcttgctgctctcgggcggcggcggggccacggcggcggtcgtcttgaggaggggctggcacaccgtggagacctcgagcgtcccggcgcctgatgcgctgaagctgacttggtcgccgtcctggaggaacgggaagcgccggccttccttggagtaggccggcgacgtggaggtgccggcgaagtgcggcctgttgctgagcaccgggtggtgtgtgtagtatgagctgtcctcggatttgatgactccagaccagcttggctccggccttggtgccgggaacgacgataaccttgtccctgcactcgaaaacaagccttgttgacttgtcataaagctcccagagctcatggtatctggctgcggcttcctgcggcgccggttgtgcccgtcaagcctctttctacaactgcgcttggcctcatcaaactctagcccggccggcctcgagggtccca

SEQ ID NO: 3466 - DNA, 1282 bp, Zea mays
  unsure (1)..(1282): unsure at all n locations
  Clone ID: TF_ZmC18262_2
cttcccactcattactcagcttaggaggtccagggcctccagctccgatccaccagctacgctagctcntatgccggactcctcctcctccgccggcacaggcggcatggccccctcgagctcggcggcgccgggccgagctgccaggtcgagcggtgcagcgccgacatgggcgtggagaagcggtacaaccggaggcacaaggtgtgcgacgcgcaccgcaaggcgtccgtcgtcctcctggccggcctccgccagcgcttctgccagcaatgcagccggtaagccccgcctgcctgcttgctcggaggcacatgcacatgggcgcagtgcagtgtgcagtccggccggcgtgcgtgactcgtacgtgagtgagttcgtgacatgctcaaaggcaccggccgctttcagtttgtacgggtactactactactaaactaaacgagcttaattgcacgaggagaaagcttgcagctttttttcttgggtcatggatagcacggtgagctgctgggattggatcctaagctagctaggttgctctctcaactcaagatcttgcagaagcgtctctcagtctcatgcaacctctttggaggttccacgagctgtcgcacttcgacgacaccaagcgcagctgccgcctgcgcctggcggggcacaacgagcggcgccggaggaaccccgcggaggcgcaggaccagcacggcgggcggggcgacccggggagccaccacctccagatcagataaaaacctactacgtcagcatgctctctctcttctgtcatgcaggacgcacgcacctagcgtcgtcaccgatccatagtccgatatgtgtctcaagtgttgtgtgtgcgcgctctcgccgcctacccctgtcctgcagtgttgcgtagtatatggttctacgacctacacgtactgctgctactactgcgtgctaactttaatctgatggcagtccacagctagctagcacatcacctcctgtaagtaatgtgcttatctatatgtgcaccgaccggaaccggaggcgtgcgtacgctgatctgccacgaagcctactagtagttaaatgtaacgtaacctgcaggcaattaagcagggcgctgctatatatagcgtaattaattgtgcgtatgggtatggtggttcgattatcggatgtgtaatccctgtacgtggccgggcccgtgccaaacgtacggtgacctgtgcaggctctgtgtgtcgatgatgttgtactctgataatgatataatccattgtggtaaaaaaaa

SEQ ID NO: 3467 - DNA, 1496 bp, Zea mays
  unsure (1)..(1496): unsure at all n locations
  Clone ID: TF_ZmC9712_2
ggccggcggcgccagcggcggcgacgaaggggacggccagctgcacggcctcaagttcggcaagaagatctacttcgaggacgccggcggctccagtagcagcggcggcagtggcagtgccagcgcgaccgcgcctccagcgacgcagcagccgtcgccgccggccgcttcgcctagggccgcgcccggtggcggcaggaggggcagggccgcggctggcggcgcgggcccctccttgccgcccgcgcccccgcgctgcctggtcgacggctgcaacgccgacctcaccgacgccaagcccgcctactactgccgccacaaggtgtgcgaaatgcactccaaggagccccgcgtcctcgtcaacggcctcgagctgcgcttctgccagcagtgcagcaggttccaccagctgcctgaattcgaccagctaaagaagagctgccgcaaacgcctcgcaggccacaacgnnnnnnnnnnnnnnnnnnnnnntggaccccttgcgtcacgatacggccgtcacgctgcgtcgctcggcgagcccggcaggctcagaagcttcatgctggatttctcgtacccgagggtctcaagcgccatgaggggtgggtttccggcggtgaggcccggtggtgaaagggtgcctggcggtatccagtggcaagcgggcttggatcctcgtcaccaccaaggcgcggtcgcgggatacggcgcccactatgggagcgagggtggtagctcgtcgtcggcgaggccgccggtgttccctggcccggagctgnnnnnaggtggatgccttgcaggagtccccgcggactccagnnnnnnnnnnnnnnnnnnnnnnnnnnnnnnnnnnnnnnnnnnnnnnnnnnnnnnnnnnnnnnacgctgcgccaacagcgggtttcgacggcggcagccctgtggcgccctccctcatggcggcgagtagctacatcgcgccgagcccctggaccgagaccgactcctggggccacgaaggcgggcggagcgtgcctcagctgccacctgacgacgtnnnnntcggcgaggtgcactccggctcgagcagccaccacggccagttctcaggtgagctcgagctcgccctgcagggaaacaggccagcgccagggnnnnnnnnncgagcagcgccgcgcaataatcagggctccgcgggcacgttcgaccaggctggcaacacgatggactggtcgctctaggccnnnnnccgaaataaagcgcagcagatcctagccgcgcagggagatggaggaggctgaaagtttgatgctgcacgctgcttgcttagcttagagcatccagcatgataagagtgatgaactgatgcggtgtcaggagactagtttattctgtgcttcaccatgaactcgtctgtcgcggcgtctatgtagacagacggcacacgtccgtggttcgaagttaccagtatgcttgtcggggactttgctcgcgatgcattaatctcattgttcacca

SEQ ID NO: 3468 - DNA, 739 bp, Zea mays
  Clone ID: TF_ZmC120974_1
acgcgtccgggcggagtgctccgtcgacctcaagctcggcgggctaggcgagatttgggcggtggaccgcacaaccacgaaggagcgggtggctgcaaccgcagctccgtccgccaccccgatgaagcgcccgcgcttgcggcccggcggcgccggcggggcacagtgcccgtcgtgcgcggtggacggctggggggccgacctaagcaagtgccgcgactaccaccgccgccacaaggtctgtgagacgcactccaagacgcccatcgttgtcgtcaccggccgcgagatgcgcttctgccagcagtgcagcagggttctatattcataagcatgttgttgcaccacacaacctttttgttttatatgttgtcatctgatctctggtgaaaaggagggagatgagctacggaggaaatctgatgttatggaattctaagaaaagtctagatttccacaggtccagtggtgccactgatgtcaagtcagcagaaacgattcttgagcatgagtatgcgtcgatgctctttttccctgaggcaatgctactcctatgcacagtgatgtagtagcaacggagaactgtcattaattggatacttcttatcctaattgcaggcgtatcatttagcttggggtttgaattatcggattgccctaccatactgcttagctaaagcccttgtcaaaatgcataattagaagcaactattaaagaaagatcaggtagtttgctact

SEQ ID NO: 3469 - DNA, 1694 bp, Zea mays
  Clone ID: TF_5931779
caggtccctcctcctgcacacacccacagtgcacatatatagtaggagaatgatgatgatgaacaccagcgccgccatgtcgccagcaagtaccgacgtcgtcgtcgtcgacgacttctccctcggcgtcggcgtcggcgccatgcatcagccgtacgtcgtcggcttcgacgccgacgccggcatgggcatcatcatgcccagcgtcgtcgtcgataggccgctgctccagcagaacaccaacctattagaagagtacgacagtttcgacttcgccgccgccgcggggctgctactaccgttccaagaactacctgctggtctcctgccccccgcgaattacctgccgccgccaacgccaataagcatggccatggccatgtcgccgccgtcgctgctgctgacgacgctcccgggcgtgccagtgcctacggcggcggcggcggatgtcgtgtacggaggattgggcgggggcggcgcgggaggactgtcgttcgtcctgaagcgggaggccggcggcggcgggggaatgatcggcggcctgaacctcggacgccgcacctacttctcccccgccgccgtggaccggctactcggcggcggcggcctaggcgtgggcctcggcatgagcgtgctggggctcggggtcggcgccgccgcccaccagcagcagcagcagccaccgccgcggtgccaggccgagggctgcaaggccgacctctccgccgccaagcactaccaccgccgccacaaggtctgcgagttccacaccaaggccagcgccgtcgccgccgccggcaagcagcagcgcttctgccagcaatgcagcaggtttcatgtgcttgcagagtttgacgaggccaagaggagctgccggaagcggctcaccgagcacaaccgacgccgccgccggaagccgatcagcgaacagggtaatgaccactcgtcattgccgccgccgccgccaaagacagcggatacttgcatgaccacctcgtacaatgatgaccccaacagtgcgagcaacacggctgcagccaagtcggcggccatctcgcagaacggcggcgtcagctgcctcgacgtcctggacaacgagcagcgcggcggcagcggcgccgacggcgctatctctggccgcgccgcccccgccgctgcatcacgagaaggacgggagccaggactccgtgctatgatgcagcgccgggtccattggtccatggccggcggctggacgacgacgaatcgccgtttcatcacctcgctggtagtgatgcagacccagcagcagagcagcacggcggcaacgtcttgtcgtgctcgtcgatcggtgtcagatcagcagaacggcggctgcaacggtttctttgaggtggacttcatctaatgcgatgcagatgcacgtaaaaggagcagggaaaagcatatagctagcgtcgctagctgtgtattgtttctgagatgggaaggatgcatggcgtgaggaaagcaacaaaggctagggtttggttggttccactctagctaggggccttttctttttactgtggttagtacttgggctagctagctagtagtgctggccggacttctgttctattaattactagagggaaatgctggtgtagtatgtgtgtgttttccttttccctgttgctaacaatgtatatactattacgtgtaaaaaaaaaaaa

SEQ ID NO: 3470 - DNA, 1646 bp, Zea mays
  Clone ID: TF_5931777
atagctcgatcgctctctgtgtccgctcctcctgcctcctgcacacacatacactcagagagcatagtagcagtagccagtaggatgatgatgaacaccaacgcgatgtcgccgacagcaagtaccgacgccgacttctcgttcggccccttgcagccctacgtcggcttcgacgtcgccggcatgggcatgcccagcgtcgtcgtcgagaggtcgtcgtcgctactgcagcacaacaccagcagcagcagccacaacaacaacctagggctatacgacagtttcgacttcgccgccgccgcagggttaccgttccaagaatctggtctcctgcccccggcgagcctgccgctggcgccgtcgccgccaagcatggcggccatggcaatgccaccgtcgtcgctgctgctgacgctcccaggcgtgcctgcggcggcggatgtcgtctataacccctttggtggcggcggcgcgggagggttcctgaagcgggaggacggcggccccctcgtggacgctgctggaggcggcgggaggatcgggctgaacctcgggcgccgcacctacttctcccccgcggacgtactcgccgtggaccggctgctgacgcggtcgcggctggcgggtggcggcgtgggcgtgggcctgggtatgggcctcggcatgggcgtgctggggctcggcgccgcccaccaccagcagccgccgccgcggtgccaggccgagggctgcaaggccgacctctccgccgccaagcactaccaccgccgccacaaggtctgcgagtaccacgccaaggccagcgccgtcgccgccgccggcaagcagcagcgtttctgccagcagtgcagcaggtttcatgtgcttgctgagtttgatgaggccaagaggagctgccggaagcggctcaccgagcacaaccgccgccgccggaagccgagcagcgcacaggacgaggactcgtcaccgccaccacccaagaaactggatacttgcataactaatactgcctcttacaatgatgatctcaagagcgcgagcaacacggcagctgcggccatctcgccgaacggcagcggcgtcagctgcctagacgtcatggacaacggccagacgagcagcgcagcggcgccgacggctctgtctttggccgccccgccgccgccgccgctgcacgagaaggacggcagtctcgactcgatgctgatgcagcgggtcctgcagggccgacgggaggacgacgacgacgaacagcgtcgccacttcatcacctcgcttgtgatgcagacgacccagcagcagcacagcggcggcggcggcgccggcaacatcttgtcgtgctcgtcggtatcagatcagcacaacggcggcggctgcaacggtttctttgaggtggacttcatctagtgtataatcagatgcatgacgtgaggaaagcaagcaaaaacaaagctgggttggtttcactgtagagcggctagtagccttttcttttttactgttgttcttagtacgacttgagctagctagctagtggttggacttcttttaccagatggaaatgcttgtgtacgtagtatgtgtattcctttttcctattgcgaaaaatgtaaattattattacgtgtaaaaaaaaaaaaaaaaaa

SEQ ID NO: 3471 - DNA, 820 bp, Zea mays
  Clone ID: TF_LIB4746-102-R1-K1-C4
ctcgaggccggccgggacagtccacactgttcaccacctctcccatcctctcttcgatccccaaatcccgaattgaccagcccaaatcgtcgccccggcgcatggagtggacggccccgaagcccgcctcatcgcctcccctcctctgggactggggagaccacgccgccacgggctcgggctcctccagcgacgccccggcgcggcgcggcgggaaggagcgggaggcgaagcgtgccagggccggcgaggaccgcgggggaggtgagctgaggtgccaggtcgaggggtgcggattggacctcagcagggtcaaggactaccaccgtaagcaccgcgtctgcgaggcccacactaagtctccccgcgtcatcgtcgccggccaggagcgccgcttctgccagcagtgcagccggtgggtcgccttcttgcttgctttcgcttgccccctccacgcctctgctctcgcttgctctgtgcgattgcttccgtcttccttcctttgattgctttctgcaacgatggtcgcgtgatttgttgattggtttggacaagcaggtgtttttacgtgttctctattagttttgtggctacatactgtgtgtgtacggcgcgtgagctgcgtgcgcggttgtgccgttttttttgggtacggaactgcatttttttcctgatctagcaatgaaagatgcttcctttccactattgggactgttgtacttgttgtggagatcgtacgcatgggtggaatgagaaatggctactatgcctgtttcccttttccaggtttggtatggctctcgatatatgtgtatgcttt

SEQ ID NO: 3472 - DNA, 2059 bp, Zea mays
  Clone ID: TF_5931781
ctcacaatcactcaaccactgcctccagctccagcagcagctagctcagctcgatcgtcctcccgacccgatccatccaccccactccccgtgctccaccatctcggcatctcgctcgctcacttagctcgagctgcggcaaacagccggccggcagtccggcacacgggagatgatgaccgggaggctgaacgtggccacgtcgtcctcgccaggaggagacgacttcctgttcatgcccatgcagcagcatcagccgccgccgcctcctcctccgccctacgtcgggttcgagcacggccacggcgtggcgggaggcggcagccagcgcgttgccggaggggtgcagcaccacctctacgacggcctcgacttcgccgccgcggcgctgcagttccagcagcaggcggaggcgccgcacctgcaccagcagcagctgctcacgctgccgtccagtctcggccccatggcgccgccgcctccgccgccgccgccgctgcccatgcctatgcccgtgcccgggatgcccggcgaccacgtgtacccggcgctcgggatggtgaagcgcgagggcggcggcgcggacgggaggatcgggctcaacctcggccgccgcacctacttctccccaggggacatgatggccgtggaccgcctcctgatgcggtcccgcctcggcggaggcggcggcgcgttcgggctcggcttcggcttcggtttcggcggcgcgcaccaccaggctccccccgcgcgctgccaggccgagggctgcaaggccgacctctccggcgccaagcactaccaccgccgccacaaggtctgcgagtaccacgccaaggcctccgtcgtcgccaccggcggcaagcagcagcgcttctgccagcaatgcagcaggtttcacgtgctgtcggagttcgacgaggtcaagaggagctgccggaagcggctggccgagcacaaccgccgccgccggaagccgcccaccaccgcctcatccaaggacgccgcgtcgccgccggctaacaagaagcccaactgcggctccatcacaagctcttactccactgacaacaagaacctgaacacggccaagtcgaccatgtcatcgaacacgggcagcgtgatcagctgcctggaccaggccgcgggcaacaagcagctgcaggcgaggccgacgctgaccctcggcgcgtcgccggacaaggaccagcagcagcagcagcagctgagagccatgctccaggcccaagcggcggccggcggcggccaccaccaccaccaccaggagcagcacttcataacctctctgcaggttcacaacaacgacggctgcggcggcggcaacagcagcagcaacaacaacatcatcctgtcgtgctcctcggtgtgctccagcgcgctgccgtcggccaacggcgaggtctcggaccagaacaacgctggtggcatgcataacctgttcgaggtggacttcatgtagaccgtcgagatcggggcaaagcaaaaggcaggcaggcaagcaagcaagcacgggagtacgtccgtccttctggcaaggtgtccttggtgtgtatcagtgtaggtaaaaaggaataggagagagagagagagagagagcaaaacagctaggcatggagtgggaggagaaacaagacgagaaaagacacatagaaaagagagagagagagaaaggacgcagagaaggattctatccatccatcagtccatcacactccatgcatcagtagctagctagctagcagcaagctgcagagcctgcagcaagctgctgctggtctacaacctcttgttgcaaggttccatggccatagcaaagccatgcgtccgtcccgttgcattggctctctctctctatatatatacctgtacgtactgtcgtgctgcagctgctgccattgcaagcctttctacctttccatttcaagcggggaataataactgctatttcactttaaaaaaaaaaaaaaaaaaaaaaaaaaaaaaaaaaaaaaaaaaaaaaaaaaaaaaaaaaaaaaaaaaaaaaaaaaaaaaaaaaaaa

SEQ ID NO: 3473 - DNA, 666 bp, Zea mays
  Clone ID: TF_LIB4171-035-R1-L1-D5
aaattcggcacgaggcttcgatccccaaatcccgaattgaccagcccaaatcgtcgccccggcgcatggagtggacggtcccgaagcccgcctcatcgcctcccctcctctgggaactggggagaccacgccgccacgggctcgggctcctccagcgacgccccggcgcggcgcggcgggaaggagcgggaggcgaagcgtgccagggccggcgaggaccgcgggggaggtgagctgaggtgccaggtcgaggggtgcggattggacctcagcagggtcaaggactaccaccgtaagcaccgcgtctgcgaggcccacactaagtctccccgcgtcatcgtcgccggccaggagcgccgcttctgccagcagtgcagccgattccatgcgctgtcagagtttgatcagaagaagaggagctgcaggaggcgtctgtctgatcacaatgcccgccgccggaagcctcagccagatgcattcaccttcgcctctgcaaagctgccttcgacattgtttgatgataggcggcaaataagttttgtctggaataaagctcctgttagccatgtaagacccttcacttctccatgggacagctcatctgacttaaagcccccttatgcaaaggaaataagtgatgtatcaacaaaagttgggacaattact

SEQ ID NO: 3474 - DNA, 721 bp, Zea mays
  Clone ID: TF_ZmC5424_29
cccacgcgtccggcttcttgctgcaggtttcatctgctcggggagttcgatgaggtgaagcggagctgcaggaagcgcctcgatggacacaaccgccgccgccggaagccgcagccggaccctctcaaccccgccggcttgtttggcaatcaccacggagtgacaagattcacgtcttacccgcagctcttcgcggcgtccatggaacagcctaaatggtcggtggtcaagacggaggccgacgtgttccaagaccagtactacccggccgtccacctcaatggcgctggcggcggcgccatcggctcccacttccacggcaaggagcggaagcacttcccgttcctgaccagccacagcaacggcggcggcggcggcgacgtggcgaccgccgcggccctgggctgccagccattcaccatcaccaccacggcggcctcagagagcgacagcaagcagagcaacggcaactgtgctctctctcttctgtcagacaacccgacatcagcacagacggtcatgatccctactaccgcgcagtccctcgccgcggtgatgcagcacgggggcagactccctggcagcgtcagcgctcagcggcgataacagatgctgcttgcagccttggatatttgtggagtgaacgcattgttgatagcatatggataagaaagtaatgtaattatctggagatgtgtaattatgtggcaatattatttgc

SEQ ID NO: 3475 - DNA, 793 bp, Zea mays
  unsure (1)..(793): unsure at all n locations
  Clone ID: TF_LIB4969-009-A1-XP1-H2
gccggccggtttgggacgtccacctgttcacttcctgccccctccccgcacctccctccgatcccccaaatcccgaattgaccaacccaaagccgtcgccccgcatggagtggacggtcccgaagcgcgccagggccgacgacggcgaggtgaggtgccaggtggaggggtgcgggctggacctcagcagggtcaaggagtaccaccggaagcaccgcgtctgcgaggcccacaccaagtccccccgcgtcgtcgtcgccggtcaggagcgacgcttctgccagcagtgcagccgatttcatgccctgtcagagtttgatcagaagaagaggagctgcaggaggcgtctgtctgatcacaatgcccgccgccggaagcctcagccagatgcattcgcctttgcctctgcaaggctgccttcgttcggtaatgtgttcatatcttaagtagtgcttgaaatttgccagtggatactggcaaaatggtggtgatgggctcttagccagctgcatgtacagcacgccaatagatgtcttgttgctcaaatggcaagctttctatcttttatacttggcaataagttgctgttgcgtttcttcatggaattatatacaaactaaactagacattttttgaccggcaaaagctgtaggggaaagcaataaatatactccctccgttctttttttatttgtcgcgttttagttcaaaatagtatatatttaaaaagaaagagaacttgtaccgagagaagggtgaacccaccaaagggcagagaaataannagaagtag

SEQ ID NO: 3476 - DNA, 1958 bp, Zea mays
  Clone ID: TF_ZmC9188_2
tcttactgtatgaagtttttaggcatatatatctcctgtatgggagtgggacatggcaatgaaccatgagtaggacctatattgtttttgctttgcttgggttcttgtaacccagatttcatgccctgtcagagtttgatcagaagaagaggagctgcaggaggcgtctgtctgatcacaatgcccgccgccgggggcgggggccagatgcattcgcctttgcctctgcaaggctgccttcgtcgtcgttcgatgataggaggcaaataagttttgtctggaataaagctcctgttagccatcctttcacttctccatgggacagctcatctgagctccctcatgcaaaggaaataagagaggtgtcaacgaaagttgggacaattactggacaagttcatttggataaatcttacgtgtccaatgctgttccatcacttacccatggcaaagatgagccttggccaatgaaactcccccgcacctccctccgatcccccaaatcccgaattgaccaacccaaagccgtcgccccgcatggagtggacggccccgaagcgcgccgcctcgccgccctcgcctccgctcctctgggactggggaggagaccacgccggcgccacgggctcgggctcgggctcctccggcgacgccccggcgcggcgcggcgggagggagcgggaggcgaagcgcgccagggccgacgacggcgaggtgaggtgccaggtggaggggtgcgggctggacctcagcagggtcaaggagtaccaccggaagcaccgcgtctgcgaggcccacaccaagtccccccgcgtcgtcgtcgccggtcaggagcggcgcttctgccagcagtgcagccgatttcatgccctgtcagagtttgatcagaagaagaggagctgcaggaggcgtctgtctgatcacaatgcccgccgccggaagcctcagccagatgcattcgcctttgcctctgcaaggctgccttcgtcgtcgttcgatgataggaggcaaataagttttgtctggaataaagctcctgttagccatcctttcacttctccatgggacagctcatctgagctccctcatgcaaaggaaataagagaggtgtcaacgaaagttgggacaattactggacaagttcatttggataaatcttacgtgtccaatgctgttccatcacttacccatggcaaagatgagccttggccaatgaaaggtccggacatgtctatagctgcttcaaaattcgatggagcaccggatcttcagcgtgctctctctcttctgtcagttggcgcctgcggattgcccgatcctgtacaccaaacatcttgcgtcatccaattcactagtgccagcgagaacagtggcgaccttcatctatcacatggagcgaactctggtctagcgtcatgcggtgatggacagcatatagcttctcagcctcaggctcagctggttcggtttaccatggataccagcaacagtgtctatgagcccagtttcttcagtgtaaaccagataaattaagcgttgaagacacacgccacttggtcatttggataaatagccctgaagatggcctgagcttgtgcaagaagttcttcaaccaaccaccggacataaggatctatctgttaatgttatctgtgtatttattagccatacctgaattaagttgaacccaatctaggccagcttatgtgcaatatgcagttccaacctgtgattgacccattttttctgttgtttctttgcccgtgatgtgactgctctggaacttaagtgtgatactgttgtagttacactttactgccctgacaatcatgtcaaacggctggatatctttgaaactgtccttgatgaatctggacgtgtattttgtgtgcaaaaaaaaaaaaaaaaagcggtctgttgcttcaaaactgccatcattaaaaaatttgaaggacttc

SEQ ID NO: 3477 - DNA, 1875 bp, Zea mays
  Clone ID: TF_ZmC3282_1
ctcgaggccggccgggccgggcccacagcagctgcaagatcaccctggattcctggaggacggagagagagccgagcgagcagctgtcggcacttgggagtggcactgtggaatctggagaacctaggtagaaaatcaagcaaagcatctcccactccaagcagtagcaccaacaccgccctgcattcagcgctgccagctttcacataaacaagttggggaatcagttgaggttttctaattcttcttcttggaaggattgagatctccagttctgataatgggttcttttgggatgaactggaatcagaaggaccccatggtgtgggattgggaacatctagtaccgtctgtgtcgaatgcagttacaaggcacggatctgctaattcatctggtggtactcttacttctaactcagagctaggacatggttcatccaagagctctatttcagcgtccattgattcaccctctggagtagggaacagcttagagttcaacttcgccgctgtcgagaggcatgttaagaacacgggcacgaacggcagagtcgatgactcggggaattctccatcgtcaatgatagctttcaaccaaggagagccattaatcagcctgaaacttgggaagagggcttacttcgaaaacgcctgcggaggacaggatgccaaggtttctgcagcttcagacgttacttctgcagccaccgtggtcaagaagactaaggtgtctcagcagaatgcaaagaactggtactgtcaggttgaagggtgcaaagttgacctgtcttctgctaaagattacaatcgcaagcacaaggtctgtgtagtccattctaaagctaccaaggtggttgttgctggtctagagcgtcggttttgtcaacagtgtagccgttttcatggtttagcggagtttgatcagaacaaacgaagctgtcgtaggcgtctgatgcatcataatgcacggaggaggaaacctcaggcagacacaatttcattcaattcatcgacaatgttttatgatacaaggcagcggacaaatcttttctttagtcaaccactttatggccaagtgaggagcaatgcagggtcttcatgggataacttgggaggcttaaaattcatggagacgaaacatccgccagtgcatccaacaaaaacagcatcccctgatgaactgcatttctcagccctccagataactagtgctgcggctcacaccggacatcatcatgatctcgatgggttcatggcgttcaagggaaccagcacaaaggtccttaaccaaggcgtggaggcttgggcggccgcttccagctcgaacaacggaggcccagaaggtgggcgtgctctctctcttctgtcagacggctcgtggggctcgagttcagccgtcatccagcagcccacatctcacgcggacgccggtgcattgctgccgcccttcgccaccgttgctgtttccaacgccgccgccgccgccgccgggcatcctctggacccgtccccgggaaggttctggccgcaagacgatcatcccccgctcgtcgacggacccgccacgcagattccggagctggcgcacctccggatatggtgaaaggaaacgcatgtgatgcggtgacatgccagttcgagggcctggctgggaacacatctggttggttagtctgccgctctggcttgaatttgccggcgacgacagtctttgtttgtatcttttgatcagaacggacacagacatgtttgcccaatataatgtgacgagtccctctggggttgaggagtgaggagatggagaacgataggaggcaaaaaaaatatatatttgtttcgcgcgttttcccggaagtatttaaaatatttaggatc

SEQ ID NO: 3478 - DNA, 1346 bp, Zea mays
  Clone ID: TF_ZmC9712_1
agccaaaccaagcaagcagggaatccccacaaggcagcagatggaagcgaaaggtggcggtggcccgcgcgctgccaggtcgacggctgcaacgttgacctcaccgacgtcaagcccgcctactactgccgccacaaggtgtgcaaaatgcactccaaggagccccgcgtcctcgtcaacggcctcgagcagcgcttctgccagcagtgcagcaggttccaccagctgcctgaattcgaccagctaaagaagagctgccgcaaacgcctcgcaggccacaacgagcgccggaggaggccgccgcctggaccccttgcgtcacgatacggccgtcacgctgcgtcgctcggcgagcccggcaggctcagaagcttcatgctggatttctcgtacccgagggtctcaagcgccatgaggggtgggtttccggcggtgaggcccggtggtgaaagggtgcctggcggtatccagtggcaagcgggcttggatcctcgtcaccaccaaggcgcggtcgcgggatacggcgcccactatgggagcgagggtggtagctcgtcgtcggcgaggccgccggtgttccctggcccggagctgcccccaggtggatgccttgcaggagtccccgcggactccagctgtgctctctctcttctgtcaactcagccatgggatgctgcccacagccacagccacagccacgctgcgccaacagcgggtttcgacggcagccctgtggcgccctccctcatggcggcgagtagctacatcgcgccgagcccctggaccgagaccgactcctggggccacgaaggcgggcggagcgtgcctcagctgccacctgacgacgtccccctcggcgaggtgcactccggctcgagcagccaccacggccagttctcaggtgagctcgagctcgccctgcagggaaacagaccagcgccagggtcggcggcaccgccagcgccgcgcaataatcagggctccgcgggcacgttcgaccaggctggcaacacgatggactggtcgctctaggccgggggccgaaataaagcgcagcagatcctagccgcgcagggagatggaggaggctgaaagtttgatgctgcacgctgcttgcttagcttagagcatccagcatgataagagtgatgaactgatgcggtgtcaggagactagtttattctgtgcttcaccatgaactcgtctgtcgcggcgtctatgtagacagacggcacacgtccgtggttcgaagttaccagtatgcttgtcggggactttgctcgcgatgcattaatctcattgttcaccatccagaaaaaaaaaaaaaaaaaaaaaaaaactcgagg

SEQ ID NO: 3479 - DNA, 1106 bp, Zea mays
  Clone ID: TF_ZmC1835_47
aacctacttaacttcttttataattttagcggaaaccggcgagccgctgcaacatcttaattattacaggctcgtcatgctatccatgatccaagaaaaaaaaaatcctatccgattttgaagatccatggactttaggcactgatgattttcctctctctctctctctctgaataatgtaaaaaaaatggaactaagttcagtagcgcgagctgagcctgaaagtggctcgacgagcttcgggcgggcgcggggcttaccggctgcattgctggcagaagcgctggcggaggccggcgacgagcacgacgggggccttggagtgcgcctcgcacaccttgtgcctccggttgtacggcttctcctcggtcatcaggttcgcgttgcaccgctccgcctggcacctcggcccgccgccgccgccaccgccacctgccccagcgcgccgccgccgcagccaccatgggtcgcgtccgcaccaagaccgtgaagaagacctccaggcaggtgatcgagaagtactactcccgcatgaccctcgacttccacaccaacaagaaggtgctcgaggaggtctcgattctgccctcgaagcgcctccgcaacaaggtggctggcttcagtacccacctgatgcgccgcatccagcgcggcccagtccgcggcatctcgctcaagctgcaggaggaggagcgcgagcgccgcatggacttcgtgccggagaagtccgcgctcgaggtcgaagagatccgcgtcgacaaggagaccatggagatgctcgctgccctcggcatggccgacctgcccggcgttgagcgccaggctgaggtctccaacgcccccgcctacggccgcccgcagtacggtggtccccgccgtgaccgcgtttagacttcgcggtggttgcctcttgatcgcactgctattcgtagttgttgtcctactatgctaaacttcttttagatctttggttgcatctgtggcggttaagttttgaacttgcctgttatggtataaattctgaagtgtttggttctgcgtgtgatgaacatgataatttatattcttgcgctttataaggaaaaaaaaaaaaaaaaaaagcggcc

SEQ ID NO: 3480 - DNA, 1213 bp, Zea mays
  Clone ID: TF_ZmC39687_1
gcggcgtggatctgagcgccgtcaagcagtactactgccggcacaaggtgtgcaacatgcactccaaggagccgcgcgtcttcgtcgccggcatcgagcagcgcttctgccaacagtgcagcaggttccaccagctacatgaatttgaccaagggaaacgtagctgccgccgccgcctcatcggtcacaacgagcgccggaggaagccaccacctggacctctcacttcacgatatggccggctcgctgcatcacttcaagagcctggcaggttcagaagcttcctgctcgacttctcgtacccaagggttccaagcagcgtgagggatgcgtggccaggaatccagcacggtggcgacaggatgctgggcaccgtccagtggcatgggcaccaagaacctcctcacccacaccgcagtgcagctgctggctatggcaaccatgctgcatacaactgccatggcggcttggtagcaggcggggccccaatgctctcctctgccgcctttgagctcccgcctggcggatgtgtcgcgggagttgccgcgactccagcttgtgctctctctcttctgtcaactcagccatgggacacgaccttcccacgaccaccggtccccagcaatgcccgcggccggcgccttcgacggcaccccggtggcgccgtccgtcatggcgagcagctacgcggcgtcgagcgcctggacgggctcgcgggaccccgctgccgacggcgccaggaacgcgcagcgtctcgacgatgctctgcacctggtccacccaggctccgcggcggtccacttctccggcgagctcgagctcgccctgcagggaagcggcgggccgccacacctgccgcgcgtcgaccatggcggctccggcggcggcaccttcaaccattccaccaccagcgcgatgaactggtccctgtagcagcactgcctgccttcatccggtcgccacgccacgagatgtggagggagcacttttgcattggacaccaccctggttttgtgcgccttaccttgccgttctcgttttttcagggtggagaaactgggattcctaaccatagtagatctaccgtgaattcccttcccgtgtagtagcgcattgcgtccatgaactcatttgatcgatcgtcgtgtcaccgtgtgcgtaactgcgtatctgtttggcgtaaaaaaaaaaaaaaaaaaaaaaaaaatccgaa

SEQ ID NO: 3481 - DNA, 2972 bp, Zea mays
  Clone ID: TF_ZmC353_1
gaggaaaagggccgtggtcgttgatgatgatgatgatgatgaaacggaggatcaggacagggtcgtgaatggtggtgggtcgctcagcttgataatagggggtagtgctgctggtgctggagcgatggagaacggcgatgtaaatgaggatgagagaaatggaaagaagatcagggtgcaaggaggcggctcaagtgggccggcatgccaggttgagggctgcggagcagatctgactgcagcaaaggattatcaccgtcggcacaaggtctgcgagatgcatgctaaggccaccaccgccgtggtcggaaacactgtccagaggttctgccagcaatgcagtagatttcaccttcttcaagaatttgatgaacggaagcgaagttgccggcgacgcttagcaggccacaataaacggaggaggaaaacccgccctgatactgcaagttgtgggactgcttcaattgaggacaaaatcagcaattatctactgttgagccttattggaatctgtgctaatttgaactctgataatgttcagcattcaaatggccaggagttgctatccactcttttgaagaacctagggtctgttgccaaatcactggagccaaaagaactatgtaaactcctggaggcataccaaagcctgcaaaatggatcaaatgctggaacctctggaacagctaatgccacagaagaggctgcagggccatctaactctaagttgcctttcgtgaatggtagtcattgtggacatgcatcatcatctgttgtgccagtacagtcgaaggctaccatagtggtaactccagagcccgcatcatgcaagcttaaggattttgatctgaatgacacttgtaatgatatggaaggctttgaggatcgacaagaaggttcacctacacctgcctttaagacagctgactctcctaattgtgcatcatggatgcaacaagattctactcaaagtccaccgcagactagtggcaactcagattcaacatcaacacaatcattgtcaagctcaaatggagacgctcagtgccgaactgataagattgtcttcaagctttttgacaaagttcccagtgatttacccccagttttgcggtcacagattcttggttggttgtcaagtagccctactgatatagagagccatattagacctgggtgtattattctaacaatatatctacggttagttgagtctgcatggcaagagctttctgagaatatgagcctgcacctggataagcttttgagtagctccactgacaacttttgggcatctggcttggtatttgtgatggttcggcgtcgcttagcttttatgctcaatggtcaaattatgttggacagacccctggcacccagttctcatcattactgcaagattttatgtgtcaaacctgttgctgcaccttattctgcaacaataaatttcagagtcgaaggatctaatctactcagtacttcctcaaggctaatttgttcatttgaaggacgttgtatattccaggaagacacagactctgtagcagaaaatgatgagtatgaggatagggccatcgaatgcctcagtttttgttgttccgttcctggtccaagaggaagaggatttatagaggttgaagatagtggttttagcaatggcttcttccccttcataattgctgagaaagacatatgctttgaggtttctgagctggagagcatatttgagtcctccagtatcgaacatgcagatgctaacgataatgccagggaacaagctctggagtttctaaatgagctgggttggcttcttcacagagcgaacagaatgtctaaagagaatgtaactgatacatctgtagctacctttagcatgtggagattcaggaatcttggtgtatttgccatggagcgggagtggtgtgctgtgatcaaaatgctattagatttcttatttattggccttgtcgatgtgggatcccgatctccagaagaggtggtgctttcagaaaatttgttgcatgctgctgtacggaggaagtctgttaacatggttagatttctgctgagatacagaccaaacaaaaactccaagggaactgcacagacatacttatttagacctgatgctctgggcccttcaatgattacccccctccatatagcagctgccactagtgatgcagaggatgtgttggatgtgctgaccgatgatcctggactgattggaattagtgcttggagcaatgcacgggacggaacaggttttaccccagaagactatgctcggcagagaggcaatgatgcttacctgaatctggtccaaaagaagattgataagcatcttggcaaaggccgtgttgtcctcggtgttccgagcagtatatgctctgtaataactgatggtgttaagcctggcgatgttagcctcgagatctgcatgccaatgtctgcatcagtgccaggttgcctcctctgcagccgtcaggcacgggtgtatccgaattctacatcgaggaccttcctttacaggccagcaatgttgactgtgatgggagttgctgtggtctgtgtctgcgtgggcatactcctccacacctttcccagggtttatgccgcgcccacattcagatgggagttgctggagcgtggacccatgtaagttttaggatgagccttagctgttgtttgtaacttgtaagttgagagttttagcgttgtggctaagatcaaaggaacatgattaccgtgtgaagaagttcatctgtgtttaacgcaagatgctgttgcggctgtaagctttatatacatcgtcgatttcaactatatttacagcctatcatgctcccattccattcatccattttgttgtagaattcattccttgcggagaatttgtgaaccctcagaataaaaaacaggttcttgtatggaaaatcgtttagacataatatttcttggaatgatgctgg

SEQ ID NO: 3482 - DNA, 1462 bp, Zea mays
  Clone ID: TF_ZmC3704_1
aattcggcacgaggaatccttgactcggttctctccatgagcttactgccccatctccatttcttcaatcattactcgcctttccgttcaagggcgttgcttgcctggataaccacggcatcgttctacccgccgggcccgagctaagtcatacgtgcaaacaaagagcagcaaaagaagaacaagtggggcgacagggacagggaggaggggaaggcagaggaaatggaagcctctttcttgaggaaagatggcggtgatcaagccagtgcggcgacaatgtccggcgagcacaggaacaagggccttgactgggatttgaacgactggaggtgggacgccaacctgttcctggccacgccggcggccatcgcgccatccgagtccatcagcagggagctgagccgaggtcagggggagatcgatttcggcgtcgtcgttgacaagaggcggcggctctcaccagaggaggacggcagcggtgggtgcagcaattctgcggtagcagatggagacaacagtcacgtggtgtgtgttcagagagggcggaacactgaggagacgagacccaggaaaggtgccaattcgagcaccactccttcttgccaggttgacggctgccaagctgatcttagtggtgccagggactaccataagaggcacaaggtgtgtgaagcgcataccaggacaacagtggtctgcatcaataatgtagagcatcggttctgtcagcagtgcagcaggtttcaccttcttcacgaatttgatgatggtaagaagagctgccgatcacgtctggcacaacataatggaaggagaaggaaagttcaaccgcaacctgctgtgaacgggaattccatgaatgaagatcagtctctaagtagcaccttattccttctgttaaaacaactttccgggctcgagtctggtagctcttctgagcaaatcaaccatcctaattctttggttaaccttttgaagaaccttgctgctattgctagcacacatgcatatcaagatgttctaaagaatgcaacttcaatatcatcaaatgatggtaataatgctgcaaatggctctataatgcatgagcaaaccatacggtcaattcctgtcaggagagaatcattagcagaagagcctgcggtgaaaagacgagtacaggactttgatttgaacgattcatgcattgaagaagccgagagccgaacagataaaattgcgttcaaactctttggaaaagagccaaaagattttcctgtttatctacgggaacagatcctaaactggttgtggcattatccaactgatatgtaaagttatattagacctggctgagttattctaactatttaccttgacctccctaattggatgtgtgatgagtttaatgatgacccaagttcatggatagaaaatcttattagctcatccaatgatggattctggagaacaggatggt

SEQ ID NO: 3483 - DNA, 1987 bp, Zea mays
  Clone ID: TF_ZmC37965_1
gggcactcggtccacactccgaccctcagtcctcactcaaccactgcccgccagctagctccagcagctagatcaggtcgaccgtcctcccgatccacccccgtgctccgatccaccacacgagctggctagctagccagagcggcggcacgcaggagatgatgagcgggaggctgaacgcggccacgcccgcctcgccgggggacgacttctcgttcgcgcccatgcagatgccgccgccgccgccctacgtcgggttcgagcacggcggaggcggccagcgcggcgccggagcgatgcaggcgcagcagcaccacctctacgacggcctggacttcgcgtcggcgctccagttccagcaggaggcgtcgtcccactcccaccaccaccagctgctcacgttgccgtccagcctgggcccgatggcgccgtcgatgccgatgccgatgccgatgccgctgccgatgcagatgcccgtgcccggtgaccacgtgtaccacccggcgctcgggacgatggtgaagcgcgagggcggcggcgcggacggcgggaggatcggcctcaacctcggccgccgcacctacttctcccccggggacatgctggccgtggaccgcctcctgatgcggtcccgcctcggtggcgtgttcgggctcggcttcggcggcgcgcaccagcaccaggtcccgcgctgccaggccgagggctgcaaggccgacctctccggcgccaagcactaccaccgccgccacaaggtctgcgagtaccacgccaaggcatccgtcgtcgccgccaacggcaagcagcagcgcttctgccagcaatgcagcaggtttcacgtgctgtcggagttcgacgaggtcaagaggagctgcaggaagcggctggccgagcacaaccgccgccgccggaagccggccaccaccgcctcatccaaggacgccgcgtcgccgcctgctgccaacaagaagaccaacggcggctccatcacatgctcttactccactgaaaacaagaacgacgacctgagctgcagggccaagtcgaccatgtcgtccaacacgagcagcgtgatcagctgccagctggaccagcccggcaacaagcaccagctggcgaggccgacgctgactctcggcgcctcgcaggacaacaaggaccaccagcaacagctgagcaccatgctccatgtccaagcggccggcggctaccaccaccaggagcagcagcacttcataacctctctgcaggttcacaacaacggcggtagcggcaacaacaacaacaacaacataatactgtcgtgctcctcggtgtgctccagcttgccgccgcccccgtcggcgcccaacggagaggtctcggaccagaacaccgccgccaacaatggcaacgggaacatgcataacctgttcgaggtggacttcatgtagaccgtggagatcgatccaaagcaagctaagcaagcacacaggagtacgttcttctggcaagctaggtgtccttggtgtgtaaaaggaataggagagagagagcaaaaaaggtatgaagtgggtggagaaacaaggagagaaagagagagagaagggtgcaagtgcaaggattccacccatccatcacactccatatcagtagcagcaagctgcagcctgcaggtctagcaaaggtagctacgtaccctcttgtttgcaaggttccatggctatagcaaagccatgcatccgggccggatggatggaaggcccccattacagtggctagctgcctctctcaaccagtctacctcgatctactgcgctgctgctgcagctgcatccatcgcaagcctttctacctttccatttcaagcgggggggaatagttaacagtggctgtgtttcacttgtttttctccactagtttttcttttcttgttgcaaggtgcacgagggtgcagtgtgtgtcgtactaataccaaactacctgttcaaaaaaaaaaaaaaaaaaa

SEQ ID NO: 3484 - DNA, 1411 bp, Zea mays
  unsure (1)..(1411): unsure at all n locations
  Clone ID: TF_ZmC229717_2
ttnttttttttttttttttttttgcaatgatacaatctactgttttaactttgcctaaccatacagattattgattgtaaaatgcaataatttaaatttagatatatccaaatgctctagaattgaattttacaacgcgcgcagggcgcgcgccatccactagtaaataaataaaacgaggaaagaagagggaactggtgcgatgaccactagtacagctgaaacgatagactgctggacgcttgaattggaaagctagctactgccacgagaacgggagcgaaggggacgtcccgtcggaggagccgtcgccgccgacgtggaatatgccgtggtagttcatgttcatgtcgtggccgccaccgtcggagctcggcaccagcacggtgttgagctgctcgctctccacgcccggggggcaggcgaaaccgccggcggagacggcgctggagccggcctgggagcaggcgaaccaggcgggggagccgccgaacgggtggtgctgctgctgctgctggaggccgccggggacgaggggctgcgccatggggatgtgctccgcgggctggtggacgaccatccggcccacgtcgacgctggaggagttggcgggggatgacagaagagagagagcacaatccgagtcgagcacggcgggggcgagcccgtcggagaacatcttgttgctgctgctgctctctggcggcggcggtggggcggcggcggcggcggccttgaggaggggctggcacaccgtggacgtggaagagacctcgagctgctgcgcccccgcgcccgcgcccgcgttgaagccgccgacctgctgctggtcgcagccgtcctggaggaacgggaagcgccggccttccttggacgagtaggccggcggcgtggagcccccgccgccggcgaagtgcggcctgctgcttaggaccgggtggcgctggtgcgcgtagtatgagccgctgtcctcggatttgatgactccgggccagctcggctccggccttggaaccgggaacgacgagaacctagtccctgcatgagaagtcataaagctcccagagctcatggtatctggctgcggcttcctgcgacgccggttgtgcccatcgagcctctttctacagctgcgcttggcctcgtcaaactccgcgagcaagtgaaacgtatgcaacaacttgaaaagatggggcttgaagatttgagggttcttgtcaaagcaaaaaactactgcacagatcctgcgtcctctgtgttttgtactggcgcagagaagcaccaatttgatgactgattcagaacctcatcccagatacaagttccaattcatcgttttcacttttaaaacttagccgaagacgacgaaagctatacaggcgtgaggaggtaaggtcccggcccggccggc

SEQ ID NO: 3485 - DNA, 116 bp, Zea mays
  Clone ID: TF_700381372H1
cgctgccttatgggacccaggccctgaagctgcacgcctgcgtttccggtgcttccgctatgaggaggctacagggacccaacaggcactggctcagctccgatagctctgtcgcc

SEQ ID NO: 3486 - DNA, 1500 bp, Zea mays
  Clone ID: TF_ZmC1439_6
gaactactctcaccattaactataacaaattttgtcaccaaaatttggtggctggtggatctacttaagaatcaaaagtcagacaaggtggacatcaccatccaaccggaggagcaggaagccatgaatgatgttctagcagccagccatgaccgcgtccacgtcatcaactttgacatcaagcaggggctacagtggccgggcctcctccagaaaaagaggaattgaagcagtatctgactcgaacatttttgtagaaaacttggtagaaaaagaggaattcctgcatacattttcgaaggaatgtgaatatatcagaactgcagtgacaaatggtagtgccattaagcatgatggctcatatgaatcagatcctgcagttgagattgttcgagttgaactccaaggtgctgctgcatttcttttattctcgtctggtacctcttgtacttcttctggttgaaggttccacgcctatatatattggagaacatggatgggaaatgcttctggtagtaaaaaaggcaacacaagaggctggttcaaaatttgaactgctaggttttgcatctgtgcataacttctatcattatcctgagagtattcgcttacgaatcagccagatacttgtgttgccaccttatcagggtgaaggccatggtcttggtcttcttgaagcaatcaattatattgcacagtctgagaacatttacgatgttacaatagaaagcccttctgattacctgcagtatgtgagatcatccattgactgcctctgtttgctcatgtttgatccgatcaaacctgcacttggtgctattgtctcgtctctgaaggagaccaacctgtcaaaaagggcccaaagtttgagaatggttccaccggttgacctgatggagactgtccgttagaagctgaagataaagaagaaacagttcctccggtgctgggaaattctggtcttcctaagcctcgactctcaggatcataagagcatggacaacttcagggcctgcatatatgacctcatgaagggggagatccttggcagtgcctctggaactaacaggaagcgtctattgcagatgccaaccagtttcaataaggaggcatcttttgctgtgtattggacacatgagattggggatgtggatgaacaaactgtttagcagcagccagaggatctcaggacgcaggagcaacagctcaatgagctcgtggacatccaaatcgaggagattgatggggtcgccaagaacgtcacttcacgtggcaaggataagatggcagagctggcggttcaatgaatctgggtgaggttcctacttcaaacgatgttaaaatgttgtcgtagcttatctggtgaggtctcttttacgagttggcttcttggtagaaagggaatgtcacggcataggcactgagtagattgtcacgacagattattatatacttcaattctggaatatttgatggaaatgctattttagattgcttggt

SEQ ID NO: 3487 - DNA, 1036 bp, Zea mays
  Clone ID: TF_ZmC79675_1
gacccactcgtgcggtcggcccttttttttttcttttccatggataaagaacatcagtttctcatcgtgtattgaacattacattagtttcccgtgacaaaaaaggacatgagggaaaaaacgatgaagatacaacaagaaatcgaaaccttctcatgctgttagattggttaactgacctacacaatttgtcaaacaactcaaccaagcactacgtgagggccttattatacaagtgtgttcaagcacatataacagcttgagcgactagaagcatgcgcgagctcatctctaagctttgagctctttattcatctaccctccaccgtgtgtatgctatctatggccagcatatagtggcagtaccgtatgaatgtgcgtgcatgccagacaaccacggtattgggtggtatacgtatacgtacctctccgtctgccggcgcagcggaacgtggcgagcgcagcagactagcacttccagcaggaggcggcaatgacgggcttgcccttccagccgaggacgaggcaccccttctcctcagcaaccgtgtacccgccgccgccggcgttctcctccagccactcccgcgccctggccgccatcctgatcggcatggactggaacccggcgcggctcatgcggcggcgccactggtcagcgcgctcgtgccgctccacgcgcgccgcgccctcgcagccgaccacgttccggatctccgcgccgaagtggaactgctccacgcgcgcgcggcgcgcgtcgtagcgcgggagcgccgcgtccagcgcgtcgaacacggccgcgtagtagtggagcgcctccatgaaccggcccaggaagaagggcccgttgtggccggcgtcctgctccacgaggacgaacgccttgggcgacaacttgcggatggtctggagcacggagttgagcgccccgcggctctccttcaccacgcagtgcagctccaggacgctgttgatggccacggcctcgtcggcggcgatcccgaggtcgtcgatgtgcaggctctcgagactgcgg

SEQ ID NO: 3488 - DNA, 848 bp, Zea mays
  unsure (1)..(848): unsure at all n locations
  Clone ID: TF_LIB4976-049-A1-K1-B8
attcccttcaagctccagatcgtttctagctaaatacaaatcgactacagttacatagatctctgctcctcccactgaaatattccttgtacttgatggccttctgtcttctccattctcgctggtcgttcctctcccggccctttggttcccgaagttctaatggcatggggaaccacgtgtagggcgttgtagagcacagccctctatatatgcttagtacaagcaccaaatccgcacctcaaactactcaacgtgtacgagctctctgcctcaccgcgcgcttttctaatcccgccgccgctagctgcctcgctgctggtttgttgccttctactacgtacctcgccacgcctgcctcggccccccctacatgatgcagttcacgcacactgcgccaccgccgccgcctctgcaccctaacggacatgctggagggctagggctcgggctgttccttgacgtcggcgcgcccagggccgcacgcccctggccggggagcttcccgacgcctgcgtccaagatctcgctcggcaacctcaacagcaccagctgcatggagcagctgctggtgcactgcgccaacgccatcgaggccaacgacgccacgctcacgcagcagatcctgtgggtgctcaacaacatcgcgccgccggacggggactccaaccagcgcctcacggccgcgttcctctgcgcgctcgtcgcgcgcgcgtccgggaccggcncggtgcaaggggttcaccgccgccgtcgccgncgnncgtcgagtcggncgcgctcacgtgaccggcttcacggccgtcgagctcgccagcttcgtcgacctccgccctggcaccgcttcg

SEQ ID NO: 3489 - DNA, 919 bp, Zea mays
  Clone ID: TF_ZmC189640_1
tgacgcgcttcgccgccgacctcggcatctcgttcgagttcaacgccgtcgcgttcgaccccttggacccgttgccccccacggggctgtccgtcgcgcccggcgatgccgtcgccgttcacctctccgtcggctccggggtcccgtcggcagctactttccgcgtcgtgaaggagctccgccctgccgtcgtggtgtgcgtcgaccacggatgccaccgcggcgacctgccgctgtcgcaccacgcgctgagcgtcgtgcgctccagcgcggcgttcctcgagtcgctggacgcggccggggcgccggcggacgcggtggcgaggctggaggagtacgtcgtgcgtcccagggtggagcgcctgttgctaggcgacaggatgcctccatggcggaccatgcttgactccgccggattcgcgccggtgcagctcagcaacgccgccgaggcacaggccgaatgcctcgtcaggcgcacgcccacgccgggcttccatgtggagaagcggcaggcggcgctcgcgttgcggtggcaggactcggagctggtgatggtgtcggcgtggcggtgctgaatcggggcactgggacagttcctgtaaagattgaacctttttctgttctcatgtgcagtaaaattagctagtaacttgttgtcaagctgtttattttacaattttagttgcgatgatgtagcaattgggagcatgtgaattttcatcatctgtgatatgacagttttgaggaacgattggaagccacagatctgcagctaatagccccatttgccatgcccatattcctgcagttagttgctaggtccattaattgttagcattagttgggcatgcatgtggtccataatctacatttcagatcaaaaaagagcaagtacaaaaaaaaaaaaaaaaaaaaaaaa

SEQ ID NO: 3490 - DNA, 649 bp, Zea mays
  Clone ID: TF_LIB3918-030-Q2-N1-H7
ttttttttttttttttttttttttttttttttttttttttttttttttttttttttttttttttttttttttttttttaacggggcccctggggggcatcactataaaaaaacggggcaaaacatgctttaaaagttaaaaaaacacacccaacccaaactatatggggcaccccaaaaacaacccccccaagcatccaaaaaaacaaacgggcccccatccattaaaaggggagggctcgatctgaaaccatggaccccccctcgagggggagctaaaaaaacctgggatcgggcttccacggggaaagccccaaaacaaggcgtcctttccacccttgaaaaaaccaccgggggtttttgaaaaaaagaaaacccttggggaaacacctgaccttttgggaaacccccttaaaaaagccctggttgaacgggagctgcctaaacccaattttttgaaaccccacccgccactggttgaatgtttggggcctttccattctttcaaggccctggaaggaaaaaacggggatggcccttcaaccaaacaggggtgactcaaaaaacaccctttggtcggggcccctggggaaggtcccccccaacatgtaaaaaaggggggggaaggggaaaaaggccccccggaagcg

SEQ ID NO: 3491 - DNA, 299 bp, Zea mays
  Clone ID: TF_LIB3116-007-Q1-K1-E8
tcggtcaacctggtggcctgcgagggctttgagcgtctggagcgagacgaggtgctggggaagtggtaggcgctcctgaggatgcccgtgttcatagccgttccttctcagtatacttgttaatttcactattaatactctgctgcagagctactcggtctactacaagcttgactaaagggaatgcgtgctatacctccattggaagaacatgccccgtattgttttatcggtatgtgctttatgttgacttcgagagaatgatcgtctcttgcaaaatgattcttgtgactttctac

SEQ ID NO: 3492 - DNA, 1959 bp, Zea mays
  Clone ID: TF_ZmC1583_5
gcgccgtcccttctctgcatcccgccccgtcctcccaaccgctccaccgacagcctgccatccccgcgagccccgcatccctggatcaccgcgcccgcgcctttgatggaaggcgattcctcaatgcgcgtccgtaaaccccgccccgctccgccattcctgcgccgatcgcaggcgagggcgtgcccccaccccagtcgtgcgttacccggcgcccagcccccgcctcccgagcccccagatcacgtcgatccaccattcttgcgccctcacctccctagacctcgccccgtcctcggcgcctgttctccactgaatcgcatctgccaacgaggatttgcgccgccatgtcgtagatcccccaccccttctgaccccccatcttacaacgtggtggacgaggaggacgagccgacggcggtggcggaagtcggtcttgggccgcgatggcgtcgagcgccggcggcgcgtcgtcgtcgttggggaagaacttactataaattcaggatgagcttgcggcagaggcaaaagcggctgaggtcggcaactccatcagcgggcgcgagatattggtgcggctcaatcagcagcttcccccaatctggaagcctttcctccgctccgcttcctacctcaaggaggccctcctcctcgcgctcaccgacggccaccgaggctccactcacctatcctcccctctcgacgtcgccctcaagctcggtgcatacaagtccttctccgacctctcgcctgtgctccagttcgccaatttcacgaccacccaggcgctcctcgatgagatcacctcaacaacttcatcttgtatccacattattgatttcgaccttggtgttggcggccagtggacttccttcttgcaggatcttgcacactgccgtggaactgggaacgccccctgccaatgttgaagctcacagtcttcgtctcaagtgcttcccacaatccccttgagctgcatcttactcgggagaacctcacgcaatttgttgtggaccttggcattccatttgagttcactaacatcaatcttgatgtgtttgatcccacagaactcattgctcctagcccaatgaggttgtggttgtttgcctccctgttggttgctctgcacgcacgccaccgctccctatgttgcttcagttggtgaaacagcttgcgcctaagattgttgtggctattgaccatggcagttaccggggtgacctcccattttcacaacacttcatgaattgcttccagtcttgtatgttccttctcgactcacttgatgctgctggcaccaacgtggatgctgccagtaggattgagaggtttctgatccaaccgagagtagaggatgcagtacttggccgatggaaagctgaaaaagcaatggcttggtgggcagtgtttacatcggccgggtttgctccggtaccgctcaacaacctcgcagaagcacaagctgactgcctgttgaagcgcgtgcaggtctgaggattccatgtggagaagtgtggaatgggtctagcactctactggcagagtagcgagctcgtgtctgtctcggtatggtggtcctgatcatacggactccatccatcaaccatcatgacacctacaccaatttgcaggcatgtttagccctggtaatgtgcattttgtcttgcaatttcaaacatcgcgaagaaaactattgtattggttgttccacgcctctgattgctttgctgatgttggagtactgcataggcctaatgaatttagccagtatggtgtgggaatctctacaatgtaacatgttggtctcttaactctgttcttgctctcttcttggttagccagaggacaatttggcaaatctgtggcaatgatgttgttattttactaggtaattcagatgaaaactgaaatggactgaaatggttgggtatattaactttcttggcttcatattcc

SEQ ID NO: 3493 - DNA, 227 bp, Zea mays
  Clone ID: TF_700051838H1
acgatgacgttctcaactccgggcggttggatgcgcggttcgtctctcgcctcggcactacgccgcggcgttcgacgccgtggatgcggctgtgctggcggacgtcactcctcgatggtcaatgcgtatgagatgttctcgcgggatattcgcaacgctgttgcgtgcgaggccgcgtaccgcttcgagcgtcacgagatcttcacctggtggcttcacgcatgtag

SEQ ID NO: 3494 - DNA, 148 bp, Zea mays
  Clone ID: TF_LIB3069-022-Q1-K1-E10.R1
ccctgaagtcttacatgggcagttctaggagtcgtgaccgtacctgaagtttgagcatctgatcgcgaagcaggccatagtcgaagtctttgccggctgccgcgactcccacgtcgtcgacttcggcatcaaagaggggacgaagtgg

SEQ ID NO: 3495 - DNA, 328 bp, Zea mays
  Clone ID: TF_LIB3245-575-P1-K1-B1
cccacacccacagtcattgcacatagctgtatgaggactgtatgttgctgggcggtgggtggagaagtttgttgagcactgtgctgcccggttcgcattcaggacactggctgctaacattgaatattttactgctggaatgctacaccgacgtcccgtacaggccctgattgttaactctgcattgctgatacaccaccttcctgatgaaagtgtctcaattatgaaccaacacgatcgacttttctatatggcgaacgatcttctaccaaaactcgttacccttggggagcatgtctcaaatactaacacttcctcattctattcc

SEQ ID NO: 3496 - DNA, 783 bp, Zea mays
  Clone ID: TF_700205405_FLI
cgcagagctcattgctcctagcgccgatgaggttgtcgctgtttgcctccccgttggttgctctgcacgcacgccaccgctcccgatgttgcttcagttggtgaaacagcttgctcctaagattgttgtggctattgaccacggcagtgaccggggtgacctcccgttttcgcagcacttcatgaattgcttccagtcctgtatgttccttctcgactcactcgatgctgctggcaccaatgcggatgctgccagtaagatcgagaggtttctgatccaaccgagagtagaggatgcagtgcttggccgtcggaaggtgaaaaggcaatggcttggcgggcagtttttacatcggctgggtttgctccagtgccactcagcaaccttgcagaggcacaagctgactgcctcttgaagcgggtgcaggtccgaggattccatgtggagaagtgtggaatgggtctagcactgtactggcagcggggcgagctcgtgtctgtctcggcgtggcggtgctgatcatagcaacctcatccgtcaaccatcgtcgtcgtcgcgcctacactattcgcaggcatgtttaactccggtaatatgcgttttatcttgcaaacattgcaaagaaactattgtcatggttgttccacgcctctgattgctttactgctgtttttggagtattagctaggcctaatgaatgttgcaatcttggtgtgggtgtccccctacaatgtaacatgttggtactagggtctcaacgctgttcgtgctctcttcttggtt

SEQ ID NO: 3497 - DNA, 1005 bp, Zea mays
  Clone ID: TF_ZmC1583_2
gagagaaagaaagaaagaaagggaaggcggggggaggccggccaaggcaccaccacaccaccacccgacgaattcaagcatgaggccgcagagcgcagagcagggctgccgccgctgccgctgaggagcggctacagagtgctatacctattacacagcggcaacaggcacgcacgccaccgctcccgatgttgcttcagttggtgaaacagcttgctcctaagattgttgtggctattgaccacggcagtgaccggggtgacctcccgttttcgcagcacttcatgaattgcttccagtcctgtatgttccttctcgactcactcgatgctgctggcaccaatgcggatgctgccagtaagatcgagaggtttctgatccaaccgagagtagaggatgcagtgcttggccgtcggaaggctgaaaaggcaatggcttggcgggcagtttttacatcggctgggtttgctccagtgccactcagcaaccttgcagaggcacaagctgactgcctcttgaagcgggtgcaggtccgaggattccatgtggagaagtgtggaatgggtctagcactctactggcagcggggcgagctcgtgtctgtctcggcgtggcggtgctgatcatagcaacctcatccgtcaaccatcgtcgtcgtcgcgcctacactattcgcaggcatgtttaactccggtaatatgcgttttatcttgcaaacattgcaaagaaactattgtcatggttgttccacgcctctgattgctttactgctgtttttggagtattagctaggcctaatgaatgttgcaatcttggtgtgggtgtccccctacaatgtaacatgttggtactagggtctcaacgctgttcgtgctctcttcttggttagccggaggctactttggcatatttgtggcaatggtgttcgttattttactaggtaaatcagatgaagactgacatatgaactgaaatggttgggcattttttttctttcttggcttc

SEQ ID NO: 3498 - DNA, 180 bp, Zea mays
  Clone ID: TF_LIB3136-038-P1-K1-F6
gcggcgccgacgccgcgcagtgggtcgagctgctgcacctgctggccgcgcggcccgagggcccgccgcacctccgccttaccgccgtgcacgagcaccgggacgtgctgacgcagacggccgtggcgctgaccaaggaggcggagcggctggacgtgccgttccagttcaaccccgtgg

SEQ ID NO: 3499 - DNA, 2270 bp, Zea mays
  Clone ID: TF_ZmC3661_2
gccggccgggccggccggtcgcaacactggttcacgtccgtccacctctctccgcctttcctcttatcctcccgtctcgcgccgtcgcgcgtctcgggtctctcttctctctctcggctctcgcctccctcccggtccgggtcgctcgcaggtcgcagccaccagtgcatttttatgcgccgcgctggtggttttggggcgcggagtccatatccatggtcatggacgctggcctgcacgagccgtgcgcgctgctgccgggatccaagcgcgacagccacatgctagtctacccccaaatcgccgccgccgctaatgggttcacggcgcaggagctcgagtcgctgctgttcctgtcgcctgatgggattactttggctgcgggcagtggcggtggcggcggcggcggcagctatctgaatgtcgcgcctaccactgtggtcccgcccgccccgaccaaccgcgcgtcgccgccgagggatgtgtccgccgcgccgccctcggtggggcagccggatgattcggaggcgttctcggacatcgtcctgggctacatcaaccgcatgctcatggccgaggacatcgacgataagttcgagcactacccggagcaccccgcggtgctcgccgccgagaagccgttcctcgagatcctcgccgagcggccctcgagctccggtggcagcgcggtggagagcccgggcggcagcagtgtggggaactcttgctacagcgcgcgctcttgcacctgcgccaccgccacggcggcgtccgacgcctttggcgccgtgctgacgccggcgctcgacttcccgtcggccgcgttcctgcagccaccacagctgtaccaggatctaagccctgagggcagcgtggtggatgcaggcggcgcgtggccgtacgactcgacggaattctaccagctgcacagcaacccgtcgtcgttcgcgtcatccaacggcagctgtgctacaatatcagacggctttgagtcgttgctgagctcgcctggtgtcatgccagatgttggcttcgccgattttgcggtgcagagccagcaggctatgcagttctgccgtgggttcgaagaagcaagcaagtttctgcctgacgagagtaagcttgtgattgatcttgagaagccagcatctgttacaagcttggtggctaacatcaaaggggagaacaggtttgcagaggtcaaggcagagaaggccgatgttcaggcagaaattcacagaggaaagaagcatttctatggtgatgacttggatgcagaggaagggaggcgcagtaaacattcagcacccgctatcgacactgatcaccttgtgcgggagatgatggacaaggtcttgttgtgcaatggcgagacatgttcaaaaggcgtcaaggaactccgtgaagccctgcagcatgacgtggcaaagaattcacacggggttcatggaaaagggtccggacatggcaagggccgtggcaagaaacagccgaagaaggaggtggttgacttggagactctcctcgtccactgtgctcagtctgtggccaccgatgatcgacgtggtgcaactgagctcctgaagcagatcagacagcatgcatcgcccaatggcgacggtgaccagcgtttggcgcactgcttcgccaacggccttgaggcgaggcttgctggcaatggaagtcagatttacaagtctcttataatgacgaaagacaacaggtggttactgcaagggtggaaaggacgcatcgtgctggcgctctcaacgtggaagccagaccacaggtctccctagcttcctcgagggcggctacatggttgcagatcgagcactgcactgtagatggagaggcctgttcgtatctttggatgcttgggctggttgttcctgggctgcaacatatagctaggctaggcttgtgctattcgaactactaaagcatgttttgcactgtctttatatagtgatgccatcaatggtccctgcatgttaggttatggttcagttttggacaggaacagttagtgcattctttgatggaacagcaggctaggtatgttagggaaaaaaatttggtgcagcactgctgcaaaccagagtggttgcagcccctcacaaaaagaaggatagaccccacccgtattttttccgtatgttagttacgcacgcggtagaccctagtgttgtttcatgcatggatcagtcttatggattcttgtattatatctgttcccccattaaccagtgctgtcaaagttttgggct

SEQ ID NO: 3500 - DNA, 677 bp, Zea mays
  Clone ID: TF_ZmC5037_1
ccccctataaatacttcccaccaaacatggcatgtttccttgagttccttattatgcatagaaaataaaataaaataaaataaaaacatggcatcaggcttcttcctggattggccaaatggtcacagtgccatgccatgcaaacggcggtagaagctagctagccagaggaaagacgatgcatccgtacgtatatcttgttgtttgtctgaagctatagctcggccttgatgcttctagttggaatctgcgcagagagccctttgatttgatgatgacgtactgatcgtgtttcactctcgtggttgtatacttgtattccatgaaggtttttggaggccctgcactactactcggcgatcttcgactcgctggacgcgacgttcccggcggactcggcgcagcggatgaaggtggagcagtgcctcctggcgccggagatccgcaacgtggtggcgtgcgagggcgccgagcgggtggcgcggcacgagcggctggatcggtggaggcgcatcatggaaggccgtggatttgagcctgtgccgctcagcccggccgccgttgcccagagccaggtcttgctgggcctctacggcgccggcgacggctaccggctcaccgaggacaggggctgcctcctcctcggctggcaggaccgcgccaccatcgcggcctcc

SEQ ID NO: 3501 - DNA, 995 bp, Zea mays
  Clone ID: TF_ZmC5771_4
cggacgcgtgggcggacgcgtgggcggacgcgtgggcggacgcgtgggcggacgcgtgggcggacgcgtgggccaggctgtgctgcgagcccggggaggcggtggcagtcaacctcgccttcgcactctcccacgtgcccgacgagagcgtctctccggccaacccccgcgacgagctgctccggcgcgtgcgcgcgctgggcccgcaggtggtgaccctcgtcgagcaggaactgaacaccaacacggccccgctggcggcgcgcttcacggacgcgtgcgcgcactacggcgccatcctcgagtcgctggacgcgacgctggggcgggagactgcggagaaggccagggccgaggcggccctgtcgaggaaggcggcgaacgcggtcggccgggatggccccgaccggctggagcgtgcgaggtcttcggcaagtggcgcgccaggttcggcatggcgggcttccgcccggtgtcgctcggctcgagcattgcggaacagatggtcgccccccgcgtcggcccggtgcctcccgggttcacagtcaaggcggagaacggcgtgctccgcctctgttggatggggcgcgtggtgaccgtcgcctccgcgtggcgctagaccaccaccgggacggcgggcggccgggcgcgccattattgccgtcactaaatcgagaagatgacattctctctgattcattcatggtgatcctattcctggtgctggtaggaggagtatgtgctttgtacagtcgcggtgctgcctaactagtgggcgcggcgcgaaatgtgcagctgggcccgactcctttcttgtcgattaatgtttgtctgccacgtaggtagatgagggtttctttgtggcgtacaagtgtaaggtaggtggaggtgaatagcggttacggaaattgccacttggaagtagtttgtggttcggtgagttctttctttgcatccttggtggaatcgatccgttaaataaatattttgggatt

SEQ ID NO: 3502 - DNA, 830 bp, Zea mays
  Clone ID: TF_ZmC1310_2
cgaaagcccaagggacattgggctcaacaacatcagaaatatgcggcctcatacattcatacacgcaattgtgaatggctccttcagtgcgcctttcttcgtgacaaggttccgggaggctctgttcttctactcggccttgtttgatgcgctggacgcgaccaccccaagagacagcaaccagaggatgctgatcgaggagaacctcttcgggagggctgccctgaatgtcattgcgtgtgagggcacagaccgagtggagcgccctgagacgtacaaacaatggcaggtgcggaaccaacgagcaggcttgaagcagcagccattgaaccctgatgtcgtgcaggtagtgcggaacaaggtcaaggattgctaccacaaggactttgtgatcgacgtcgatcaccgctggctcttgcagggatggaaaggccgcatcctctatgccgtctcaacatgggtggcaaatgatgccccctcttacatctagctgttctgttgactcacttgtctacaaattttaggtttaggtatgtcatctggatatatctagtgacaagtgtgttcagtgggttacatggactcacttgtgattgatggtaatgcgaactagatgcttatcactcaaccatgttgttgcatagtgctaaacatgattagatctaggtcctgggtctgggcaatgtcctctgcagcatctgccgtgtttgatcaatccagtcagttgatcaggttgtaattgacacttggtcctctctgtttccggtgtgattactgcgctgtttcagacttcagaatcgttatcatgaactgatggattttgtctgtct

SEQ ID NO: 3503 - DNA, 2398 bp, Zea mays
  Clone ID: TF_ZmC5771_1
gaccctcgggctcattcctccctccctccctccctcctcggtagattcgtctcgtcaccttcctcctcctcctctctttctgctctccctgccccgacctgccccgccctgcatggagccaggcgcgccgtggcgcgatccgcgccagggttactcctacggggtcggatcggcgatgcagctccagctccagctgcagcagcgggccgacgcggcagccggtggaggagtgctcaagaggagcctcggcgagctggagaggtggcagcaccaccagcagcagcaggtggccgcgcaacaggcgctgtacctgcgcgccgtgaggcagcgcacggctgcggcggtcgatatcgccgccttgctgggaggcaccccggctcagcctctggttctacccgggtccagctttggagggggcctagcgtcgccttcgtcgacgctctcgtcgtcgctcaccaccgcgtccagggcggcggtgccgctgatgcagccgcagctgcagcggcaggtgccgctcacgacgtcctcaccgcagacgcagcccttcgggctgtcgacggcgccgctgcctcagccgtcggtttcgagcgagctgttcattttgcaggagctcgagaagcagctgctggacgacgacgacgacgacgagccggttgcggcgatgagcggcaccggttccgccgtcaccaactccgagtgggaggagacgatacagcagctcagctccatcgcagccgcgccgtcgcccgggccccctgcagcggcgaccccaaccaacaacaacaacaataacgtggggatgacgaggtcaccttcaaactcctcctcctccaccgcgtcttcatccgcgtcctgctcgccgccgacccccggggccgcgtcgaggcagctattgtctgaagccgcggtcgctatcgcggacggccgcgcacaggctcgggatgacgaggtcaccgtcaaactccttcacggcgtacttgatatcgtcctgctcgccgccgaccccaggggccgcgtcgagctggttatcccctggtctagctctggctatcgcggatctcattcatgaagcgtcggccagccatctggccgccctgaagcgcgcggctaaccagcacggcgatgcggaacagcggctgattgccatgatggtggccgccctgtcctcccgcattgctccggccgcctccgccccatctcaactcctcgccgacctctgcagcgtcgagcagcgcgccgggtcccaactcctacaggacctctccccgtgcttccgcgtcgccctccacgccgccagcgccgccatcgtcgaagcggtgggcgaccaccgcgccatccacctcgtcgacttcgacgtcagcttcccgcagcacgcggctctcatccagtacctcgccgaccgacgcgtgcagggcaggtccctgaaggtcaccgccgtcaccgacccgagctcgccgttcacgcagtctctaaccgcatcgctaccagccatcgaggagcggctgaagaagctcgccgagcgagctggcgtggagtaccgctttacagtggtcagctgcagagcagcagagctggatgcgtccaggctgtgctgcgagccgggggaggcggtcgcggtcaacctcgccttcgcactctcccacgtgcccgacgagagcgtctctccggccaacccccgcgacgagctgctccgccgcgtgcgcgcgctgggcccgcaggtggtgaccctcgtcgagcaggaactgaacaccaatacggcaccgctggcggcgcgcttcactgacgcgtgcgcgcactacggcgccatcctggagtcgctggacgcgacgctggcgcgggagattgcggagaaggccagggccgaggcggccctgtcgaagaaggcggcgaacgcggtcggccgggatggccccgaccggctggagcggtgcgaggtcttcggcaagtggcgcgccaggttcggcatggcgggcttccgcccggtgtcgctcggctcgagcattgccgaagagctggtcggcgcccgcgtcggccatgtaccgcccgggttcacagtcaaggcggagaacggcgtgctccggttctgttggatggggcgcgcggtgaccgtcgcctccgcgtggcgctagaccacggcgggcggccgaccgcccgcccgggccattattgccgtcactaaattgtcagttacataattcgagctattgctttcctcgttctcccttcttcctttttttttaccttgattgggtgaggagtgatgagtttgccatgatctggtaaaaatccttcctagctgtagcgactcataattcttataactgctcatagtagtatatggaaaagagtaagttatatcgcaatctcctcctaattttgtgtggcatgttggtagaag

SEQ ID NO: 3504 - DNA, 1672 bp, Zea mays
  Clone ID: TF_ZmC14418_1
cgccgcagccgaagcgaccacacccgatggccggggcgccggcgccgaagctgccgtctttccctgggcctgtcgcccaggcgggcggcgggttcgtgtcggccttgaagcccaaggcggaggcgggtaacgacgaggcggccgctgcggtggaccagcttgccgaggcggccagacttgccgaggccggcgacgccttcggcgcccgcgagatattggcgcggctcaattatcggctccccgccgtgcccacggccgggacgccgctgctccgctcggccttctacttcaaggaggccctgcgcgttgcgctctccccgaccggcgaggcccttgcgcccccggcggtgtcgacgccgtacgacgtggtcctgaagctcggcgcgtacaaggccttctccgaggtgtcccccgtgctccagttcgcgcacctgacctgcgtgcaggcggtgctggacgagctcggggccgccgggcgcatccacgtgctggacctggacatcggcatgggcgagcagtgggcgtcgctgatgcaggagctggcgcagcgcagccccgcggcgacgctcaaggtgaccgcattggtgtcgccggcgtcgcaccacccgctggagctgaacctcatccacgagaacctgtcgggcttcgcccgcgagctcggcgtgttcctccagttcgcggcgtacaacgtggacgccctggaccccgcggagctggtggccatcaccagcggcgacgccgtggccgtccacctccccgtggggtcggcccacgtggccgcaatgccggccgtgctccgcctcgtgaagcggctcggcgccaaggtggtggtgtccgtggaccgcggctgcgaccgcacggagctgtcgttcagcacgcacctgttacaggcgttccagtcctgcgtgtccctgctggactccatcgacgccgtggggggcgcggacgccgaggcggtcggcaggatcgagcgcttcatggtccagcccgacgtggagcggcgcgtagtgtcgcgccaccgcgcggcagtggccgtggacaagccgccgccgctgccgtggcggaccgtgctcgcgtcggcggggttcgtgccggtgcaggccagcacgttcgccgagtcgcaggccgaggccctactcaagcggatggcgctgatggggttccgcgtcgagaagcgcggcggcgcgctctgcctctactggcagcgcggcgagctggtctccgtgtcggcgtggcggtgctgaccgccgggagtacgccgccgccgccgcaaccaagagccagccgtgaatctaccacaagcccgggttagctaggactaatgatcctactactgcaagcaaaaaaatattttccaccgtcgtcgtttgtaacgatctcatctggtctggtctcgtctgtctgcttattagtgtgtcctacccgattaatcgtggagtacgtcgtccgttgcctggctttgcagcctcggtgggctctgctcatgttgatttgcggagcgcgccgtggtttgcaggttgtaaaacgtaggcgtggtgcagtgcagtgaccagcgcatcctaccgcccgtcgtgttgctactcttttttttccattgctgtgaaatcaattaatggttatggcgtttgaaaaaaaaaaaaaaaaagcggccaaaaaaaaaaaaaaagccagt

SEQ ID NO: 3505 - DNA, 291 bp, Zea mays
  Clone ID: TF_701163921H1
cgagcttcctcggcgccgtcaaccacaggctcaaaccaagcatcgttgtcgtgatggagcaggacgctgaccacaaacgcccggcggtctccggccggcttggttgaggcgttcggctactacgcagcgctcttcggacggctcgacgccgtggcggctgccactgccactgccagtgccgccggcgaccgggcgcaggtggagaggatgtgcctgggggaggagatcaagaacgtgctgctctgcgaaggagccggccggctcgagcggcacgagaggctcagccagtgg

SEQ ID NO: 3506 - DNA, 1324 bp, Zea mays
  unsure (1)..(1324): unsure at all n locations
  Clone ID: TF_ZmC586135_1
aacctccaccccacccattcctttccttcttcccatcctcttcctcctcccccgctccccctcccgctccatctccttccattcccgtcccgcctcccgccctctccgtccggtctccgcttccctgctcgcgccgcccggccggctaatcaccccgcatcaaagaaaattgcattggttttggatttaatctgaggttctgaagaaagaaggcctcaggatatttagcttggcaggcccgtaggtgcttgagaggagctatgtcttttgtcgggcgagtagacccatcaacgacatacgcggataatatttatgtacataaatttggcgcacccaactcaaactttgctgcaagaagatttggctctgacacgcagttgttccgttatggccctgaaccattcaattccgaggactatggacatatgggtttccctgaagcaccatctgctgcattccagagctccttttacaaccagcaagcttcactaacaccctgctctgatgcagcaaaagactcaccggtgtgctccaatatctctcaacagaactcccagtctatatcagataatcagagttctggacttgaagtagagttcgatgatgagatcaggctgaagcttcaagagctggagcatgctttacttgatgatggagatgacatcttgttcgaagtttcccaggcgggttgcatcagtgatgaatgggccgatcccatgaaggatgtctcgcttgcaaattctccgaaagaatcagaatcaagcattagttgtgcaggcagcaacagcggagaagcacggaccccaaagcagttgctctttgactgtgctacggcattagctgaatataatgtagatgaagcacaggcaatcataacggacctccggcagatggtctcaatccaaggggacccttctcacaggattgcagcttatctagtggagggccttgctgcaaggatagtagcttcagggacaggcatctacaaggcattgacatgcaaggaccctccaactctgtatcagctgtcagcaatgcaanatcctctttgagatctgtccatgcnntatcgatttggtttcatggcntgctaattatgccatacttgaagcctgcaaaggcgaagaaaggatgcatattatagactttgacatcaaccaaggcagccagtatanttacactgatgcagtttatgaaagatgatgccaacaaaacacgccatttgagaataactgggtgtggatgatcacgagacagtacagaggactgttggaggtctgaaggtcattgggcaacgcctggagaagcttgcggaggactgcgg

SEQ ID NO: 3507 - DNA, 558 bp, Zea mays
  Clone ID: TF_jC-zmshLIB3569P012b04b1
cccacgcgtccgcgtcgatatccaacccggagaggataggcagcgttggtggaagtggcgctgcggcggtgtcggttggagaggaggcggcgctacggcagtatcggtcgaagaggaggcagcgttcgaggaagcatcttcgtggtggccatccgctactactaggcgttgttcgactcgctggacacgagctacggcgcgagctacagcgaggacagccccgagcggcacgcggtggagcagctgctgctatcgcgggagatccgcaacctgttggtcgtgggcgggcccgcgcccaccgacgacgtcaagttcgacggctggcacagtacaggttccacgaggcctcgctcgccagtagccccgcggcgcaggcgtccctgctactcggcatgcccctctatgcctgctcaccgcgtcagcttcgtggcattaacagtcgtttgtgagttcagttgccacgcagggctaaatcatcagttgttttgcatctgtaactagctgctcgatttggtcaccagttgggagaaaagaaaaggcggagacatttcttctgat

SEQ ID NO: 3508 - DNA, 1551 bp, Zea mays
  Clone ID: TF_ZmC1310_1
gccaagcgcacgtccgcagccgacatactccaggcgtaccagctgtacatggccgccatctgcttcaagagagtcgtcttcgtgttctcgaataacaccatctacaatgccgctctgggcaagatgaagatacatatcgtcgattacgggatccattacggcttccagtggccgtgcttccttcgatggatagcggatagggagggcgggccaccggaggtgaggattactggcattgacctgccccagcctgggttccgccctactcagcgcattgaggagacagggcgccggctcagcaagtatgcccagcagtttggtgtgccattcaagtaccaggcgattgcagcatccaagatggagtccatccgcgtggaggatctgaatctcgatccagaggaggtgctcatcgtgaactgcctataccagtttaagaacttgatggatgagagcgttgtgattgaaagcccaagggacattgtgctcaataacatcagaaatatgcggcctcatacattcatacatgcaattgtgaatggctccttcagtgcgcctttcttcgtgacaaggttccgggaggctctgttcttctactcggccttgtttgatgcgctggacgcgaccaccccaagagacagcaaccagaggatgctgatcgaggagaacctcttcgggagggctgccctgaatgtcattgcgtgtgagggcacagaccgagtggagcgccctgagacgtacaagcaatggcaggtgcggaaccaacgagcaggcttgaagcagcagccattgaaccctgatgtcgtgcaggtagtgcggaacaaggtcaaggattgctaccacaaggactttgtgatcgatattgatcaccactggctcttgcagggatggaaaggccgcatcctctatgccatctcgacatgggtggcaaatgatgccccctcttacttttagctgtttttttgtgactcacttgtctacaactttaggggccagtttggtacggcgcgtgcggcgccacggcgcgcctaagctgcggcgcccgaatcggccgccacacctgcggcgggaaaactatggcgcgccgtggcggcttagtccacgcaccaaacaacccctaggtttaggtatgtcatctagatatatctagtgacaagcgtgttcttggcccagttaatagccatggttacttggactctgcagtatgcctagtgccctagtgagaattcaacatgtacctgttctttccaagggtacattcagcttctgtggaacatgagtgacacacgggggatccagaagtcagaaggcataccgaaatctgtcctttgatttaatgtggattatatagatgctcatcactcagtcatgctgttgcatggtgctaaatatgatctagatctaggtcctggtctggataatgctctccacagcatctgctgtgcgtgtgacctgtgatcagttcagtcagttgatcaggttgtaaatgacacttgttcctctgtttccggcgcttactgcgctgtttcagacttaaccatggctattatgaag

SEQ ID NO: 3509 - DNA, 489 bp, Zea mays
  Clone ID: TF_ZmC26211_1
ggcttaccacgcatcagtgatcaccgagtcactgacgccttgcccggaaccaaattattgaccgacaacgcgatgctccaaggggtgctgtcccgcgcgcccgccaccgacgctgcggcagcaatgaaggccaagcgggcgggcgcgtcccccggtgaagaggaggaaggggacggccgttctgcgcgggggaagcggcagcagctgctcgggcttggccccgccaccgctttggcgtcggcggcggcggcggaggaagggccggagacgcgaggcctgcggctgctcagcctgctgctgcggtgcgcggaggcggtggccatggaccagctgacggaggcgcgggagctgctccccgagatcgcggagctggcgtcgccgttcgggtcgtccccggagcgcgtggcggcctacttcggggacgcgctgtgcgcgcgcgtgctcagctcgtacctgggcgcctactcgccgctcgcgctccgcccgctg

SEQ ID NO: 3510 - DNA, 1688 bp, Zea mays
  Clone ID: TF_ZmC5786_1
gcggccggccaggaggtgacaaagcatggatgctcacaccactcacattgttgcaagaaagaacacttcgctttcattcacctcaaatgagctcatggatcattttcccttcgcttggttacccatggaccccttcacagccatggcgctcagcggtaccctctcaccctcattctctaccacatctaccaatgataccatgtacaaccttaacccagcgttgtatgcatccctcgtgccaccaataaggaaacctgcaaccccgaccacagtagaggtagggaggcaatgcaaggaggaggaggatgcatccattcgcctggtgcacctgcttatcacttgcaccagtgccattgagactggtgactactcgatcgcacaaggaaacttgtctgaggcacgcaagattcttggagaaatcccaacttcgaccgggatcggccgtgttgggaaacacttcatcgacgcactagttcaacgcctcttcccggcatatccgcatgcagcaccaccttctccatctccttctacatcgatcgatctgcacaacaatttttatgatgcaggtccctacctaaagttcgcctactccactgccaaccaagcaatcctcaaagcaatcaaaggatacaaccatgtacacatcattgacttttccctgatgcaaggtctccagtggccggcactcatggatgtcttctccgcccgtgagggtgggccaccaaagctccgaatcacaggcattggcccgaacccaataggtggccgtgacgagctccatgaagtgggaattcgcctcgccaagtatgcacactcggtgggtatcgacttcactttccagggagtctgtgtcgatcaacttgataggttgtgcgactggatgcttctcaaaccaatcaaaggagaggcagttgccataaactccatcctacaactccatcgcctcctcgttgacccagatgcaaacccagtggtgcccgcaccaatagatatcctcctcaaattggtcatcaagataaaccccatgatcttcacggtggttgagcatgaggcagatcacaacagaccaccactactagagaggttcactaatgccctcttccactatgcgaccatgtttgactctttggaggccatgcatcgttgtaccagtggtagagacatcaccgactcactcacagaggtgtaccttcgaggtgagatttttgacattgtctgcggcgagggcagtgcacgcaccgaacgtcatgagttgtttggtcactggagggagaggctcacctatgctgggctaactcaagtgtggttcgaccccgatgaggttgacacgctaaaagaccagttgatccatgtgacatccttatctggctctgggttcaacatcctagtgtgtgatggcagccttgcactagcgtggcataatcgcccgttatatgtggcaacagcttggtgtgtgacaggaggaaatgctgccagttccatggttggcaacatctgtaagggtacaaatgatagtagaagaaaggaaaaccgtaatggacccatggagtagcaggaagaataaccatgtcatgagcaaatcgatcaagtaataaaatgcactgatgacatgcatggtgatctaaagtttttttgcgtgaatgtgcaatgacgaattgttcaatttgaataacctaatcatgagactc

SEQ ID NO: 3511 - DNA, 708 bp, Zea mays
  Clone ID: TF_701163921_FLI
aaccacaacgccccgccgttctccgcccgcttcgctgaggcgctcggctactacgcagcgctcttcgacagcctcgacgccgtggcggctgccactgccactgccagtgccgccggcgaccgggcgcaggtggagaggatggtcctgggggaggagatcaagaacgtgctgctctgcgaaggagccggccggctcgagcggcacgagaggctcagccagtgggcgatgtacatggacgcgtcagggttccgccgcgtcccgctcagcttccgcgccattagggagagtgagctcaagctcgcgagcttcgggatgagtgggtgccgctaccaggtggaaagcgacggccttctgctggggtggggctccacgcgtctctactctgtatcggcgtggaggccaaacaagtctgggaccagagagtgtacgtttaggagttgatatgtctgaatgtctgatgctgtatctgagttacttaattcataacaagcatcagttttagattgttatctggaaagaaaggaataggagaatctttcaagggaaaatcagcttcttgttgcccttcctatctgagaggtttctctagtttttcttaaggttgctgtgtgttttcttctgtttcttcttttcagttttgttgtggctgtgctcccattagcttcgtggtggtttgtaattgttgtatgtgatgtgatctctttcttt

SEQ ID NO: 3512 - DNA, 1237 bp, Zea mays
  Clone ID: TF_ZmC10148_1
cacctcgcggtcctgaagaccgccgcgaacccgcgcggggacgcggagcagaggctggtggccatgatggcgggcgccctgtcgtctcgcatccgacgcccacccgcgtctcaccagcacctcgcgggcctatgcggcgccgagcagcgcgcggaatggcagctgctgcagcacgtctccccctgcttcggcctcgccctccacggcgccaacctcgccatcctcgacgccgtggccgaccagcgcgccatccacctgatcgacttcgacgtcagcgtcgcgcagcacaccgccctcatcgactccctcgccagccgccgcgtggccggcacgtgcctcaaggtcacggccgtcaccgacccgacgtcgccgttcacgccggctctggcgcaggcgctggcggccacgggccagcggctcaaggagcacgcccggcaggcaggggtggagttccggttcagagcggtcagctgcgtcgccggagaggtcgaggcgtccaggtcgaggctcgggtgcgacgagacaggggaggcgctggtggtgaacctggcgttcgccctctcgcgcgtcccggacgagagcgtgtccccggccaacccgcgcgacgcgctcctccggggcgtgcgcggcctgcgcccgcgcgtggtgacgctggtggagcaggagctcggcgcgaacacggcgcctctggcggcgcggttcgccgacgcgtgcgcgcactacggcgcggtgctggagtcgctggacgcgaccctggggcgcgacagcgcgcagagggcccgcgccgaggcggccctggcgagcaaggcggccaacgccgtggcgcgtgagggccccgaccgggtggagcggtgcgaggtgttcggcaagtggcgcgcccggttcggcatggccgggctgcggcccgtggcgatcggccagggcgtcgccgaccgcgtaaagggacggctaggtcccgcagcacgtccgggattcgacgtgaagctggacagcggccggctcgcgatcgggtggatggggcgcgtggtcaccgtcgcctccgcctggcgttagccgtacgtagcacccctagtgatgagctaatcatcagctcccggttatcgacgcctatcattcagagtacctcaggaacagccgttgtgcaaccacgaacgaatgcctagtagttgtaacaataatctctctaattttttacggcaactggtcgttggaaaaaaaaaaaaaaaaaagggcccgg

SEQ ID NO: 3513 - DNA, 1554 bp, Zea mays
  Clone ID: TF_ZmC5043_1
cccagcgtccggaaacacatgcaggatctgcgcatcgccatggatagcgagtctgagaagagtgtgaggagggtgagtgggaagggggcacgagggaagcagcatgggaatgagtttgttgacctgcacaccatgcttatccattgcgcacaggcaatggccaccggtgatcgccgaagtgcaaccgagatgctgaaacagatcaagcagcactcctctctcaggggggatgccacacagaggttggcctattgttttgcagaaggactggaggtgcgacttgctggcacagggagccaggtgtaccagtccctcatggcaaaacgcacatccgttgtggagttcctcaaggcatacaagctatttttggcggccatcagcctcaataaggtgcatatcatcttctccaatgggaacatcgtggatgccgtggcagggaggagcaagttgcacattgtagcatatggtgtacagtatggtttacagtggccaggcttgctacatttcctggcaggtagagaaggtgggcctccagaggtgagattcaccggcattgaccttccacagccagggttccgcccagcctaccagattgaagaaacaggccgccggcttagcaactgtgcccgtgaattcggtgtgccattcaagttccatgctatagcagcaaagtgggagatggtctctgccgaggacctgaacattgatccagatgaggtgcttgttgtgaacagcgattgccacttgagcaacttgatggatgagggtgttgacgctgacaccccaagcccccgagatttggtgcttaacaacattcggaagatgcgacctgatattttcatccagattgtcaatagtggcacatatggtgctccattcttcctcacacggttccgggaggcactgttctactactcagcactatttgacatgctggatgcaaccattccccgggataatgatgaacggctgctgatcgagcgggatattgttgggcgatctgccctgaatgttattgcttgtgagggtgcagacaggttggatcgccctgagacttataagcaatggcaggtgcggaaccaccgggctgggctcaagcagctaccgttgaatccagaggttgtaaagcttgccagggataaggtcaagaaatattaccacaaagactttctcatcgatgaggatcgccaatggttgttgcagggatggaaagggcgggtcctctttgccatgtcaacttgggttgctgaggataataactccaccttttagctgcttcactttgtcttgttttggattatgagtgatattgatgtttgatggatggtctgtgtctttattttaccaccaaactacgacccagcatctgtggcccgctggacttctgtttctagagggttttagtgctgaaactttgtaagctagtagaaaaataagtagatgcttagaggtacataggatgctgatatatttctggatatgttgcagaattgtgatgtgtacatcatctgtaactgataaaagcaattttattgattacttaatcgacctttt

SEQ ID NO: 3514 - DNA, 3567 bp, Zea mays
  Clone ID: TF_ZmC2910_1
cctcgaggccggccgagcagagcacaccatcctcgcattattcttttcggatttgctccacccctccacccccatgcccgtgtccatctcaggctgcgtcacatcatcgccgccacacccagcaccagcaccagcaccagcggcggcgcaccaccaccggtgccatcgccagcgccagcgctagcgccggcgcaagcggaggcccgggcgacgcggactgggcgaagttactggccttcttttcgtcagcggcgttccttgccatcaagctaaggtcttccagcaaggttacgtggagtttaccaatgggtctggataatacttatggcgacctatctggcatgttctatggaggcctgtcttatgatggctacacagaccacagcagcgcaaacgattacttcagatttgccgatccacttcctgccactgtgccccagatggcagcagaagcctgttcaaatccttcctccactgtgtcaagggccaatactgaaactgacaacccagaggattgggaattcatctcagatgagtccctcgactatatcagccggatgctcatggaggaggatattgatgagaaagttagcatgtaccaggcggagtcagcagcactgcgtgctgctgcaaagccgttctatgacattcttgggcacaagtttccaccgtctcctgaccgccagctgatctcttggtccatggacagccccagtgagagtagcagtagcatctgcacacaatctgtggcaagtactgtcactagcagcagtttcggcacgagagtggatagcaaccggcgctatgatgttggacttagtgagcagctggaagctttccgaggcttgtgtggtcaggcttcgaatccacttgttggtacatcaagtgatgcttccaatgcagtggatgagctagaagaccttttgatcacgaatggtgggatccctgagtatttgtttgagagccttccaacttgggatttcaggagaggtattgaggaagcccagaagagtcttcctgttagcgataaactagtaattgatttagaaactggtggtattgcaagaccccaagaagcaaggaaagatgttcctttgaatgccaaaaaggacgatgtattgaaggccaagaaaaatagacagagtgaagaccttgacctgatggaaggccggaacattaaacagtctgcattttgttccgatgaacctggttggattgagatgttcgatgatctgcttcgccaaactgagaagaaggctacagttctgcgagagctgatgcgtagtgaagcttccaagaattctcaggtcactcagacgaaaggaccaagtgggccacggccgcggggaaggaaaccaacaaagaatgatgtggtggaccttaggaccatcctcatccactgtgcacaggcggtggcagcagatgaccgcaggactgctaatgaattgttaaagcaaataaggcaccattccaagccaaatggtgatggaacccagaggttagcacattgttttgcagatggtctcgaggctcgcttggcaggcacagggagtcagctttaccgcaagcttatagcgaaacgtacaactgcctcagacatgcttaaagcctaccaccttttccttgcagcaagcccatttaagagactttcacattttctttccaatcaaacaatcttgagtttgactaaaaatgcatcaaaggtgcatatcattgactttggcatttattttggattccaatggccatgcctaatcaggcgtctctccaagagggaaggtggtccacctgttctgcgcatcactggaatcgacgtacctcagccaggtttccgccctaccgagagaattgaagagactggacaaaggcttgcagagtatgctgagaagttcaaggtgccttttgagtatcagggaatagcgtcaaagtgggaaagcatccgagttgaggatctcaaagttggcaaggacgaagttgtgattgttaattgcctatacagattcagaaacctgattgatgaaacagttgctgtagacagtcctaggaatagagtgctcaacaccataaggcaagtaaacccagcgattttcatccatggaattgtgaatgggtcatacagcgttcccttcttcatcactcgtttccgtgaggcgctgttccatttctctgcattgtttgacatgctagagacaactgtcccacgggatgatgcacagcgtgcactcatagagagggaaatgtttggccgagaggcactcaatgttattgcatgtgagggctcagacagagttgagagacccgagacatataaacagtggcaggtgaggaacctcagggctggatttgtccagtctccgttaaaccaagaaattgtgatgaaagccatggacaaagtaaaagacatttatcacaaggactttgtcatagatgaagacagcggatggctcctgcaaggctggaaaggaaggatactctatgcaatatctacctggaagcctaagaataactaggttcttggtctcacatgttacgtttcctattccattgatggtagcagctaattaaccagtcctgctatgttatagcatgtggaccttgacctgtgaacctgtctgatcaaggaaatggcttgaagacggataatgatcaacatggagctttgctagcttcacatctgtccagccagtactctgatagactgggtgtagacctctctaccttggtgttggtaccatcacttttattaaatttcgtagttttcttctttccatttacttctatgatcggcctggcgtcctattagcaataaccagatcactgcttctagttaattggttagccaaactacctactatcttgagcttagtatttttgacttgtatccatccatgttgaacattatttggttttcagcaccagcagataaaaaattccccaacgaggaagcatgaagcatctaaatttgttatacgagaatggacgctgctgtttgtgtggaatgtagtatctcatggagtgctttgcctttgaaataaaaaaaaaaaaaaaaaaaaggtcgaggggtcagaaacccattttttatttcatctctttgtagcaagtgatgcgtgctgtcacaaaatgactctttaaacttgagtggagcactagtttgagaatatcgctagaaagtggtgctacagattttcggagacgactagcgaatgcaccacaagggcatgatatcagtgcaatgcgaccactatcagtatcttcatttgataacgcattgttttaggcttttgatccttccagtccattctcttttatcgtacggttttcagatctgccatgtctaacatttatctaggaatatctggagtttgattatcataaaacttcatctcctatgaaactcactcttcattaaattacatgttaaaaggctgacgcgggctcaaaaaaagatggctcgactgtcagccaccgccgcgctcctcctcgtcgtcatctccctcctcaccgtcgcgcactgcggtggccctcgcagtcgcagcagagcacgacaccgggcccgaataacccgcg

SEQ ID NO: 3515 - DNA, 2636 bp, Zea mays
  Clone ID: TF_ZmC1155_3
aattcggcacgaggctttttatacacaaagaaagtaactgaccaaattctttcatccgggaaacaagatcatctggttttcgaacgggctctaatctttcttttgtacatcgatccgttcgttcgttcattcgtacacagcagcagctcacctcacacgatacagggaaagaaagatcctctggccgtatccagatagcacggagagaggcagtgaggagaggggaagtgggagtgaggagtgaatcggcagagaggaggaagacgaacaagacgacgaagacgaagccacagaggaggtcaggagggcagagcagaggagagtaggtctcttcttgccacaccgcttccggccgcgtctccgggatgttggctggttgctccttctcgtcgtcgaggcatcagatgagcaccgcgcagcgattcgacatcctcccctacggcttctccaagcgggcgagcaaccgcggcgatggctccggcgccgcgccgcgcgtcgcggcgcccgacgccaggagcggtggcggcggcggcacctgctccttccgcgcccacccggcgccgccagtcacgcaggccgtttcctggggcgccaagccggagcccggcggcaatggcgctgcgtgggagaggagcagggccgttaagcgggcccatgaggaagacgcaggcgaggagtacggcggccccgtcgttcgcgccaagcggacgaggatgggcggggacggggataaggtatggttccatcgatccattgcagggacagtgcaagcggccgggtccggcgacggacacgaagccgaggaagagaaggccttcctggtgccgagcgccgcggcgttcccccacggcatgtccgccgccgccgcgggcccgtcgctggccgtggccaagaaagaggagttcagcaagtcgccgtccaactcgccggcctcgtcgggcggcacggacggcggctcgtcggctgtcccgtggccggagcagctccacgcgcagaacggcgccgcggcgcgggtggaggccatggagctcgtcgtcgcgctcaccgcctgcgccgactccgtcgccgcctgcaaccacgacgccgccaactactatctggtggggcttggcgagatggtttcccccgcgggaatcacgccgagcaccgctgtctgcctactcctcggaagcgctcacgctgctgaggatgctcaaaggtccctgcgcctaagcgttgaagacgcagcgtcataacgcttaagtatcagtattaacatcttacaatgtccctatccttcgtatcataaaggaccttcatccgatcccgcccatcctgcacttcaacctgaacgagcggggtggccgcgcgttcgacggccacgaccgcgtccacgtcattgacttcgacatcaagcaggggctgcagtggccgggcctcctccagagcctcgccacgcgcgtggctcccccggcgcacgtgcggatcaccggcgtcggcgagtcaagacaggagctgcaggaagtaccggcgcgcggctggggcgcgtggtcgccgcgctcgggctcgcattcgagttccacgccgtggtggaccgcctcgaggacgtccgcctgtggatgctccacgtgaagcgcggcgagtgcgtcgccgtgaactgcgtcctcggggcgcaccgcccgctccgcgacgagaccggcgccggggtggccgaacttcgtcggggtcacgcgcagcacgggcgccgccatcctcctcctgggcgagcacgaggacgccctcaactccgggcggtgggaggcgcggttcgcgcgcgcgctgcggtactacgccgcggcgttcgacgccgtggaggcggctgggctggcggacgccagccccgcgagggccaaggcggaggagatgttcgcgcgggagatccgcaacgcggtggcgttcgaggccgcggaccgcttcgagcggcacgagaccttcaccgggtggcggcagcgcatgcaggaaggcgggttccagaacgccggcatcggcgaccgggaggcgttgcaggggcgcatgatcgcgaggatgttcgcgccgggcaactacagcgtgcaggtgcagggcgacggcgaggggctcacgctccggtggatggaccaggccatgtacaccgtgtccgcgtggacgccggtcagcgacgggggcagcacggtgtctgcgtctgtctccaccacagcatcccattctcagcatagctgaatggggggaagacacaaggtgaagtgaagaagaaaagaacatggtttttcagtggttcttttgctgttactgaaaacttagttcattatacagtctgacaattcttttatacaatcagaagaacaaaaaaaaagaagcaaaggagtaagaaagatttgtttgtagctttgtttttataggtgataggataaaagattcaattgttagtagttgtaattctttattctttatgtacacttgtcattctttcaccatgtctgtttagcttgtaatctctgttccgagttagaaggaaatggaataaacaagtatggttttcattcatctgaacattttgtcaggtgggaaatcggctatgccctctctattagtgatcttgctgtaatagtgaaagcaaaggattttttagaccaatactc

SEQ ID NO: 3516 - DNA, 1195 bp, Zea mays
  Clone ID: TF_ZmC5780_1
gcagagccgccgcgtggcggtggcgttccaggcgtacaacgcgctgtcgccgctcgtcaagttctcgcacttcacggccaaccaggccatcctgcaggcgctcgacggcgaggactgcctccacgtgatcgacctggacatcatgcagggcctgcagtggccggggctcttccacatcctcgcgtcccgcccgcgcaagccgcggtcgctccggatcaccgggctcggcgcgtcgctcgacgtcctcgaggccactggccgccgcctcgccgacttcgcggcctcgctcggcctcccgttcgagttccgacccatcgaggggaagatcgggcacgtcgccgacgccgcggcgctcctcggctcgcgccagcggcggcgggatgacgaggccaccgtggtgcactggatgcaccactgcctctatgacgtgacggggtcggacgtgggcacggtgcggctgctccggagcctgcgcccgaagctgatcaccatcgtggaacaggacctgggccacagcggcgatttcctgggccggttcgtggaggcgctgcactactactcggcgctgttcgacgcgctgggagacggcgccggcgcggccgaggaggagtcggccgagcggtacgcggttgagcgacagctcctgggcgcggagatacgcaacatcgtggccgtaggggggcccaagcggaccggggaggtgcgcgtggagcggtggagccacgagctgcggcaggccgggttccggccagtgtccctggccgggagccctgccgcgcaggccaggctgctcctcggcatgtatccgtggaaggggtacacgctggtggaggaggacgcgtgccttaagctgggctggaaggacctctccctgctcaccgcgtcggcgtgggagccggcggacgacgctgccgcttctgcgcccaccggttaacgagtacaagacaagatttttgcagcaggtagattatgattttggaattccatttcatgcctgctgccagcctcgcagccatccttggtggactggtcgtcttctcttcttgctgccgccctgctcgtgtaggcgtcttgtgagtttgtttttgtgatataatcgtataggcttcggcattcctttcgttctcctacctccagtatcaattaccaaatcaactttggattttgaatatttagtatactgcagctttgagtc

SEQ ID NO: 3517 - DNA, 1178 bp, Zea mays
  Clone ID: TF_ZmC3644_1
cccctacctcaagttcgcgcacttcacggccaaccaggccatcctggaggccgtccagggctgcaagcacgtgcacatcatcgacttcagcatcatgcagggcctccagtggccagcgctgatccaggccctcgcgctccgccccggcgggccgccgtcgctccgcctcacgggcattgggccgccgtccccgccagggcgcgacgacctccgcgacgtcggggtccgcctcgccgacctggcgcgctccgtgcgcgtccacttctccttccgcggcgtggccgccaaccgcctcgacgaggtgcggccctggatgctgcaggtctcgcagggcgaggccgtggccgtgaactccgtgctccagctgcaccgcctcctcgccgacgctccctcgtcgggcgacgcccgggcgcccatcgacgccgtgctggagtgcgtcgcgtccgtgcgccccagggtgttcacggtggtggagcaggaggcggaccacaacaagccggggttcctggaccggttcacggaggcgctcttctactactcggcggtgttcgactccctggacgcggcgagcggcggcgcgggcgacgcggcggcggaggcctacctggagcgcgagatctgcgacatcgtgtgcggcgagggcgcggggcgcagggagcggcacgagccgctgtggcggtggcgtgacaggctgggtcgcacggggctggccgccgtgccgctgggggccaacgcgctgcggcaggcgaggatgctggttgggctcttctccggggaaggacactgcgtggaggaggccgaggggtgcctgacactgggctggcacgggcggccgctcttctcggcgtccgcgtggcgcgcggaagagaacaatcagagtgacagcaggagcaggagcagcggcagtgaggagagcaatatcagctgcagcagctagagcgtcgctactttactgtaaattccttcggtgagaggctagtagcggggtttactgtaaaatcgcggtgcccgcgatccaaatggttcgattgagagagcgtcggcatcggtcgtaaatggcagactgaaaaaaaatgacatggaattctgttaggcatgtcgtcgttagctgaataaacggcactgaaacagcgtccctggaaaaacgccattgcaatgcagtcgtagaagctctaaaa

SEQ ID NO: 3518 - DNA, 1039 bp, Zea mays
  Clone ID: TF_ZmC3871_1
gttctccaacctggccatctgcaaggccgtcggcggcggcgggaggaagaaggtgcacatcgtggactacggcgaccactactacgggctccagtggccgtcgttgctgggctactggggtagcctggaggctgggccgcccgaggtgaggatcaccgccatcgacttccccgagcccgggttccggccggatgctcggctccaggcgaccgggcggcggctcacatgcttcgctcggcggcatggcgtccccttgaggttccacggcatcgcggccaggtgggacgcggtttcggtggacgagctgagcatcgagcgcgacgaggtgctcgtcgtgaacggcctgttcagtctcggtaggatgcaggagcaggagcaggacgacgtggatagggatagccggccgagccctagggacacagtcctcggtaacgtccggaagatgcggcccgacgtgttcgtcctgtgcgtggagaacagctcgtacggcgcgcccttgttcgtgacgcggttccgggaggcgctcttctactactcggcgctgttcgacatgatggacgcggtggcggcgcgggacgacgacgaccgcgtgctggtggagcagcacctgtttgggcagcgcgccttgaacgccatcgcgtgcgagggctcggacagggtggagcggccggagacgtaccggcagtggcaggtgcggaacgaacgggcagggctgaggcagctcccgttggatcctgatgcggttcgggccatcagaaggaaggtgaaggacaagtaccacagggacttgttcatcgatgaggatcagcagtggctcctgcaagggtggaagggacgagtactctacgccatgtctgcgtgggctgcaaaatgatacgtacactagtttaacaaagttcaaagaaaacaccattaatatctatggctcatgttcaaaaaacgtttgattccgagaattgtaatctttcttcttcttttttatgaagggacgtagaaagagtatataattaattttatggattacttgtttgactgtcct

SEQ ID NO: 3519 - DNA, 1536 bp, Zea mays
  Clone ID: TF_ZmC6882_1
cacagaggctggctcattgtttcgccatgggactggaggcacggcttgcaggcacggggagccaggcgtaccagtcgctcatggcacaacacacttcggtcgtggaatttctcaaggcatatagcctttacatggcagccagctgcttcatgaaggtgaggttcatcttctccaacatgaccatttgcaatgccgtggcagggaggagcaagttgcacattgtggagtatggtgtgcagcatggattccagtatccaggtctgttccatctactagcaaggagggaaggtggaccgccagaggtgagggtcaccgcgattgctgtcccacaacccgggtttcgcccagcacaccagattgaagaaacaggccgccgtctcagcaacattgcccgtgagatgggtgtgccattcaagttccgcggtattgcagcaaagtgggaggccgtccgtgctaaggatctcaatattgatccagatgaggtgcttgctgtcaacagtgagtgctatatcggcaacttgatggacgagagtgttttggtggacagcccgagccctagggatacggtcctcaacaacatccgcgagatgcggcccaatgtgttcgtccacactgtcgtaaatggaacatatggtgcaccgttctttttgacacggttccgagaggcactcttcttcttctcggcacagtttgacatgatcgatgcaaccatccctagggacaataatgaacggctgctgatcgagcgggatatctttgggacatttgccctgaatgtgattgcttgtgagggtgcagacagggtggaacggcctgaaacttataagcaatggcaagtgcgaaaccacagggctgggctgaggcagctgccactgaatccagaggttgtcaaggcttccagggacaaggtcaagaactattatcacagagactttctcatcgatgaggataaccgttggttgctgcttgggtggaagggacgggtgctctatgccatgtcgacatgggttgctgaggataataagcccatcttttagtgtgcctgaatccaactgtagattatattgatattttgatcgaagggttatgttgaaccatgatccaccacatgttgtggttcagtggacttatgtttctagagagtttattgctgaaacctgtgaggtagaagcaattagatgcttagagctacataggctgtagatatagttcttgatatattcctgcagagttgtaatcatgtgccatgtacactagaattaaaaccctgcagctgacaagtggttacacgtttgacctctgaaggcttaaaccctgaaaagtatctaatgatgcatggtatgaaggtagatgatatatgttcaaactatgtttctagagggtttagtgcagaaacttgtcaggcagaaataagtagatgcttacagctagctacaaaggttgtggatatagttcttgatatattgcagagttgtaatattatatactatgtacaccagaacttgtaatagtatagtatactatgcacacagaatt

SEQ ID NO: 3520 - DNA, 743 bp, Zea mays
  Clone ID: TF_ZmC5784_2
cccaaggtggtgacgatggtggagcagaacttgaggcagtcggggtcgttcctggcacgcttcgtggacgccatccattactactgggcgctgttcgactcgctggacgcgagctacggcgaggacagccccgagcggcacgtggtggagcagcagctgctggcgcgggagatccgcaacgtgctggccgtgggcgggccggcccgcgccggcgccggcggcgccaggttcggcagctggcgcgaagagctcgcgcggtctgggttccgcgccgcctcgctcgccggcggcgccgccgcgcaggcgtcgctgctgctcggcatgttcccctccgacgggtacacgctggtggaggagaagggcgcgctcaggctcgggtggaaggacctctgcctgctcaccgcgtcggcgtggcggcccgtccagacgccgccgtgccgttgagagctgaaatcgttgttggttacccagccagtggtagatcttcttcgtactatactcctgcttgagtttcttgtgccacttcttttgcatctgtagctagctagctggctgctcgatttggtcgtcagttccgagatgggaaaacgaaaacatctcttctcgtcactaatcgctagatccattcacagtgatagttactgatgtaagcctactaattagtttaatggcagatcaaccttgtttagcctaattagttacttggtactactgttctttaaaaaaaaaaaaaaaaagcggcc

SEQ ID NO: 3521 - DNA, 1888 bp, Zea mays
  Clone ID: TF_UC-ZMFLB73073F08_FLI
aatttgaactgatctttgagaaaaatgtgatagtttttgttagcaacttttatgtatattgatagtcacttgtgttccaaaagaagctgcttccttcagctgagtatccatgtggaagatgaggtccatagatgacgtcttcagaatgtgggagatgaggtccataaacaacgttcccattcataagtgtcatttggttcacctgcggtgttgcttgataagcatttggagcattaacttgattgggggcgttaacatggggatgaatatttgcattggtatccttctggttagcctttggcttgctcctagcagtccgtttgttctccacaggactgtctgcagtcagcctgcccatttgctgctggatttcattcagtggactactggacagttttgacctgacgcttcttttggagctagaggacttgtactcaagacggtacaaggcgagggcatcagacttttgatgttccaattggctaatcccatgcaggttattgaactgatcttcattagttcagaaatatttattttgtaatcatcaccacaaagaaaatcatcaatacaaagttcacggtctatatctatatagtacatctgatgagttggcgactggaaccagaagcgccaggagcagctcggcggcagctacagcctgcagcccgacctctttggcttgcccgcgtcacctgggccagtgcctgggcccgcacagccaccaccgcctatattgctgctggggcgacacctgctgcgcagcctgcgacggcgacctctcatatgttgattggctttatcctctcccattcaatatagtttgcctggtctttatctgtcttccacatttgaaatcagtgttcgatgtatccaaacccacattttggacctaccatattgtactcatccagccatttctcttcctcgcaagccagcagccacttgtttatcttctccatgatttctctcctggacggctcctccctggctttccgctatctgttcgtcaatgctggtcaggagcttagaaggattcacgagacctggtaaattttgtcagcgttaaaaatatcaagccatctgaaccagagtcgatcagtaagtacatgtactgtaaacaggaatgtcagattctgcagagaccatgtcacgacaggtagggaaaaccacatgatggctcatcagattcgcaaattcatttcttggtactgagattgaatcgaaccgatgtacttgaaaaaagaagaaggaaagaacaatcagggcccatgtaggcttgcagatcccatttcaccctcgcatggcacccgacaaggaggatgtacgccgtctccactcctttgcctcatcctcctcactgctgccagccactatttccacttcaccgttcccttcctcgttgccggcaaggaggttggtgtgcgcgctgactgacagcgtgatgttacggttggacatcgcgcccctcatgcgcagcctcagcgccgatgctgtggagctaccagcgcgctggtacgcatagtggaagcggtcggacccggactccgcatatgcgccgtggtagtacggttgctgcccccgcgacgtcgccggggaggcggggaggacgagccaacggccaacgcacagcttgtagtgccagtttctgcttctcccggacgaagtcaaggtacattcctgaagtgggttaaatccatgaaccccgccgtggtgaccatcgttgagaaggaagccaacagcaccggcagcgacgactgctccgatgacctgccatagcgggtgaccgcggcgatgggctactactcgacggtgttcgatgccctagaggcgacggtgccgtcgggcagcgctgaccgcctcttggtggagagcgaggtcctcggcagag

SEQ ID NO: 3522 - DNA, 720 bp, Zea mays
  Clone ID: TF_ZmC12034_1
cccacgcgtccgcgcgcgtcgagcgctggctcctcggggaggaggtgaagaacatcgtggcctgcgacggcgcggaccggcgggagcggcacgagcgcctggaccgctgggcggcgcggatggagggcgccggcttcgcccgcgtcccgctcagctactacgcgctgctgcaggcccggcgggcggcgcaggggctgggctgcgacgggttcaaggtgcgggaggagaagggcgccttcttcctctgctggcaggagcgcgccatcttctccgtctccgcctggcgcggccgtcgcttcgactgatggaggaacgcgtcgacgccttcccgtatttgtgcggaggaggagacgggccgcccgtcgtggcgttgcgcgtcaggtggccgtcacgcacgttggggcttcttttggtcgttttgtgtgttcagtttacgccgtatctagttagatttcaatcaggtttgttcatagtgtacccctgccgctctccaatttggatggatggaatctcatgcttgtttggatcagtcagtccttttagatctgttaatgtaacaactagagctgcttaacagctactatctcactcggtcccggtcccggtcctataacaagcgtggtaatgtacttgtggagtttcaaattttctgacaattatggacatttgtaacaaacacttctggagtttaaaatttgatgcatggattagatttgtttt

SEQ ID NO: 3523 - DNA, 760 bp, Zea mays
  unsure (1)..(760): unsure at all n locations
  Clone ID: TF_LIB4766-041-R1-K1-G12
attgggacctcgagccggcctatctccgatccctcgagcaccaagccgagggaaggtgaggagcgatggcgcgcggcgtggtgtcgccctccacgccgccagcgccgccatcgtcgaagcggtgggcgaccaccgcgccatccacctcgtcgacttcgacgtcagcttcccgcagcacgcggctctcatccagtacctcgccgaccgacgcgtgcagggcaggtccctgaaggtcaccgccgtcaccgacccgagctcgccgttcacgcagtctctaaccgcatcgctaccagccatcgaggagcggctgaagaagctcgccgagcgagctggcgtggagtaccgctttacagtggtcagctgcagagcagcagagctggatgcgtccaggctgtgctgcgagccgggggaggcggtcgcggtcaacctcgccttcgcactctcccacgtgcccgacgagagcgtctctccggccaacccccgcgacgagctgctccgccgcgtgcgcgcgctgggcccgcaggtggtgaccctcgtcgagcaggaactgaacaccaatacggcaccgctggcgacgcgcttcactgacgcgtgcgcgcactacggcgccatcctggagtcgctggacgcgacgctggcgcgggagattgcggagaaggccagggccgaggcggccctgtcgaaaangcggcgaacgcggtcggccgtgatggccccgaccggctggagcggtgcgaggtcttcggcaagtggcgcgcca

SEQ ID NO: 3524 - DNA, 349 bp, Zea mays
  Clone ID: TF_LIB3205-014-P1-N1-C1
atagagtaaataactcttttcacaataagagttattcatacagtgacggtatttaattatgaaagttggctaagtagctgaccgccggcggcgcgggccggcccgcccacggccagcacgttgcggatctcccgcgccagcagctgctgctccaccacgtgccgctcggggctgtcctcgccgtagctcgcgtccagcgagtcgaacagcgccaagtagtagtggatggcgtccatgaagcgcgccagcaacgaccccgactggctcaggtcctgctccaccatcgtcaccaccttgggggccagcctttggatgagccagagcgtgttggagtcggagccggtgacgt

SEQ ID NO: 3525 - DNA, 323 bp, Zea mays
  Clone ID: TF_LIB3591-101-Q1-K6-E2
ggtccgacattcccgggccgcgccgaagccggcagcgcttcatggtcgagcgcggattcttcaggcagtgcgccctgaacgtcgtcgcctgcgagggcgtggacagggtggagcgccctgagacgtacaggcagtggcaggcgcggaaccggcgggcggggctcaggcagcttccgctggatccggacaccgtgagggcgttgagggagaaggtgagggagcagtatcacagggactttgtaatagatacggatcgagattggatcctgcaaggatggaaggtacgcatactatacaccatgaagacatgggttgtggatgac

SEQ ID NO: 3526 - DNA, 1252 bp, Zea mays
  Clone ID: TF_ZmC1420_1
ggcggcactcctcgcccacgggcgacgctgcgcagaggctggcgcactgcttcgccgacggcctggaggcgcgcctcgccggcacgggcagccgcttgtaccagtcgctcatgctccgccgcacctccgtcgccgacttcctcagggcgtaccgcctctacatgaccacctgctgctgcaagagggtggcgttcgccttcgccaacaagaccatccacgacgctttcgcgctcgccggcaggcgccgccggctgcacatcgtcgactacggcctcggctacggcttccagtggcccgggctgctgcgcggcctcgccgccagggagggcggaccgccggagctggtcaggatcaccggcattgacctgccgcagcctggctttcgccccgcacagcagatcgaggacaccgggcgccgcctcagcgattgcgcacgtcagctgggcgtgccgttcgagttccggggcatcgcggccaagcgagaggcggtgtctccagaggacctgggcatcgacccagctgccgaggtgctcgtcgtgatcagcctctgccatttcaggctgctcacggacgagatcgaggtcgagatcagctcctccgccgccgccgccgggcctagtgggcgtcgtcgtcccaccgccagggaccaggtgctctgcaacatccgccggatgcggcctgacgtgttcatccacggcgtcgtcagtggcggctacggcacgacctacttcccgacaattcggcacgaggcgatgttccactactcggcgcagttcgacctgctggacgccaccgtgcctcgggacagcccggagaggctgctgctggagagggacatcttcggccgcgccgccatgaacgtcatcgcgtgtgagggcgccgaccgagtggagcgccccgagacttaccggcagtggcaggcgcggaaccgtcgggcggggctcaagcagctccagctgcaggctgacgtcgtgaaggtggtgagggacaaggtgaaggacaagtaccatagggacttcggcatcgacgaggaccaggggtggttgctacacacgtggaagggacgtgttctctatggcctatccacatgggttgcacaacatgctgacccatgactaaaggccctctatggtgggcctccaacagctcctagaaaaatctaataacggggaagcttcttgatgggctttttctagaaatggagaggagctcctaaaaaaactaatagaaggggcctaaaatctctgtcacc

SEQ ID NO: 3527 - DNA, 812 bp, Zea mays
  unsure (1)..(812): unsure at all n locations
  Clone ID: TF_LIB4767-051-R1-K1-A11
cattgggaccctcgaggccggccgggataacaattttgtcccagtgaggattacatgattactgctcttttgggtgactatagttactggccaccctgatatttgatacaattgatctttttttatctcatgctaaagaaatttggtggctggtggatctacttaagaatcaaaagtcagacaaggtggacatcaccatccaaccggaggagcaggaagccatgaatgatgttctagcagccaggtgacgcctgatgtctttgttcagttgatatagttgtctgattttttccttcttccaagttagaacggtctttcttgtacgtgtatttctacttcaccctcaacgaccgggtgctccgcgcgttcggcagccatgaccgcgtccacgtcatcaactttgacatcaagcaggggctacagtggccgggcctcctccagaaaaagaggaattgaagcagtatctgactcgaacatttttgtagaaaacttggtagaaaaagaggaattcctgcatacattttcgaaggaatgtgaatatatcagaactgcagtgacaaatggtagtgccattaagcatgatggctcatatgaatcagatcctgcagttgagattgttcgagttgaactccaaggtgctgctgcatttcttttattctcgtctggtacctcttgtacttcttctggttgaaggttccacgcctatatatattggagaacatggatggggaatgcttctggtagtnaaaagggcacacaagaggctggttcaaaattgaactgctaggtttgcatctgtgcataactctatc

SEQ ID NO: 3528 - DNA, 1593 bp, Zea mays
  Clone ID: TF_ZmC1439_7
gaactactctcaccattaactataacaaattttgtcaccaaaatttggtggctggtggatctacttaagaatcaaaagtcagacaaggtggacatcaccatccaaccggaggagcaggaagccatgaatgatgttctagcagccaggtgacgcctgatgtctttgttcagttgatatagttgtctgattttttccttcttccaagttagaacggtctttcttgtacgtgtatttctacttcaccctcaacgaccgggtgctccgcgcgttcggcagccatgaccgcgtccacgtcatcaactttgacatcaagcaggggctacagtggccgggcctcctccagaaaaagaggaattgaagcagtatctgactcgaaaacttggtagaaaaagaggaattcctgcatacattttcgaaggaatgtgaatatatcagaactgcagtgacaaatggtagtgccattaagcatgatggctcatatgaatcagatcctgcagttgagattgttcgagttgaactccaaggtgctgctgcatttcttttattctcgtctggtacctcttgtacttcttctggttgaaggttccacgcctatatatattggagaacatggatgggaaatgcttctggtagtaaaaaaggcaacacaagaggctggttcaaaatttgaactgctaggttttgcatctgtgcataacttctatcattatcctgagagtattcgcttacgaatcagccagatacttgtgttgccaccttatcagggtgaaggccatggtcttggtcttcttgaagcaatcaattatattgcacagtctgagaacatttacgatgttacaatagaaagcccttctgattacctgcagtatgtgagatcatccattgactgcctctgtttgctcatgtttgatccgatcaaacctgcacttggtgctattgtctcgtctctgaaggagaccaacctgtcaaaaagggcccaaagtttgagaatggttccaccggttgacctgatggagactgtccgttagaagctgaagataaagaagaaacagttcctccggtgctgggaaattctggtcttcctaagcctcgactctcaggatcataagagcatggacaacttcagggcctgcatatatgacctcatgaagggggagatccttggcagtgcctctggaactaacaggaagcgtctattgcagatgccaaccagtttcaataaggaggcatcttttgctgtgtattggacacatgagattggggatgtggatgaacaaactgtttagcagcagccagaggatctcaggacgcaggagcaacagctcaatgagctcgtggacatccaaatcgaggagattgatggggtcgccaagaacgtcacttcacgtggcaaggataagatggcagagctggcggttcaatgaatctgggtgaggttcctacttcaaacgatgttaaaatgttgtcgtagcttatctggtgaggtctcttttacgagttggcttcttggtagaaagggaatgtcacggcataggcactgagtagattgtcacgacagattattatatacttcaattctggaatatttgatgg

SEQ ID NO: 3529 - DNA, 778 bp, Zea mays
  Clone ID: TF_ZmC490712_1
attgctcagtcatgttgtctgccctttgagttcaacgccgtaaatgcagctagtcatgaggttacacttgaacatctcgatataagaaagggagaggctattgctgtcaactttgcatatcagctgcatcatactcctgatgagagtgtctgcatagaaaaccaccgggataggatattgagaatggttaagagcctttctcctagggtggtaacccttgtagagcaggaggctaacacaaacactgccccattcttcagtagatacatggagacccttgactactacacagccatgttcgaggcaatagatgttgcttgccccagggatgacaaggtgaggatgagcactgagcagcactgtgttgcaagagatattgtcaatttaattgcatgtgaaggtgcagaaagagtggagaggcatggaccatttggaaagtggcggtctaggtttgcaatggctggctttagaccataccccctaagtgcattggtgaacaatactatcagaacactgttaaatgattacaacagttactacaagctagaggagaaagatggtgtcatttatcttggatggaagaacagaaagctggttgtatcttctgcatggcagtgagattcctgaatatggaagaagcttgtttaggttctttcatggctttgtcttcggcacatagatccaagggtggaacctaatcagcgaatgtgagttccataatccaaaggactgtggctgcttgcttcttggcgcccagctgtcaaccctccgctgcgca

SEQ ID NO: 3530 - DNA, 308 bp, Zea mays
  Clone ID: TF_LIB3069-022-Q1-K1-E10
agctgacctcttacacgcgcagttatgcgagtcctgacggtacctgaaattcgtgcactggatcgcgaaccaggccatactagaggtctttgccggctgtcggcgcgtgcacatcatctacttgagaatctaacaggggatgcagtggccggctcttctgcaggcgctcgcgctgcagcctggctgcccaatgtcgttccggctcacccgcgtcagaccaccgtagcccgacgagaccgacgccttgcagctagtgggctgtaaactggcccagttggagcacaccatgctcgtggacttgcagtacc

SEQ ID NO: 3531 - DNA, 553 bp, Zea mays
  Clone ID: TF_LIB4729-117-A1-K1-F2
cgcccacggccagcacgttgcggatctcccgcgacagcagctgctgctccacgacgtgccgctcggggctgtcctcgccgtagctcgcgtccagcgagtcgaacagcgccgagtagtagtggatgagccagagcgtgttggagtcggagccagtgacgtcgtagagcgagtggtgcagccagtggacggcgacggcctcccgcctcgtgactcctagcttctccgggtcaacattgccagccttctcggcgacggcgcagaactcgaagggcaggccgagcgtgtcggcgaaatcggagaggcgcttccccgtggcctcgagcgcctccatggacgccccgaggccggtgagcctcaccctgggcgggcccccggggcgggaggcaaggatgtggaagagccccggccactgcagcccctgcatgatgtcgaggtcgatgatgtgcacgcgctcctcccgctcgaacgcctcctggatggcctggttggcggtgaagtgcgagaacttgacgaaggggctgatgccgttgaacacctggaacgcggcggcgac

SEQ ID NO: 3532 - DNA, 469 bp, Zea mays
  Clone ID: TF_LIB4738-094-Q1-K1-E4
cacgctcggcctgcccttcgagttctgcgccgtcgccgagaaggccgacaatgttgacccgcagaagctgggcgtcacgaggcgggaggccgtcgccgtccactggctgcaccactcgctttacgacgtcaccggctccgactccaacacgctctggctcatccaaaggctggcccccaaggtggtgacgatggtggagcaggacctgagccagtcggggtcgttcctggcgcgcttcgtggacgccatccactactactcggcgctgttcgactcgctggacgcgagctacggcgaggacagccccgagcggcacgtggtggagcagcagctgctggcgcgggagatccgcaacgtgctggccgtgggagatccacgacgccggcggtcagctacttagccaactttcataattaaataccgtcactgtatgaataactcttattgtgaaaagagttatttactctat

SEQ ID NO: 3533 - DNA, 1556 bp, Zea mays
  Clone ID: TF_ZmC5045_1
cgcgtgactaggacatggagatggaggggaggaagagcaaacagtcggcactgtgtgacgaagagactgtccgggagatgtttgacaaggtgctgttgtgtaccgacaagaactgtgagttccactcaccaatgccagccgatgcacagatcagcgggggatatgtgaaaggatctagaaataagcgagggcgaaggagggggagatcaggtcctggtgcagaggaggagccagttgatctcacaaccctactcatacattgtgctcaggccgcggctatcgacgaccacaggaactcaagcgagctgctgaaacagatcaggaagcattcctctgctactggagatgctggccagagattggcacactacttcgccgatgggctggaggctcgcctagctggctctggcagcagcatctaccgttcgcttgctgcaaagagaacttccactggtgatatactgaaggcgttcagtttgtatgtcaaagcatgtccgtttaggatactatcacactatgtcgcaaacacgaccatcttaaacgctacgaagagcgccacaaggctgcacatcatagactacgggataatgtatggtttccagtggccagtcctcatgcagcggctctcaaagagacctggtggccccccgtaccttcggatcactggtatagactttcccctgtcaggattccgccctgcagagcgtgttgaggcgacagggcggcggttgcatgagtatgcccgtatgttcaatgtcccatttgaataccaagccattgctgccaagtgggatactatccaagttaaagatctcaacatgaagagcgatgagttcgtcgtcgttaactgcctctaccggatgaggagcatggtggggcggacggtggcggatgacagcccgagaacgcgggttttgaacacaatcagaaagctgaatccccatctgttcgttcatgggatcgtcaatggtacttacaatgcacccttcttcgtgacgcggtttaaggaggctatgttcttcttctcttcgatctttgatatgctcgaagcgaatgccttacggatggatgagcataggctgctgatagagagagagttctttggccgggaagctgtcaatgtgattgcctgtgagggcacagagaggattgaaaggccagagacctacaaacaatggcagatgagaaacctcagggcaggcttccggcagttagctctggacagggagataatgaagagagcaaggtacaaggtaagcaagagctatcagggggatttcctcgtggacgaagataacaagtggatgctacaaggttggaagggtcgtatcatatatgcactttcagcatggactagctagacttgtaaatattagtgagctactgagctgcttagctgacctcttccattaatttcttgattaatcaccatttcattttgctgtattatgtttacgttgttgaatctagccctcttttagaaaccaaagttttgtatgtttgaattggctgcaataatagaatcttgtccgtgtctgcctgaaaaacttgtgtaa

SEQ ID NO: 3534 - DNA, 1928 bp, Zea mays
  Clone ID: TF_ZmC1583_1
cgggctggagctgatgggcacgcagcagcggcagcagcagtaaggccacttccactttcggcctcctacgaaccgaggcagtttttcagccgccgccgccggccacgaccatgcctttccacgacggtgccgacataaagcccgctcaccttggagtcccgtcggcaagtctactcctcaatcaacaccaagcgttgtcagcagcctccttcatgccgctcccctccttccctgaccatcagcaccagccacatctcccgcccccgccgaagcgccaccactctatgcccgaaaacctgttcctcctccaaaaccaactccagccgccgccgccgccgccgcagggtctacgattcccaccactgcataccaccgcgcccttccagctccaaccatcgctgcaaccaccgcgaggttcgatgaaaacaaccccggcggcgcagcaacatcaacagcttctggatgagcttgcggcggcggcaaaagcggctgaggtcggcaactccatcggcgggcgcgagatattggcgcggctcaatcagcagcttccccctatcgggaagcctttcctccgctccgcttcctacctcaaggaggccctcctcctcgcgctcaccgacggccaccaaggctccactcacctatcctcccctctcgacgtcgccctcaagctcggtgcatacaagtccttctccgacctctcgcctgtgctccagttcgccaatttcacggccactcaggcgctcctcgacgagatcgcctcaacaacttcatcttgtatccacattattgatttcgaccttggtgttggcggccagtgggcttccttcttgcaggagtttgcacaccgccgtggaactgggaacgcccccctgccaatgttgaagctcacagccttcgtctcaagtgcttcccaccatccccttgagctgcatcttactcgggagaacctcacgcaatttgctgtggaccttggcattccatttgagttcactgacatcaatcttgatgcgtttgatccggcagaattcattgctcctagccccaatgaggttgtggctgtttgcatccctgttggttgctctgcacgcacgccaccgctccctatgttgcttcagttggtgaaacagcttgcgcctaagattgctgtggctattgaccatggcagtgaccggggtgacctcccattttcacagcacttcatgaactgcttccagtcttgtatgttccttctcgactcacttgatgctgctggcactaacgcggatgctgccagtaagattgagaggtttctgattcaaccgagagtagaggatgcagtacttggccggcggaaagctgaaaacgcaatggcttggcgggcagtgtttacatcggccgggtttgctccggtaccgctcagcaacctcgcagaagcacaagctgactgcctgttgaagcgcgtgcaggtccgaggattccatgtggagaagtgtggaatgggtctagcactctactggcagagcggcgagctcgtgtctgtctcggcatggcggtgctgatcatacggaccccatccatcaaccatcatgacacctacaccaatttgcaggcatgtttaaccctggtaatgtgcattttgtcttgcaatttcaaacatcgtgaagaaaactattgtatttgttgttacacgcctctgattgctttgctgatgttggagtaccgcctctctaaaatgtaacatgttggtctagggtctcataactctgttcttgctctcttcttggttagccagaggataatttggcaaatctgtggcaatgatgttgttattttactaggtaattcagatgaaaactgacatggactgaaatggttgggtatattaactttcttggcctcatattccaagattgatgtatagatttctaaagcgtggatcatggttt

SEQ ID NO: 3535 - DNA, 2602 bp, Zea mays
  Clone ID: TF_ZmC3661_1
gccggccgggctggggaaaggatggagaggcccgagacatacaagcagtggcaggtgacgcggcacggcgccgggcccggcggcgcccgttcacccggggcctctcctcgcccgctcggctcaggctctggtgctaccacaaggacttcctcatcgacgaagacaacaggtggttactgcaagggtggaaaggacgcatcgtgctggcgctctcaacgtggaagccagatcacaggtctccctagctcctcctcgagggcggctacatggttgcagatcgagccctgagggcagcgtggtggatgcaggcggcgcgtggccgtacgattcgacggaattctaccagctgcacagcaacccgtcgtcgttcgcgtcatccaacggcagctgtgctacaatatcagacggctttgagtcgttgctgagctcgcctggtgtcatgccagatgttggcttcgccgattttgcggtgcagagccagcaggctatgcagttctgccgtgggttcgaagaagcaagcaagtttctgcctgacgagagtaagcttgtgattgatcttgagaagccagcatctgttacaagcttggtggctaacatcaaaggggagaacaggtttgcagaggtcaaggcagagaaggccgatgttcaggcagaaattcacagaggaaagaagcatttctatggtgatgacttggatgcagaggaagggaggcgcagtaaacattcagcacccgctatcgacactgatcaccttgtgcgggagatgatggacaaggtcttgttgtgcaatggcgagacatgttcaaaaggcgtcaaggaactccgtgaagccctgcagcatgacgtggcaaagaattcacacggggttcatggaaaagggtccggacatggcaagggccgtggcaagaaacagccgaagaaggaggtggttgacttggagactctcctcgtccactgtgctcagtctgtggccaccgatgatcgacgtggtgcaactgagctcctgaagcagatcagacagcatgcatcgcccaatggcgacggtgaccagcgtttggcgcactgcttcgccaacggccttgaggcgaggcttgctggcaatggaagtcagatttacaagtctcttataatgacgaggtttccctgcaccgatgtgctgaaagcctaccagctttacttggcagcttgcccattcaagaagatctcccatttctttgccaatcaaaccattatgaatgctgtggagaaggcgaagaaagtccacatcgtggactatggtatatactacggctttcagtggccgtgcctcattcaacggctctctaccaggcctggtggccctccgagactccggatcacggcaatcgacacaccgcaccctggttttcgcccagcagagcgcatagaggagaccggaaggtatctaaaagattatgctgagaccttcaatgtgcccttcgagttccgagccattccatctaggttcgaggcggtgcagatagaggatctccacattgccaaggacgagctgctgatcgtcaacagcatgttcaaattcaagacactgatggacgagagcgtggtggctgagagtccaaggaacatggtcttgagcacaatcaggaagatgaacccacatctgttcattcatgggatcatcaatggctcctacaacgcaccgttctttgcgtctcgcttccgggaggccttataccactactccgccatctttgacatgctggagacgaacatcccgagggacaacgagcagaggctgctcatcgagtcagcactgttcggtcgagaggcaatcaacgtaatctcctgcgagggcctggaaaggatggagaggcccgagacatacaagcagtggcaggtgaggtatcagagagctgggttcaggcagctcccgatcaaccaggacatcatgaagcgtgctcgggagaaggtcaggtgctaccacaaggacttcctcatcgacgaagacaacaggtggttactgcaagggtggaaaggacgcatcgtgctggcgctctcaacgtggaagccagatcacaggtcttcctagctcctcctcgagggcggctacatggttgcagatcgagcactgcactgtagatggatggaggcctgttcgtatctttggatgcttgggctggttgttcctgggatgcaacatatagctaggctaggctgtgctattcgaactactaaagcatgttttgcactgtctttatatagtgatgccatcaagggtccctgtatgtcatgttaggttatggttcagttttggacaggaacagttagtgcattctttgatggaacagcaggctaggtatgttagttacgcacgcggtagaccctagggttgtttcatgcatggatcagtcttatggattcttgtattatatttcttcccccattaaccagtgctgtcaaagttttgggcttctttggtaggtaggtagtaggtactacaaactttcttgcacctccatccgagataggcaagcaagtgataccatcgtggcccgattaagtttccagtcctctgagcgagaaggtgagcagagctagctaaccgcttctgtatcttgcttgt

SEQ ID NO: 3536 - DNA, 356 bp, Zea mays
  Clone ID: TF_LIB3152-020-P1-K1-F10
gacagagagaaaaccttgactttttttaaggccgcaacattaaactgtgggcggtttgttccgattaacctgattggatagaaatgtttgatgatctgcttcttcaaaccgagaagaaggccacagatctgctagagctgatgcggaatgaagctttcaagaattctcaggtcacccagactaaaggaccaagtggaccacggccactgtgaaggaaaccaacaaagaaggatgtggtggaccttaggaccatcctcatccactgtgcacaggctgtggcagcagatgaccgtatgactgctaatgaattgttaaagcatataatgcaccattccaagccaaatggtgttggaacc

SEQ ID NO: 3537 - DNA, 830 bp, Zea mays
  unsure (1)..(830): unsure at all n locations
  Clone ID: TF_LIB4766-127-A1-K1-C3
cattgggtacctcgaggccggccgggagctaactttcttcgcgtatcagcctggcccgtgctcgcccactgcgctagggttcacttgcctctcgagttcactcgcagccgcagccgccgcggctctcgcctctccggttcactcgcagtcgccatcgcggaggcgttccagagcggcagccaccatcgccggcacctccacgtggtcgacctcgacgtgtcgtacgacttccagtggccctccttgatctagtccctgtcggccgccgccgcgagcacgagcgcgagaacgagcagcgcataacacgacggcgacggcgacgagccagtttccctgcgaatcaccggctccggcacgagccacgacgagctgcggcgaaccaaggcgcggctggcgcggctgctgcttccacctttcacggccagtctccggtacttctccgtggtgttcgactcgctgcacaagtgcctccccgccgacagcgccgagaggatcgccatcgagagcggccacctggggcgtggagatcagcgacgggtnntgggttttggtttgttaattagtttttttatgcttctttaatttcttctttgattgattacatatatagattgattgattacatatatagatatatacacccatgtaaagtagatgtcaaaccagttattgcacacgattgatacgaagtagtcccaagagtcgtttcaaaatttcacaatctaaattatcatttggagagtcatttttccataaaataccactatctatatattttccatcttcaaaagtctttttatattttagagagtcaatcacgtttttatatc

SEQ ID NO: 3538 - DNA, 1014 bp, Zea mays
  Clone ID: TF_ZmC3528_1
cgcgcttcgcccccgacgagctcacgctctgctacaagacgctcaatgacgcctgcccctactccaagttcgcgcacctcaccgccaaccaggccatcctggaggctacgggcgcggcgaccaagattcacatcgttgacttcgggatcgtgcagggtatccaatgggcggcgctgctgcaggcactcgccactcgcccgggggagaagccatcccgggtacgtatctccggcgtgccttcgccgtacctggggccaaagcctgcggcgtccctcgccgcaaccagtgcccgtctccgcgacttcgccaagcttctcggagtggacttcgagttcgtcccgttgctgcggccggtgcacgagctggatcggtcggatttcttggttgagcctgacgagaccgtagccgtcaatttcatgctccagttgtaccacctccttggcgactccgatgagcccgtgcgacgtgtcctccggctggttaagtcactcgatccatcggtggttacccttggggaatacgaggtcagcctgaaccgggctgggttcgtcgaccggttttccaatgcactgttgtattacaagccagtgttcgagtcacttgatgtggcgatgccacgggactcaccggagagggtgagggtggagcgatgcatgtttggggagcgcattagaagggccattgggccagaggaaggagcagagaggactgataggatggcggctagtagggagtggcagacgctgatggagtggtgtggctttgagcccgtcagactcagcaactacgccatgagccaggctgatcttttgctttggaattacgattcgaagtacaagtattcgcttgttgagctaccaccagcgttcttatctctggcttgggagaagcagccgctgctcaccgtgtccgcttggcggtgagtccctttttgtgtgtgtgtattggtgctgttgtatgtagcattgtcataggaccagggaagaaatgaatagactggttttgcattgtctt

SEQ ID NO: 3539 - DNA, 299 bp, Zea mays
  Clone ID: TF_LIB3067-053-Q1-K1-C4
gatgtgtcccgtccattcctttaggaggagccggatccggcgccgcagtcgcgcaaggtcgcgaccgccgcggcctcggccgccgccgccaaggagcggaaggaggtgcagcggcggaagcagcgcgacgaggaaggccttcacctgctgacgctgctgctgcagtgcgcggaggccgtgaacgcggacaacctcgacgacgcgcaccaaacgctgcttgagatcgccgagctggccacgccgttcggcacctcgacccaacgcgtggccggctacttcgcggaggccatgtcggctcg

SEQ ID NO: 3540 - DNA, 1183 bp, Zea mays
  Clone ID: TF_ZmC5771_2
tatggcgcttcaggcgatgtacctgcgcgccgtgaggcagggcaccactgtggtggttgatatcgccgccttgctgggagggatcccgtctcagcagcctctggttgtccccgggtctagctctggtcaccttcaaactcctccgttgcgtcttcatccgcgtcctgctcgccgccgaccccggggccgcgtcgaggcaactattgtctgaagccgcggtcgctatctcggacaacaaccatgacacggcggccagccatctggccgccctgaagcgcgcggctaaccagcacggcgatgcggaacagcggctgattgccatgatggtggccgccctgtcctcccgcattgctccggccgcctccgccccatctcaactcctcgccgacctctgcagcgtcgagcagcgcgccgggtcccaactcctacaggacctctccccgtgcttccgcgtcgccctccacgccgccagcgccgccatcgtcgaagcggtgggcgaccaccgcgccatccacctcgtcgacttcgacgtcagcttcccgcagcacgcggctctcatccagtacctcgccgaccgacgcgtgcagggcaggtccctgaaggtcaccgccgtcaccgacccgagctcgccgttcacgcagtctctaaccgcatcgctaccagccatcgaggagcggctgaagaagctcgccgagcgagctggcgtggagtaccgctttacagtggtcagctgcagagcagcagagctggatgcgtccaggctgtgctgcgagccgggggaggcggtcgcggtcaacctcgccttcgcactctcccacgtgcccgacgagagcgtctctccggccaacccccgcgacgagctgctccgccgcgtgcgcgcgctgggcccgcaggtggtgaccctcgtcgagcaggaactgaacaccaatacggcaccgctggcggcgcgcttcactgacgcgtgcgcgcactacggcgccatcctggagtcgctggacgcgacgctggcgcgggagattgcggagaaggccagggccgaggcggccctgtcgaagaaggcggcgaacgcggtgccgtattggtgttcagttcctgctcgacgagggtcaccacctgcgggcccagcgcgcgcacgcggcggagcagctcgtcgcgggggttggccggagagacgctctcgtcg

SEQ ID NO: 3541 - DNA, 379 bp, Zea mays
  Clone ID: TF_LIB4767-027-Q2-K1-H11
gggaccctcgaggccggccgggagaggacgaaacctccggccgcatcctgctgatgttgccgaggaccatgtccctagggctcgggcagtctccgtcgacgccctcgtcgtacgtccatgagtttcccgaagtagaagagaccactgacgacgagcacctcatctggctctatctcgaggtcctcggcaaaaatcatctcccacttggtggcgacgatgctgcggaacttgaacgggacgccgcactggcgggcgaagtcgctgagccggcgcccagccccctcggtccgggtagccgagcggaacccaggctgggggaagtcgatgccggtgatcctcacctccggcggcccacccacccgggtggaccaggaaccca

SEQ ID NO: 3542 - DNA, 787 bp, Zea mays
  Clone ID: TF_ZmC1155_7
ccccctcgggtcgaccccgcgtccggccttcccgtccttttcctttcataaaccccaagccgcgccgcaatagctcgccccctcgttcgccgcctctcctgctcctaccgcagctctccctcaggtttagtgttcgcgcgggagatccgcaacgcggtggcgttcgaggccgcggaccgcttcgagcggcacgagaccttcgccgggtggcggcagcgcatgcaggaaggcgggttccagaacgccggcatcggcgaccgggaggcgttgcaggggcgcatgatcgcgaggatgttcgcgccgggcaactacagcgtgcaggtgcagggcgacggcgaggggctcacgctccggtggatggaccaggccatgtacaccgtgtccgcgtggacgccggtcagcgacgggggcagcacggtgtctgcgtctgtctccaccacagcatcccattctcagcatagctgaatggggggaagacacaaggtgaaagtgaagaagaaaagaacatggtttttcagtggttcttttgctgttactgaaaacttagttcattatacagtctgacaattcttttatacaatcagaagaacaaaaaaagaagcaaaggagtaagaaagatttgtttgtagctttgtttttataggtgataggataaaatattcaattgttagtagttgtaattctttattctttatgtacacttgtcattctttcaccatgtctgtttagcttgtaatctctgttccgagttagaaggaaatggaataaacaagtatggttttcattc

SEQ ID NO: 3543 - DNA, 594 bp, Zea mays
  unsure (1)..(594): unsure at all n locations
  Clone ID: TF_ZmC10887_1
cggncgcgtgggcggncgcgtgggcggacgcgtgggcggacgcgtgggccgacatggacatgttccaggaggacacgctgtcgtcggccacgtcgtctccggcgtcgtcgctgtgcacgccgtcgccgcacccgcacgggtcgtcgtgggtgcaggagctgagccacgaccagcagggcctgcgcctcatcagcctgctgtaccagtgcgcggcggaggtggcggcgggcgccttcgaccgcgccaacttgtacctggagcagatcacgcagctggcgtcgctggacgcgccgcacacgctgcagcgcctcgccgccgtcttcgccgacgcgctggcgcggaagctgctcaacctggtgcccggcctgtcgcgggcgctgctgcccacggggcccggcagccccgcggaggcgcacctggtgcccgccgcgcggcgccacctcttcgacgtgctgcccttcatgaagctggcgtacctcaccaccaaccacgccgtcctggaggccatggagggggagaggttcgtgcacgtcgtcgacctctccggccccgccgccaacccggtgcagtggatcgcgctgttccacgccttcc

SEQ ID NO: 3544 - DNA, 2015 bp, Zea mays
  unsure (1)..(2015): unsure at all n locations
  Clone ID: TF_ZmC5027_1
cggaaaaaaattcgccgccgcttccggtgctgttccaagaaggcatcgacacaaagccccctcttgatacgcagtcgcccggcctcctccaccagtaccagcaccagccgagccccgccacaaccttcctcatgtccatcccctccttccccagctacaatcagcactcgccactcatccatccaccgcccaaacgtcatcaatccataggaggcgacctctatctcgcccgaactcggcttctgccgccgccgccgacggggcaaggtcatgcctttccaccactaaatggtcctgctccattccagctccagccttcgccgccactgccccacggggcgatgaagaggacggctgcggaggcggcgcagcagcagttgctggacgagctggcggcggcggcaaaggccgccgaagctggcaattccattggcgcgcgagagatattggcgcggctcaatcaccagcttcccttgctcgggaagccgttcctccgctccgcctcctacctcaaggaggccctcctcctcgcgctcgccgaaggccaccacggcggctgccacctcacatcgcccctcgacgttgccctcaagctcgcggcgtacaagactttctctgaccactcgcccgtgctccagttcaccaacttcaccgcgacacaggcacttatcgacgaaattgcccgcagcacatcgtcctgcatccatgtcatcgattttgatcttggtgttggaggccagtgggcttctttcttgcaggagctcgcacaccgccgtggcgcaggcggtgcggctctgccgtccgtgaagctcactgcctttgtatcagctgcttcccaccatccactggagctgcgtctcacgcgtgacaacattgcacagtttgctgcagaccttgggattccctttgagttcagtgctatcagcgctgatacgatcaaccctgcagagctcgtttctgccaccgctgatgaagttgtagctgttgtcctcccggttggttgctctgctcgtgcaccaccgctgccagcgatccttcggttggtgaaacagctggctcctaagattgtgatagccatagaccatggcgctgatcgtgctgaccttcccttctcgcagcacttcttgaattgcttccagtcctgcatgttcctccttgattcgcttgatgctgctggcattgatgctgattctacctgcaagattgagaagttcctgattcagccaagaattgaggatgcggtgcttgggcggggcaaggtggacaagccaattgcatggagaagtgcatttgcagctgctgggttcgcacctgttccacccagcaatttggcggaggcacaggccgactgcctcctgaagcgggtgcaggtccgcggtttccacgtggagaaatgcggggtcgggctcacactatactggcagtgtggcgagcttgtcactgtatcagcatggcggtgctgatcagcgatccacgcctgtgcgcaccatgttccaccaacatttgctggcatcttcaaccccagtaatgtgtattttgtcttgcaattaaatgctgctaaggaaactgatatattgctgttgaaccctccatgttcatcatctttgcaacttacgagctagaactagtggatttttagcaatgttggtgccaatgtctctagtgtaatgatgttggtctaagattttaccctgcttgctctcgggtcactagacattctaatgtgacttgaaacactgcttgtgaggagagggtataattaacctatcaaatgtctgtggtacagtactaatacgtgtttcatgttcttttatatcagttcttcttcttatggtatttcattgtgcagtttcatccctgctggccctccggccacttgtcttgctaccgtgtctgctgcctgcgcctgtgtggtggggccatactgcccccctccatcgtcgctcctccagtataatccgtttttcatgttcttttntntccctttttctttggatcttttaaaaaaacccaaa

SEQ ID NO: 3545 - DNA, 1493 bp, Zea mays
  unsure (1)..(1493): unsure at all n locations
  Clone ID: TF_ZmC5784_1
tacccttgtggtccggccgggncgatgcgtcccgtccattcctttaggaggagccggatccggtgccgcagtcgcccaaggtcccgaccgccgaggagaccgccgcggcctcggccgccgccgccaaggagcggaaggaggtgcagcggcggaagcagcgcgacgaggagggcctccacctgctgacgctgctgctgcagtgcgcggaggccgtgaacgcggacaacctcgacgacgcgcaccagacgctgctggagatcgcggagctggccacgccgttcggcacctcgacgcagcgcgtggccgcctacttcgcggaggccatgtcggcgcgcgtcgtcagctcctgcctaggcctgtacgcgccgctgccgccgggctcccccgccgcggcgcgcctccacggccgcgtggccgccgcgttccaggtgttcaacggcatcagccccttcgtcaagttctcgcacttcaccgccaaccaggccatccaggaggcgttcgagcgggaggagcgcgtgcacatcatcgacctcgacatcatgcaggggctgcagtggccgggcctcttccacatcctcgcctcccgccccggcggcccgcccagggtcaggctcaccggcctgggggcgtccatggaggcgctcgaggcgacggggaagcgcctctccgacttcgccgacacgctcggcctgcccttcgagttctgcgccgtcgacgagaaggtcggcaacgttgacccgcagaagctgggcgtcacgcggcgggaggccgtcgccgtccactggctgcaccactcgctttacgacgtgaccggctccgactccaacacgctccggctcatccaaaggctggcccccaaggtggtgacgatggtggagcaggacctgagccagtcggggtcgttcctggcgcgcttcgtggacgccatccactactactcggcgctgttcgactcgctggacgcgagctacggcgaggacagccccgagcggcacgtggtggagcagcagctgctggcgcgggagatccgcaacgtgctggccgtgggcgggccggcccgcaccggcgacggcaagttcggcagctggcgcgagaagctggcgcagtccgggttccgcgccgcctcgctcgccggcagcgccgcggcgcaggcgtccctgctgctcggcatgttcccctccgacgggtacacgctggtggaggagaacggcgcgctgaagctcgggtggaaggacctctgcctgctcaccgcgtcggcctggcgccccatccaggtgccgccgtgccgttgatgagacctctgcctgctcctgcttgcgttgagaggccgccactccacttgttttgcatctgtagctgctcggtttggtcatcagctgggagataagaaaagcggaaacgtactaattgctctggagtagatccatccattcacagtgatagttactgatgtactaagctttaattagttcaatgctagatcgttcttgttc

SEQ ID NO: 3546 - DNA, 1283 bp, Zea mays
  unsure (1)..(1283): unsure at all n locations
  Clone ID: TF_ZmC12356_2
gcacgagatgaagtgccacaccatttcacatataccactcaggtcgaacacttgaaaccactcagttctgtgaagcctttacagggttgcagatgccttagtgtttgtctgcctggtgatgccaactgctgctgtgcacagcgtaatggaggcagcttaccttacagctcatcaggactgcttgtatgccgcaagactatggtttatgaatgtggtgaatcctgtcggtgttctttcaattgtcgtaacagagtgacccagaaaggagttaggatccactttgaggtctttaagacgggaaatcgaggctggggtcttcgttcgtgggacgctatacgggctggttcatttatatgcgagtatgttggtgaggttattgatgatgctaacattaatttgaatgatattgaagatgattatatatttcagatgtcgtgtcctggtgagangacattaaaatggaattttggacctgaattgataagggagcaaagcacaaatgtttccgctgatagctttgagactctanccattaagataagtgctaaaagataggaacatatcacgttcagaccaagtgngctcnaacgattttgcagcagtcagttgaccagagtgacacgccacaacagtcctgcctgagcaatccccagacgatgactagaaagggctgacgtcaggggaggcctaacaaacgcctggagccatgcggtctacgcggaagaatcacacactcaccacacagccaaaggactgactttgtgaatcctcaaattgtcggggattctttatctgaccgtggaaaatgcatattctatctatcaacattcaaccctaccagctagatcctttttggtggcacctgaagaaaaagtaggactgttcgaacagcttgcatcactctgtcgttgtggaaccattatattaattaatgtcaatcttttagatgaccattcagcaactaatgcacaaacgtttcttttgtgggggaagaatgttggtcttggaagatcaattttgtgtagtttgtagacttgtagagcatttagtgctgctaaacttgtgcaccttaagtcttttggctgtaaaagagcctcgaggctccagctgaattggttaggcagtctaagtagcatttctttgatcctgaatttgactccacgtgagtcaatttcaagctggagttaaaaaaaacattcttatgttctatactaaagtacagttctaaggctcaaccatgatcatagtcgttctcacaaaaaaaaaaaaaaaaaaggccccta

SEQ ID NO: 3547 - DNA, 255 bp, Zea mays
  Clone ID: TF_700432452H1
gtaatgcggagatgcaggaagttggtgttggcctatatcccagtatctctttgctcaatcacagctgtgaccccaactgttcgattgtgttcaatgggccccacctcttactacgagcagtccgagacatcgaggtgggagaggagctcaccatctgctacctggatatgctgatgaccagtgaggagcgccggaagcagctgagggaccagtactgctttgaatgtgactgtttccgttgccaaacccaggaca

SEQ ID NO: 3548 - DNA, 1377 bp, Zea mays
  Clone ID: TF_ZmC3525_2
agtacatccattacaagcagttaaaagggtggaagcatttggttgtttacaaatctggcatacatggacttggtctctacacatcagtctttattccacgcggctctatggtaattcaactgataatggaatttagtaaaaagtcaagttactgccaccaagtttggcatatgtttagataaccctgaaaactagcctttcatttggtttagtcccttcaactattccggttattccaatttacccgttaacaacattttttacttttgtttgtccacattcaagttgattttttaatttcaaaatttgtgaggtgatagtcgacaccataatttatgatatatatatataaaatattttttataattattttgaccagttaggacatttaataataaattaactctagaatacaaaattgcataaaatataattatgaaacaattataatatattttaaaaaataaatcatgacatctattaccacttcacaaaatccgaaatttaaactcaacttttccttggagaaacaaaaagacaaatcttgttaaggggcaaattggccaattgaaatggttgaggtagtaaatcagaccaaatgttagtttaggaagttatccggactttggccaaaattcaagggaataatttcaacattttctagcaaataaaaccattctcaggttttgcataaaaatgtttcaggttgtagaatatgtgggtgaaattgttgggcaacgggttgctgacagaagagagatcgaataccagtccgggaaacggcaacaatataagagtgcatgttatttctttaagattgacagggagcatattattgatgccacccgcaaaggtgggattgcaagattcgtcaatcattcatgccaggtaataacttgtgcttgaagccttgaacattctttagataccccttggaacaagagggatgagacttcttttgagattctagtgtgcttattattctaatgtacggttttatattcattcaattcgttcattcttggttgaatcagccaaactgcgttgcgaaaataatctcagtcaggaatgagaagaaggtaatgttctttgcagaacggcacataaacccaggggaggaaattacgtacgattaccacttcaaccgggaagatgaaggccagaggatcctttgcttttgtagatcaagatactgcaggcggtacctcaattagtttccggtgggcgtaacatgtctatatataacttatatatctatatgtatatcttatatatttacaaattacaattgcgattcatgcctgctgtatatgtaggaacttgcatctagaactgcctgtttatcttttgtgaagtcaaatgagttatcagctgttc

SEQ ID NO: 3549 - DNA, 240 bp, Zea mays
  Clone ID: TF_uC-zmflb73150d09b1
cttacgcgtgcggctacgcgtccgacgcagcagctggtgtcagcttcatgtcattaagcgtgtgatatcatttgccaggttagggactcaatatatgagtacccctgatcatggagttgggaccgatgctgccgcgataaagtgttgcagaaaggactgcttgttaagttggaactctgcagaactgttaataagggctgggctagtagagctgccgaacctattccacagggtaccttt

SEQ ID NO: 3550 - DNA, 271 bp, Zea mays
  Clone ID: TF_jC-zmX700049670a1
cactcatctaaccccaactgctatgcaaaggttattctgatgtctaccaaccctccacttgtatctatgctaaagagcatattgaggctagtgaggaactcttctatgattatccttatggtcctgaccaggctccatcttgggctaatataccctaacgtataaagaaagactaatcattcctctctcaccatcgagcacacatacttgctctatatcttaatatcatctccggatgatacaatatgccttaaattatatatttaataca

SEQ ID NO: 3551 - DNA, 610 bp, Zea mays
  unsure (1)..(610): unsure at all n locations
  Clone ID: TF_LIB3606-016-Q6-K6-B5
anaaaggtaaacataagcatcaagtactcctggatgctggttggggttcaggtgtattgagggatgaagatgcccttagccttgatggttcattttatgggaacgttgggcgatttatcaaccacagatgctatgatgcgaatttagttcagatccctgttgaagttgagacgcctgatcatcattattaccatctggcatttttcacgaacaagaaagtagaggcatttgaagagctaacatgggattatggcattggttttgatgatacggaagggcccagtaaaccattcagatgcatgtgtggaagtagatattgccgcgatccgaataatctgagtatgttgccattttcaatgcataaaagtatgaaacggggaatcatgtatgtatgattgtgttttggcagggaggatggctagagcagctgcaaagcggaagtaggcggggaagctgaacttggttggagattagcacatcaacttttgctgtggtatttggttccgtatttgatgtgcagcagcatcacatcagttagtacttagtattagtgtagatagaatggagatgagggcggatgttttggacccttgcccgtggctgagcaaca

SEQ ID NO: 3552 - DNA, 631 bp, Zea mays
  Clone ID: TF_LIB3689-220-Q1-K6-A12
gctcttgcaatctgtttgctatcgagtttctcctaactcctgggattttctgatggtacaggttgattactgaaatattttctttaatattctactccataccttccaaattataaattgttttagatacacagatcttgttatgcacctagatatatataatatatttacaatttcgaatggaggtagtaaaacattgaatatttcctcatttcctaaacaagaccggagagctgtcatatgttagaagtaaaagttatgtcttatccacgtgtgcacaattgaaatggtatgctttacgtagttggtttacatgaaaaaattgtattaatgacaaggctagatttgtgatcaagttatatttcctttttaatgtcattgtttattataatccacatcatatttcgtattttaccgttaacatctctcttcagttacagatgatgcaatatgtaaagataggcttcagcatatgagacaacatagagattagaatttctacatgtgtaaagtcagcaaggactttgtaattgatgcagcttttacagaacacgcttctcgcttttttaaccacagttgtcaacctaactgtcggctggagaaatggaatcagagggtctgctttgggccc

SEQ ID NO: 3553 - DNA, 2316 bp, Zea mays
  Clone ID: TF_ZmC3614_2
cctgcaggctccggtgcggaactcccgggaaagaaacacatttagcagtccagactctaatatcatccaacgattcatggcctgttggcatgttgctggaccgtcactggttcacaggcctctagaggatacttggccagagcgggtgcgccgtgcgcgtgcgcggcggcggagtgcggtggtatccagcgcgtgtgcgccgatgtggaggccgatgcagcgggcccgggctttgaggccgggatggggagcctcagggagtgcggcgacggctgcgcgtctgcgccgtcatgtgggaaccgacggactcagcgcggcgtcgctgtgcggctgtgcgtcgtgtgccacctgcacaaggggtgggggctgcacgctgcggaggcctcaactgcgggcagtttgtgtgcaagtacgccggtaaagaagcaggttctgttccatgacggacgaaatgattccggatgaagctgtgcgcccgtgccgcattccaaactgcaaaaattgctggacgcggctccgtaccatgttgaacaaactgattttatatcgagcgatgaggcgatccaaacatgctgttaaactcctacttaccaaacaaagccactgatcaatggctctgtgaagtcgtctgccaaacgagcactataaccacattctattataagctacacagtactaaacaacaagacacattaagaaggacatttgggtagatttttaaccatgtttggtctcgccggatatcatagacatattcgtataatttgttcacttgtgtttccagttagttgttcatctatgcctagctttgctttggttctgttcttgtcatagctgaaaaaagaagcgaattcattgggcaaagccttatatatagttgatacataaggattcatgtaaaatacatttgcagtccggtacagtttttagccttgtgccctttgcaaaaaggactacaagaaccatgcctttttccagcgtaagctgctgttgacttgttgaatagtttattcacagggagtttagactaatgttaatgtggtactccatctgtcccataatataaggcgtaaccactttttgttcttgtcccataatataaggcgtgctttctctagacacacgcacatcgacgcagtgtcatagaaaaaattaaatacatttcttagtctttaaaccagaggtagttacgccttatatactgagacagagggagtaatagagtttaggcgcgtcagctctaaacagtaaactgatagtacattaacgtttatgattagttttgcgccacattctatccaaaagatccagtgagtagattagcttgtggaataatttaacttcttgcccctgcatcattttaagcttatcaagtttcaggaattctccacacaactgttgatttagtgatcttttatcatcagtttataaggttgcatcagaatgaaagattggattttgtttagcctgacattcttgtgtttggctcatacaatcatataagaggtgctttatgactggatcagttattatccagaatagtgtgttgagcttgtgcgctgatgtatatatttttgaacgcattatgtgatgatatttgaatatataatattacagattgttggtattatttagaaactttaactaatacatattgtctttaaaaaaattacattattttttatttgttccccacagtttcaggtcacgttgagttctgactgttgactagcgaacctatagtcactgttgctttcttttgtggtcatctttgtatttaaactgcagggagtttttgacaactgaagaagcgcggagacagcacaagctgtatgatgaacttgcctctggtggcaagctctgtcccgcgcagattgtcataagagagcacatcccttctagtaaagcatgcttaagagtcaacattgatgcaaccatagtgggaaatgtggctcgttttatcatacagttgccttcatgtgatggaggcaacctgcaccccatgctggtgaggagctctgattcgttgctcccaaggctctgcttctttgctgccaaggatatcgtggagggagaagagctcaccttcagttgctgctaagggtttgccatgcttttgtggaagctcgggttgttctggtgtgcttccttcagaagaaacttaagaactgatgccatctcctaggatgtcttacaaatgagttcgattctatttctgacttcgcaaataacattggcttcatgaggaattgtctggcccattctttagccatactgtaatgtgtgcaaaaaaaaacaagcagtcattttttggtg

SEQ ID NO: 3554 - DNA, 1848 bp, Zea mays
  Clone ID: TF_ZmC2220_1
atgagacttcgattgtggaggtggacgttgcttcctcagccaatggtgaggtgaagatgtcactgaaatgcagcgtgggttcttcaaatttcagcattagtatggaggaggtttttaaaatggtggaggaaaagtgccttcactcatacaagatgctaccttcagatctttctattggcaagctgctgagtgaggtatgccaatctgttgtgcagttgggcactatgcattctgaggttaatagggacagtggcagcttgcataatgaagtagttgctccatttgtgaagccaatctcttgtgaggctgctgtgggcataagtgatgatgtggctggtgggtcatcagtgcttgaatcctcagaaccttgtttgcagaattcgcttgttgcttggtatcctgagttggctcattgtaagcaaaagacaacccatgataccactgatatatccaaaggggaagagcgggtaagaatacctttagtaaatgaatttggcagcgagtaatgtcctccatccttttattacgtgccaagaaatcttgtcttccaaaatgcttatgttaacatctcgattgctcgaattggtgatgaagattgttgtgctgattgttctggcaactgtttgtcatccttagttccatgtggctgtgcaagagtgacggggggcgaattcccctatacaccagagggcctgcttaagacagaattccttgatgaatgcacctcagttaatcatttcccacaagagcatcataggttctactgtacagtttgccctcttgaaagatctaagaataaagcctcacctggtccgtgtaaaggccatcttatgagaaaattcattaaagaatgctggagtaaatgtggatgtggcatgcagtgtggaaatcgtgtgattcagcgtggtataacatgcaaattgcaggtgttctttacacgcgagggcaaaggctggggagtacgcacagtagaggatctcccaaaaggttcctttgtctgtgaatatgttggagaggtactaacaagttctgaattgcacgaaagagcaattgaaaatgcaagaaatggtaaacataagcatcaagtactcctggatgctggttggggttcaggtgtattgagggatgaagatgcccttagccttgatggttcattttatgggaacgttgggcgatttatcaaccacagatgctatgatgcgaatttagttcagatccctgttgaagttgagacgcctgatcatcattattaccatctggcatttttcacgaacaagaaagtagaggcatttgaagagctaacatgggattatggcattggttttgatgatacggaagggcccagtaaaccattcagatgcatgtgtggaagtagatattgccgcgatccgaataatctgaggaggatggctagagcagctgcaaagcggaagtaggcggggaagctgaacttggttggagattagcacatcaacttttgctgtggtatttggttccgtatttgatgtgcagcagcatcacatcagttagtacttagtattagtgtagatagatggagatgagggcggatgttttggacccttgcccgtggctgagcaacacgattgcgaccttaacctacggcatattggcatgtaaattagcctgggattgagtaggcgtagaaagaacgcgtaatagtacttagttatgtcatgtcatcttggtagagggcaagttaaattacatgccatgtcgttgcatcatctatgccatgctgggttggatgcttgtgctgaatgatttgttgaagcgactagcctaggcacttgtttttggcggtatcttctaaaaaaatttcttccctat

SEQ ID NO: 3555 - DNA, 2140 bp, Zea mays
  Clone ID: TF_ZmC3477_2
ccgccggccgccgccgacctacgtgccaaggtccgcatattcggaaccttcgccggcgagcacccaccaggatttttttgtacatctaagatgtacagggcctcgaatttatacctgatcctaatcaggtgctcctagatgccaaaccattaagatcgttagctccaatgttccctgcccccatgggagtcaatgttaatcagtcaagtacaccaccattggtctgtgtcactccggttggtcaattttcagcagggtttggtgcaggtaaccttcctgcctttggatcgttcactactttcagtgccacttcaaatggtgtttcttatgcaggcattgattacatgactagtaaatttggaaacgatgaggattctgtagccatatgtatcgtttccgcaggaggttatgagaatgatgatgatgacacagatgtgctggtgtacagtggtcaagggggaaatagtaggaataccgaggagaggcatgaccagaagcttgagaggggcaaccttgctctcgagaggagtttgcacaggaagaatgggataagggttgtgcggggattcaaagatccagctatggtagctggcaaaatctacatatatgatggcctttataagatccaagagtcctggacggagagaacaaaatttggcgtcaattgcttcaagtacaggttgcagcgtgaacctggacagcgtgatggagctgcaatatggaagatgactcagcgatggatagatgatcctgctaccagaggcagggttatactagctgatctatcatctgaggctgaatcgattccagtgtgtctcgtcaatgaggttgaccatgagaaaggacctgggcagttcacctatactaatcaggtcaaatacgtgaggcctctcagttctatgacacccctgcagggctgtggatgccagagtgtttgcctgcccggtgatgccagttgtgcttgtggacaacataatggaggtgatttaccctacagttcattaggattattgtcatgccgcaaaccgatgatctatgaatgtggtgaatcttgcaactgttctacaaattgccggaacagagtgacccaaaaagggcccaggctacattttgaggtcttcaggaccaccaatcgaggctggggtcttcgttgctgggaacctgttcgtgctggttcatttatatgtgagtatgctggtgaggtcattgatgaactcaaagttaatttgaatgacaccgaagatgattacatttttcaaactgtatgccctggtgagaagactttaaaatggaattgtggacctgaactgttaggtgaagctagcacatatgtatcggctgatgaatttgagccactgcctatcaagataagtgcaaaaaacatgggaaatgtctcccgtttcatgaaccacagttgctcacccaatgtcttctggcaacctgttcaatatgatcatggagatgatggacacccacatataatgttctttgcactgaaacatattccacccatgacagaactgacttatgactatggtgttgctggagctgaatctagtggttcaggctctcgtagaacgaagaactgcatgtgtggatcacaaaactgccgtggactattttgatgggttaagatccttgctctttgtggttaatcatacaaaccactttcagctagatcctttcttagtctccggatgatatgagtatgactgatgattccaattgctgccatgtgtactgtgaagacagcaagttgttgtcaaactgtagaatttctgttgccctgcacggcatggtggccgttctcccaccatttgttcaaatatttatgggggtgtggattgatgtatttcttctgctaatcttgtccacctgctgcaccggtttgtgtaaacttgttatgatccctgtttgctctggacgcctggttgtttaaccgtgactccttggatctggtcatgtaaattatcctggtttaggattatattgcttttgactctcatgtccacctgctgcaccggtttgtgtaaacttgttatgatccctgtttgctctggacgcctggttgtttaaccgtgactccttggatctggtcatgtaaattatcctggtttaggattatgttgcttttgactcg

SEQ ID NO: 3556 - DNA, 657 bp, Zea mays
  unsure (1)..(657): unsure at all n locations
  Clone ID: TF_21211472
gtccttttgtaatttatcacatcttcaaactcaggtttcaatggttgtatcttatattatgttcgtggagcttatattttccatgtccatatttgcttgtgatatctgtcaacagggtttgctgcaaagtgagcctgaaggcgagcacaatgaaaatattggcttttatgggcgatgcgtgtctcacgccattgttttttctagtcacgttaatcctaagaaagaatactttagaaacaacaattggacatgtgcacgtacagagggttttaaaggccgaaagggagaaggcttttctgatagtagccataaaaaatatgaagagtacagtggcgagttcggtgtttcccaagaacagataaatgcttggttacgcataaatggttcaaagccctgcggacgaggacagaaggagtacatccattacaagcagttaaaagggtggaagcatttggttgtttacaaatctggcatacatggacttggtctctacacatcagtctttattccacgcggctctatggttgtagaatatntgggtgaaattgttgggcaacgggttgctgacanaagagagatcgaatancagtcnggggaaacggcaacaatataagantgcatgttatttctttaagattgacagggagcatattattg

SEQ ID NO: 3557 - DNA, 566 bp, Zea mays
  Clone ID: TF_700196512_FLI
tgctactggcaaaggaaacatagcgcgcctgattaatcactcgtgtatgccaagctgctatgctaggatcgtgaccgtcagtggtgacaggagccagatcattcttattgcgaagagagacgtctctgccggagaagagctgacgtagttcctcagccctgccagtataactacctgtttgaccctgacgagtccgaagactgcaaggttccatgcctgtgcaaagctcctaactgccgtggatacatgaactagggtgctgctagaagagtaaaaaccaatctaacaaacaaggactgaggctaactccttacagaagccaaaagccggccattttttttcctggaattctttcggtagtttctcgttttcttatattactcaccagaagcttacaattcgtgggctgcacaaggtttggaccattttgttcagaaattgcgatttagggcagccgtaggcagtcatccatttgtatattcttccattgctgtgataagatggtaagaatgctcaaatttttttttttttggttaaatgaaaataagaaaaactcagtttgattc

SEQ ID NO: 3558 - DNA, 1964 bp, Zea mays
  Clone ID: TF_ZmC3767_1
ccggccggatagccgctttctctgcacgcctcacacactcacgtgagggccctggttgaccctctcttcctccctccctccccctcctcctccccctcttgcctcaccttgcctcacgcttctccctcagcaccatccgcctgcccaccgtgcccctgctcgcccttcccgtcgcggtgctcgtccgccctgccgcgccctgcccgccgcgtcgtgaggggatgtgtctagggttattgggagagcaccccttcctatggcgtccacgacaagcactagggcgtcgccatagacgcctcgcggatgccatacacccagttggcaaggcgtggactgtggcgttcggcctggagcaccgcttaagagacactgtacggacgccataacaattaacaagcatggctctagtgcaggtgcgatttactcgtgcagaagctccgacaactatttccgaattacccgggctggtttgtgatgacatctctggagggcaagaaaatattcctattcctgctactaacttggttgatgatccacctgttcctccatctggtttcaagtacttgaaatctctacaaattccaaaggacatcaagattccgtctagtattattggctgtgattgtgaaggaggttgtgctagcaacaaaaaatgtttgtgtgctcagcgcaatggttctgatctgccttatgtatcatataagaacattggcaggttggtggagccgaaagcagttgtatttgaatgtggggctaactgcagctgcaaccatgattgtgtaaacagaacatctcaacaaggtttgcagtaccgcttagaggtatttaagacagcttcaaaaggatggggagtcaggacttgggacactatcctccctggggctcccatctgtgagtacacaggggtgttgaggaggaccgaagatttggatggttcacagaacaactattgttttgacattgactgtcttcaaaccatgaagggtttggatggaagggagaaaagggctggatccgaaatgcacctgcctaatcttcatcctgagaatgattcagatgcacaacctgcacctgagtactgcatagacgctcactctattggcaactttgcaagatttataaatcacagctgccaacctaaccttttcgtccagtgcgtcttgagctcacacaatgatgttaaactggcgaaagtgatgcttttcgctgctgacaccatacttcctcttcaggagctatcctatgactacggttatcgattggacagtgttgttgggcctgatggaaaaattgtgaagctggcctgccactgtggtgctcctgattgccggaagcgcctctactaacctgcagtgtgtttatttctatttggatttttgaggaaacagcttatattgtaggaaaaacagtcatggtacctatgtagttgacatgctcttgatcatatatagcaaaagaggagcaatttatggggtgttcggtttaagaatgagttagtatatcatcttctcatttactatttttgcttggtttatgtaataaaatgagtcgatctatcaccaccttattcctcatagttagttagttagcactaacattagaaatgaagtcatcttatcaaatttaaggaatgagcttatgatgtaccaccttaatttggatgaagtgattcatcaaacaaacaccctattgatataatatagcattcttgttttgtgataattagagatttaaagcggctggtggtcatggtagcatattttgccacgattaactgataggacctgcaacactggataaatatatatacgttacatgttcttatgaggtgtttactttgaggaatgaggcagtggatcatcttctcactactcattatctatgtttggcggatggaattaagtgatttgttccctcgctggatgtccgctggtcctgcagggatgtggtgctgtacagcgtgc

SEQ ID NO: 3559 - DNA, 2023 bp, Zea mays
  Clone ID: TF_ZmC10178_1
cacagcttcttcacacacacagtgcgagaagggcctacaggggccgtacttaatccggactcacgcagcactgaccagtcccccacgcccaccgaacagctcccggcggaagaggagaggtttctgcagagaaaggcgtcaagcctgaccagccaggactggtctgttttgacgtgttctgctcatacctacccgcctgcgaattcattttgtggcagttggacgcttgcaaccgtccgaaagctttgttgcttgaatgcgagcggcattctggctgtagaagtaaaaattggagatccagtattaagcttaagggctcgttgatgccatttgggaaatggatagatcgacatcagccaggcgtgtgccctactaatcctccaaaacgctcatctcgtttgatgtagttacagaagttaattgatttactaaatgacccatatgatcctgttcatgtaacattgctaacaggatattatgcagtctgtgtcttggttgtttcagaaaacagcaaatggtagagtatgctttggtagatcgggattccagtggagcaggaatgttatggtgtgaaggggtaagcaagactttacttcatgggtttgtcgggcttgtgaaaaacctgagcaaaagagggagtgctgtctttgccctgtaaaaggtggtgctttgaagccaacaaatgttgataacttgtgggttcacgtgacatgtgcatggtttcagtcacaggttgcttttgctagtgatgagctcatggaacctgctattgggatattgaacattcaacctttgttatttatgaagatgtgtgtggtttgtaagcaaatacatggttcatgtactcaatgctacaggtgctctacttactaccatgccatttgtgcatcaagggcaggctatcgaatggagcttcactgcttggaaaaaaatggcagacagacaacaaagaagatttcttactgtgcccaacatcggagccctaaccctgataatgttttgataattcaaactcctgctgggactttctcatcaaaaaagcttgttcatagcaatggcaaggtagctgcatcgaggctgatcaggaaagatattcccttggatttgccatcagaagttaaaatttcagagaacttatcagcggcgagatgtcgggtttatgttaggaaagatctaaagagatctagagagggaacaattgtacatcatgttagaggaccttgtcaacaccgctgggaagaaattgataatctgaatccaccaagggaagagagggatccagaatctttttgtactttcaaggagcgtttgtgttacttacagaaaacagagcatggtagagtatgttttggtagatcaggaattcataggtggggactttttgctcggagggacattcaagaaggagaaatggtccttgagtatcgtggtgagcaggtcagacgaagtgtagctgatttacgtgaagaaaaatatcgtgtgcagggcaaagattgctatcttttcaaaatcagcgaggaagtggttgttgatgccacagacaaaggaaacgtggcacgactgatcaatcattcctgcacaccaaactgctatgcaaggattatgagtgttggacatgatgaaagtcgtattgttctaatagcgaagaaaaaagtttgcgctggtgatgagctaacgtatgactacctgttcgatccagacgaggccgatgaacgcaaagtgccatgcctttgtcagactgctaactgccggaagttcatgaattagttcgcttagatgtcagaggatcactgatataattttttcccccttatttacccccgggttttctccctctcgatgattcatttcctggtatatgttagagctcaatttttgcttacattcgtttttagaataagtatagttagagctctcaaaaagtggagcttccattcctgtaaataccacagctgtaatcactagggacagttcatttttcaaataaaacatttttgtgctaaaaaaaaaaaaaaagggcggc

SEQ ID NO: 3560 - DNA, 2452 bp, Zea mays
  Clone ID: TF_ZmC4118_3
tcggaattcggctcgggccagcggccagcaaaagcagcggcggcgcggccagggaccgacgtacccgccgcgagaagctccggttggcaccccaacggcatggatgctagcagcgtcagcccgtgcgatctagacagggagtttgcgctccaaatcgctcagctcctcgccacgcctcctctccaatcagcccaggaatactatggtgaactcatacggtccaagaagcttgatggcattagagtgagctacagtggcaagcatgggaaaggtgtttatgcaaatagggactttggtgaagacgaccttgttctgaaggaccaaatgttggtcggtgctcaggacagccttaacaagattgactgtgttgtgtgtagttactgcttccacttcattggttctatagagtaccaaattgggcgtagattgtatttgcaaagccttggtggtagtggtgatggcactaccgagagacactgccatgggagtgatgttgggtcaagtactggctgttccggtgcatcaaatggaaatagcaatgctgtgccacaagaggtcctgttgtcacttatggatggtaatacgctgttgcctttaaccgatcagttctgtttgccaccagttgttgcttgccctggtggatgtgagggagaactctactgcagccaatcatgtgcggattccgattgggattcttatcactctttgctgtgtgctggatccaagactgaaccattgcggaaatctgcccttcagaaatttgtggggcatgctaatgaaaccaatgatatttttttggttgctgccaaggctatcacttccaccttgttgagatataggaaactcaaaagacagcatgtgtctcatgaatcaagctcttcgctcctcttggaagcatggaaaccactttcaatgggcttcaaaaagagatggtgggagtgtgttgctttgcctgaagatgttgattccagtgaagaagaattgtttagacagcagataagggatctggcgtttacgtcactgcagcttctcaaggatgcaatctttgatcctgagtgtgcgcctttgttttcgcttgacatctatggccatataattggcatgtttgagctgaacaatcttgatttagttgtcgcatcaccagttgaagactatttcatatacattgacggtcttccagagagcgacaaggaggaagcagagaaggtgacagggccattcctagatgctttaggagaagactacttagttccgtgcgagggaacggcattctttcctctgcagagctgcatgaaccattcatgccgtccaaatgctaaagcatttaagagagacgaggacaaggatggccatgcagtgataattgcccttaggcccatcagcaaggacgaagagattaccatcgcctacatcgatgaagaccttccttacgaggagaggcaggcgcagcttgcagattacgggttcacgtgtacatgcttgaaatgccaagaagagcgaccggtctgaaaggacaaatatgtttgaattttgcggcattcagcctatgtcactgggtagttttgaaagctcgcgagaagtgagtgcacaaaatgatgtttgttttcggctgtaacttgcaaaagttttgttgttgtccaatgaatatgaatagtgacgaacagacgatcagtcgtcgtaaccagcagcctcatgggactaacacaaccacaagagcgaatggcaatagcagcaggttgacacttgcaactattttggttatacttgtacattaacacaactggctgattcgccaagtatgctagtattacatttgtcatctccctgcatagattatgggggcactgcatatcgcacaacgacgtgtacatcatagcacaggcttttacacatggtacaggaaaaatgagttccatcactcgagccgagctgacgaaagggaaaaaaaaaacaatgatgtcctccgttctcactaagccgctgccaacacttggatggatggcagtttgacctgcaggtaaagaaactctatctctggtctaggcctccaaatattgttccaaattcggcgcgcggaaacattggttgctattctttcaggtcgctgcggggagatgtgcagttgatatttgataaacctagcaaccaatgttttattcgctccaagcttggaacagtattttggaggcctagaccagagataaagaggtcaaactccatccaggaaattggcggcggcggcggattagtgagaagggaggacgtcattgttttttcttttctctgctcgaatgatggaactcgttttttttcctgtatcatgtgtaaaagcctgtgctatgtaccagtaatccattgttgtgcgatatgtagtgcctcagaatctattcaagggaaaacatatgtagtagcatacttgtcgaatcagttgtgttaatgtacaactccaccc

SEQ ID NO: 3561 - DNA, 1091 bp, Zea mays
  Clone ID: TF_ZmC2742_2
aagacgaggatccttgtattcgtttactctcgtactgcaaaaagcatagacagccttctgctgctgaacgtccatctttagaaagtgatcctcctgaacccattcaggtagttcagacagatatggcttcatcatctggttgtgcaaggaccgaaccctataatttacacaggagaaggggccaaaagcagccacaagttgtcgctactgcttctctgaaacgtttatatgtggagaatagacctcatattgtcagtggctactgccaaaacagagtaggcaatacatgcggagaatcaattcaaccgtttggtttgtcagatgctgtgcagcaagaagctattggcaatgtgtcttctatggttgaaaaatatacaatcgtgaaggctacatttaggaagagactaacttttggaaaatcaaaaattcatggatatggtgtctttgccaaggttgcacacaaggccggagatatgatggttgaatacataggggagattgttagaccaccgatatcagacactagagagcggcgaatttacaactcactagtgggtgctgggacatatatgttcaggatagatgatgaacgtgttatagatgccactcgggttggaagtatagcccgtctgatcaatcactcatgcgagcctaattgctattcacgtgccataactattcttggagatgaacacatcatcatttttgcgaaacgggacatagatccatgggaagagctgacatatgattataggttacatcatattggttgggatatgacatgcttgtgtgatatgcttgccagtgcctaaaggcaaattctaaaaaatggttgagtttcattcttgaatcctgataattcttctcattatttgagtggaagacgaatctaattgtataggtacccaatataggatcggcaatccaatttggggacataagttgaatcaattgtcgtgtaccattgaaatgttagttgttacacatatttcggccatttgagatggcctgccatgtgtaatgtaatcgaagtacatggttgcacttttcggtgttgcccatatattatccataacaatatgtagtttcca

SEQ ID NO: 3562 - DNA, 771 bp, Zea mays
  unsure (1)..(771): unsure at all n locations
  Clone ID: TF_LIB4704-006-R1-M1-C10
agaaaattcgggtcaaaagtaacattaatcctaaaccaggataatttacatgaccagatccaaggagtcactgttaaacaaccaggcgtccagagcaaacagggatgataacaagtttacacaaaccggtgcagctggtggacaggattagcagaagaaatacatcaatccacacacccataaatatttgaacaaatggtgggataacggccaccatgccgtgcagggcaacagaaattctacagttgaaattctacagtttgacaacaacttgctgtcttcacagtacacatggcagcaattggaatcatcagtcatactcatatcatccggagactaagaaaggatctagctggaagtggtttgcatgattaaccacaaagagcaaggctcttaacccatcaaaatagtccacggcagttttgtgatccacacatgcagttcttcgttctacgagagcctgaaccactagattcagctccagcaacaccatagtcataagtcagttctgtcatgggtggaatatgtttcagtgcaaagaacattantatgtgggtgtccatcatccccatgatcatattgaaccggttgccagaagacattgggtgagcaactgtggttcatgaaacgggagacatttcccatgttttttgcacttatcttgataggcagtggctcaaattcatcagccgatacatatgtgctatcttcacctatcagttcaggtccacaattccattttaaagtcttctcaccagggcatacagtttg

SEQ ID NO: 3563 - DNA, 3064 bp, Zea mays
  Clone ID: TF_ZmC3517_1
gaaatcctccacaacccccatcccggaaccgttccgccgcaccgcgggccgcttccatctccaggggcaggggatcttggagggggtctgctggtgggtccgagcagggcagcggcggcgttggatggagactggggcggcggcggcaccggcatcgagggcggacggcgtgcggaggtgcaaaatactcgtgccctggcgtttccagcccggcttcgtcaggcagccgctcaagcaggccgccaatgacgcagcggtcaacggcgacggaggtaataccgccggcgcgcctgatgctaaaagttgccgagcggatggggcggcgagcgacggcggtgagaccaacgttttccgagacgcaaaaaaattcggatcgggtagggctacccgcgggaagaatggggaagttgacggaggagaggagcattcggagagatgcactagcagtcagagtttgaagagtcctgatgtagaaaatggcggtcgccctggacccggagatgcatgcaatctgggcgagtctgtaaggggaggctgggtgaagagctccccattggaaggtactggaaatagcaggggtgcaaatggtggcgtcgaggctggagaggactacaatctggggagctctaactgtgatgctagttggaaggacgctcgcacccaggaattcaggggtgctggtgatggagcagcttgcgatcctgaggtgattgagagcaatgtaggagcagagaagtgctttgccaagggtttgaagaagccgtttatggatcagaccgggtcaaagagcaatggttcttctgctccaggactcgagtcagaggaccctgagggaaatgttggcttggaagattcctcttatcaagccgcaaaggggtgtagcatgggagatggagcagccaaggagaatgaagcaacagccaatggttgcagctcggcgactcctggcagcattggtaatggaacgtacgtccgcaagggacggaaggcagctgtaccatggagatttcaggccaggtacaagcgatcgttctctgatgcttttggctccaataatgaatctcctgatcttccagcatacatgtttgacagtagttcaacacagtgcaccccagcaactagaagcaccgtgcggtgttatgcgagtgctcattctggtgttagagtttcggctatgaataacttctcagtgaaaggtgatactgaatgtaagaagaggaaaactaataatgattatcaggatgaatcaatgctaaataatggaggtgtcgttgttagagaacgcatcatgcggtctctacaggatctccgtttaatttatcgggaccttttagatgaagaagataattctagggaaaaagtgcttaatgtgcggcctgatctaaaggcttacagaatcttcagggagcggttctgcacagattttgatgatgagaaatatattggcagtgtgcctggaatatatcctggtgatatcttccatctgagggtagagctttgtgttgttggtctccatcgcccacatagggtaggtattgattgtaccaagaaggatgatggtacaactgtggctgttagtatcgtgtcatgcgcacaatctcatgacatcaagtataatctggatgccttcgtatatactggactggtggctgttgcagtcaatcagaggatagagggtaccaacttggctcttaaaaagagcatggatactaatacaccagtccgtgttatccatgggttcaccacttttaatggaaaaaagaaatttcctgcatatatatatggtggtttataccttgttgagaagtactggagggagaaagagcatggagaccgttatgtgtatatgttccgactgagaagaatggaaggacaaaagcacattgacatccaagaaattctgcaaacagggaactctggatcaaacgacaatgttattatcaaagatctatcacgtggattggagagagttcctctacctgttgttaacaaaatatctgatgagcgtccaatgccctattgctacatttcacaccttcgatatccccgtaactaccggccaactcctccagccggttgtaattgtgtaggtgggtgctcagactcaaacaagtgtgcatgtgcagtgaaaaatggtggagaaatccctttcaatgataaaggccgtattgtagaagcaaaacctctcgtttatgagtgtggtccttcttgcaagtgccctcctacatgtcacaacagagttggccaacatgggctcaagtttcggctgcaaatcttcaaaacaaaatcaatgggttggggtgtgagaactcttgaattcataccatctggaagctttgtgtgtgaatatataggtgaagtgttggaggatgaagaagcacaaaaaaggacgaatgatgagtatttatttgctattgggcacaattattatgataagtctctttgggagggcctatcaagatctataccgtcacttcagaagggtccgggcaaagatgatgaaaatgaaactggatttgctgttgatgcttcagagatggggaactttgcaaaatttatcaatcacaattgcaccccaaacatatatgcacaaaacgtcctttatgatcacgaagatatcagtgtgcctcatatcatgttctttgcttgcgatgatattcgacccaatcaagaactagcataccactacaattataaaatagatcaggttcatgatgccaatgggaacatcaagaagaagaaatgcctttgtggctcggttgagtgtgatggctggctgtattgattttttaaaaacttgctgtattacgtttagaatctgcagtttttttaagcataactgaacttgaacttgtttcattttgccttcatctagatcatgttgtgacaaaatgtaaaataagacatcagtgtttttagttgccaatgggggtcaagttttttcctttctcattctattcgttattttatatgtctagctttcaatatgtagaataatgtgtgaatatacatggcaataagttcaagtgaatttgctatatttgacaatttacataaaaaaaaa

SEQ ID NO: 3564 - DNA, 1048 bp, Zea mays
  unsure (1)..(1048): unsure at all n locations
  Clone ID: TF_ZmC2220_2
gcagtgtggaaaccgtgtgattcagcgtggtataacatgcaaactacaggtgttctttacacgtgagggtaaaggctggggagtacgcacagtggaagatctcccaagaggtgcctttgtctgtgaatatgttggagagatactaacaagtgctgaattgcacgaaagagcaattgagaatgcaagaaatggtaagcatatgcatcaagtgctcctggacgctggttggggttcaggtgtagtattgagggatgaggacgcttgtagccttgatggttcattttatgggaacgtcgggcggtttatcaaccaccggtatgtaggatacttgctcgtttttttttgctgtaaatatcttgccatagtttgtgtattacagtcttttgtctgctactccgctatgtttttggtaacgaacatatgctatgactagatgctacaatgcaaatttagttcagatccctgtagaagttgagacgcccgatcatcattatcaccatctggcatttttcacgaacaagaaagtggaggcatttgaagagttaacttgggattatggcatcgattttgatgacatggaagggcccagtaaaccgttcagatgcatgtgtgggtgtagatactgccgcgatccgaacaatccaaggaggatgggtagagcagctgctaagcgaaagtaggcagggagcgcggacttggttggagttgagcacaccaacttttgctgtgggggggtctggtttcgtgtttgatgtggagtaatgcagtaccatcacctcagctagtattaagtgtagataggtgtggatgattttggtgaatggtgttatggacggaaatgctgcaggctgagcgacctagtaacctatgccatgtagtggcatctaaattagcctgggattgtgtatgcgtaaaaagaacgcctaagacttaaccatgttattatgtcagcttggtacatggtgataaaaagaatctgaccatttcatgtcatgncttttgtcaaaaaacatgaagtactctgcgcttgttccactgcttatgggcg

SEQ ID NO: 3565 - DNA, 259 bp, Zea mays
  Clone ID: TF_700456152H1
ctcgatttatgaatcacaacagccagcccaaatgtgagaccctcaagtggacagtgaatggggacactcgtgtgggcctgtttgccgtctgtgacattcctgcagggacggagctgacttttaactacaacctcgattgtctgggcaatgaaaaaacggtctgccggtgtggagcctccaattgcagtggattcctcggggatagaccaaagacctcgacgaccctttcatcagaggaaaagggcaaaaagaccaaaaa

SEQ ID NO: 3566 - DNA, 3060 bp, Zea mays
  Clone ID: TF_UC-ZMFLB73179F11_FLI
gcgacttcgcgtgtgagggcgggagagcgcgcggggctagggtttccacgggtgatggaagcagaggctgccgcggcggtagtggcgtcgtccgcatctgcctcggcttccgcgggccggtctcgcccatctagcagcgccgcccaggtcaccagtaattcggctgtgcgagctggagaagaaaatgctgcctccctctatgttttatctgttattgactcgttaaaaaagaggattaccgcagatcgtttgacttacattaagaataggataggggagaacaagactaatatcagcagctatacacagaggacttacaatttatcaaaaaataggcaaattagtacatcaaagggtactgattcagcatcaaatttgctcacaaaaaggcaagatgatgcgctatgcaccctgcatagtcttgatattattccggttgacaaagatggtggtacttttcaagacgaaagtcctttctcttcatctaatgttatgtttggtggaaatcttggtcccaagaatgctattattagaccaattaaactaccagaagtgccaaagcttccaccttatacaacatggatatttttggacaggaaccaaaggatgacagaagaccaatctgtacttggtcgacggaggatttactatgataccagttgtggtgaagctctaatttgcagtgatagtgaagatgaagccattgaagatgaggaggaaaaaaaggaatttaaacattctgaagatcacattattcggatgacagttcaagaatgtggcatgtctgatgctgtactgcaaacgctagctcgacacatggagcgggctgctgatgacataaaggccaggtatgaaattctgcatggtgagaaaactaaggattcttgcaagaaagggactgagcataatgtcaaagtggaagatttgtactgtgacaaagatttggatgcagcattggattcttttgacaatctcttctgtcgacgatgtctagtacgcttgactgtaactttcagatattcttttctaggacctgtgtgctgatggacatttctgctcattggtgatgctgataggtgtttgattgcaagctacatgggtgttctcaagatttagtatttcctacagaaaaacaaccagcttggagtggcgttgatgacagtgtaccctgtggtattcattgccataaactggcatctgaaccagatgctgctgctggtgctgatcacatgctttttgatgttgaggagccaactcactcatcagacaatgtgatgaaccagccaggttcaaataggaaaaagaacggctccagtggaaggaagactaaatctcaacaaagtgaaagctcttcaactgcaagagttatctcagaaagcagtgattcggaagtacatccaataagcaataaatctccacaacactcccctagtccctcaaaagttaaaattgggccgaaaggtggaatcagaaagattaccaatagacgaatcgctgagagaattcttatgagtgtgaagaaaggacaaagggaaatggcatcatctgattctaattttgttagtggatatcttttggcaagggacatgaagcttaggtctgatacacgaaatggaaataaggaattaattgtatcctcacaacagagttctccaagcacaagaagttccaaaaagaagagtacacctcaaattgggaacagctcagcttttgctgaggctcataatgattcaacagaggaagcaaataaccgtcattcagcaacagatggttacgatagttcaaggaaagaagaattcgtcaatgagaatttatgcaagcaggaggtgtacttgagatcatggaaggcaattgagcagggacttcttgtgaaaggattagagatttttggaaggaacagttgtttaattgctcggaaccttcttggtggaatgaagacgtgcaaagatgtttttcaatatatgaattatattgaaaacaacagtgcctctggagctcttagtggtgttgattctcttgttaaaggatatattaagggtactgagttgcgcacaagatcaagatattttagaaggcgaggtaaagtccgtcgtttgaagtacacctggaaatctgcaggttacaatttcaaaaggattaccgaaaggaaggatcagccttgtcgacaatataatccttgtggttgtcaatctacatgcggaaagcagtgtccatgtctttcaaatgggacatgttgtgagaaatactgtgggtgtccaaaaatttgcaagaatcgttttcgaggatgtcactgtgcaaagagccagtgtcgcagccgccaatgtccatgttttgcagctgacagggaatgcgatccggatgtttgcagaaactgttgggttgggtgtggtgatggtacattgggagttccaaaccagagaggagataattatgaatgccggaacatgaaactgcttcttaaacaacaacaaagggtcttacttggaagatcagatgtctctggctggggagcattcctcaagaatagtgttagcaaacatgaataccttggtgagtacactggggaactaatctcacacaaagaagcagataagcgtggaaagatatatgatcgtgagaactcatcgttccttttcaacctgaacaatgagtatgttcttgacgcatacagaatgggtgacaagctgaaatttgccaaccatgcccctgacccgaattgctatgccaaggttatcatggtaactggtgatcatagagtgggcatattcgccaaagaaagaatcctcgctggtgaagagttattctacgattaccgctatgagcctgacagagctcctgcttgggcccgtaagcctgaggcgtcgggagcaaaggatgatgggcaaccgttcaatgggcgtgcaaagaagctcgcccaaaacaaccgaggctgaatctgatttgattctttcattgttaggacaaatttggcagccattcaactaatacaaggaacctgtcattcataggccccaatttatttgaactcgtcattgtaactcgtatgtgcttgaattctcc

SEQ ID NO: 3567 - DNA, 3193 bp, Zea mays
  Clone ID: TF_ZmC12902_2
cgcgtgtgagggcgggagagcgcgcggggctagggtttccacgaggggtgatggaagcagaggctgccgcggcggtagtggcgtcgtccgcatctgcctcggcttccgcgggccggtctcgcccatctagcagcgccgcccaggtcaccagtaattcggctgtgcgagctggagaagaaaatgctgcctccctctatgttttatctgttattgactcgttaaaaaagaggattaccgcagatcgtttgacttacattaagaataggataggggagaacaagactaatatcagcagctatacacagaggacttacaatttatcaaaaaataggcaaattagtacatcaaagggtactgattcagcatcaaatttgctcacaaaaaggcaagatgatgcgctatgcaccctgcatagtcttgatattattccggttgacaaagatggtggtacttttcaagacgaaagtcctttctcttcatctaatgttatgtttggtggaaatcttggtcccaagaatgctattattagaccaattaaactaccagaagtgccaaagcttccaccttatacaacatggatatttttggacaggaaccaaaggatgacagaagaccaatctgtacttggtcgacggaggatttactatgataccagttgtggtgaagctctaatttgcagtgatagtgaagatgaagccattgaagatgaggaggaaaaaaaggaatttaaacattctgaagatcacattattcggatgacagttcaagaatgtggcatgtctgatgctgtactgcaaacgctagctcgacacatggagcgggctgctgatgacataaaggccaggtatgaaattctgcatggtgagaaaactaaggattcttgcaagaaagggactgagcataatgtcaaagtggaagatttgtactgtgacaaagatttggatgcagcattggattcttttgacaatctcttctgtcgacgatgtctagtgtttgattgcaagctacatgggtgttctcaagatttagtatttcctacagaaaaacaaccagcttggagtggcgttgatgacagtgtaccctgtggtattcattgccataaactggcatctgaaccagatgctgctgctggtgctgatcacatgctttttgatgttgaggagccaactcactcatcagacaatgtgatgaaccagccaggttcaaataggaaaaagaacggctccagtggaaggaagactaaatctcaacaaagtgaaagctcttcaactgcaagagttatctcagaaagcagtgattcggaagtacatccaataagcaataaatctccacaacactcccctagtccctcaaaagttaaaattgggccgaaaggtggaatcagaaagattaccaatagacgaatcgctgagagaattcttatgagtgtgaagaaaggacaaagggaaatggcatcatctgattctaattttgttagtggatatcttttggcaagggacatgaagcttaggtctgatacacgaaatggaaataaggaattaattgtatcctcacaacagagttctccaagcacaagaagttccaaaaagaagagtacacctcaaattgggaacagctcagcttttgctgaggctcataatgattcaacagaggaagcaaataaccgtcattcagcaacagatggttacgatagttcaaggaaagaagaattcgtcaatgagaatttatgcaagcaggaggtgtacttgagatcatggaaggcaattgagcagggacttcttgtgaaaggattagagatttttggaaggaacagttgtttaattgctcggaaccttcttggtggaatgaagacgtgcaaagatgtttttcaatatatgaattatattgaaaacaacagtgcctctggagctcttagtggtgttgattctcttgttaaaggatatattaagggtactgagttgcgcacaagatcaagatattttagaaggcgaggtaaagtccgtcgtttgaagtacacctggaaatctgcaggttacaatttcaaaaggattaccgaaaggaaggatcagccttgtcgacaatataatccttgtggttgtcaatctacatgcggaaagcagtgtccatgtctttcaaatgggacatgttgtgagaaatactgtgggtgtccaaaaatttgcaagaatcgttttcgaggatgtcactgtgcaaagagccagtgtcgcagccgccaatgtccatgttttgcagctgacagggaatgcgatccggatgtttgcagaaactgttgggttgggtgtggtgatggtacattgggagttccaaaccagagaggagataattatgaatgccggaacatgaaactgcttcttaaacaacaacaaagggtcttacttggaagatcagatgtctctggctggggagcattcctcaagaatagtgttagcaaacatgaataccttggtgagtacactggggaactaatctcacacaaagaagcagataagcgtggaaagatatatgatcgtgagaactcatcgttccttttcaacctgaacaatgagtatgttcttgacgcatacagaatgggtgacaagctgaaatttgccaaccatgcccctgacccgaattgctatgccaaggttatcatggtaactggtgatcatagagtgggcatattcgccaaagaaagaatcctcgctggtgaagagttattctacgattaccgctatgagcctgacagagctcctgcttgggcccgtaagcctgaggcgtcgggagcaaaggatgatgggcaaccgttcaatgggcgtgcaaagaagctcgcccaaaacaaccgaggctgaatctgatttgattctttcattgttaggacaaatttggcagccattcaactaatacaaggaacctgtcattcataggccccaatttatttgaactcgtcattgtaactcgtatgtgcttgaattctccatggcatctggtcctgccatccgtagagttaggtcccgtttgttttgaggaactaaaaattaatccctctattttagtcacattgagtctctagattgtcaaacggcgggactaaaacaaagactaaactatttgtctctagtacctcaagccatgactaaaagggaataaatcatataaattttatttttatccttcctttaaaaaaaaaaaaaaaaaa

SEQ ID NO: 3568 - DNA, 1273 bp, Zea mays
  unsure (1)..(1273): unsure at all n locations
  Clone ID: TF_ZmC3767_6
attgggacctcgagccggccggaaaaaaattcaaaaaaaaaaaaaaaaaaaaccttccgcctgcccaccgtgcccctgctcgcccttcccgtcgcggtgctcgtccgccctgccgcgccctgcccgccgcgtcgtgaggggatgtgtctagggttattgggagagcaccccttcctatggcgtccacgacaagcactagggcgtcgccatagacgcctcgcggatgccatacacccagttggcaaggcgtggactgtggcgttcggcctggagcaccgcttaagagacactgtacggacgccataacaattaacaagcatggctctagtgcaggtgcgatttactcgtgcagaagctccgacaactatttccgaattacccgggctggtttgtgatgacatctctggagggcaagaaaatattcctattcctgctactaacttggttgatgatccacctgttcctccatctggtttcaagtacttgaaatctctacaaattccaaaggacatcaagattccgtctagtattattaagacagcttcaaaaggatggggagtcaggacttgggacactatcctccctggggctcccatctgtgagtacacagggggtgttgaggaggaccgaagatttggatggttcacagaacaactattgttttgacattgactgtcttcaacccatgagggttttggatggaagggaganaagggctggatccgaaatgcacctgcctaatcttcatcctgagaatgattcagatgcacaccctgcacctgagtactgcatagacgctcactctattggcaactttgcaagatttataaatcacagctgccaacctaaccttttcgtccagtgcgtcttgagctcacacaatgatgttaaactggcgaaagtgatgcttttcgctgctgacaccatacttcctcttcaggagctatcctatgactacggttatcgattggacagtgttgttgggcctgatggaaaaattgtgaagctggcctgccactgtggtgctcctgattgccggaagcgcctctactaacctgcagtgtgtttctttctatttggattttggaggaaacagcttatattgtaggaaaagcagtcatggtacctatgtagttgacatgctctgataatatatagcaaaagaggagcaacttacttatgaggtgtttactttgaggaatgagctagtgtatcatcttctcactactcaatatttttgtttggtttatggaataaaatgatttgatccatc

SEQ ID NO: 3569 - DNA, 1628 bp, Zea mays
  Clone ID: TF_700203210_FLI
ctcgtctgttcagtcttcagagctgggttcggtctattcctcatcctctcttgttgatccggagtgccttaagttttggccgtcttgttactgtctgctgttccacagtcgacgaatcacgaatgctaatggaggaagaatgcgtagaggcaccgtcgtacatccacattgacagcaacgctttctcctacagaaagcataagagtcagacagaggaggacatagctgtgtgtgagtgccagtatgatatcttggatccagagagtccatgtggagaccggtgtttaaatttattgactaacacagaatgcacgcctggctattgccgttgtggtgtgtactgcaagaatcagcggttccaaaaatgtcaatatgccaggacaagacttgtaagaactggagggcgtggatggggccttgtggctgatgagaatattatggctggtcaatttgttatcgaatattgtggagaagtaatatcatggaaggaagccaaacggagagctcaagcttatgaaacccagtgtttaaaggatgcctatatcatttacctcaatgctgatgagtcaattgatgcaacaagaaaagggaaccttgcgagattcatcaaccattcatggaggccacgtacctgtgggaagatgatgatgacaggttttctgttgagaatatccctctttacgattctgctgatgacgaacctacaagcattaacaaggaaatcctcgtatcaagtgatggcatggttacccaatacagcaacatcagcagagtacagagtaccgaaaatcctggaaacactggaacaaatgaatttgcgccaattatcgtcgacgaactgacaacaagctcaaatggattagcaccaatgaacgttgaaccattgactgtaagctcaaatgagttcacgccatcgaacgccatgccaatggtagctcgtctagtcgagaatgggtcaactggatacagcgcacaggacactcacgacgcttctcagaattcagcgcccaaagctgcaaatcacgcgaaccaaactggacctcagaacaacagcaaccattcaacgttggtccctgtgaagcccgcgccgaaacgccgtggcaggaaaccgaaacgcgttgtgcacaagcagctggacatcccagatatctgcgaccggcttacatcgtctgtggcgtgcgaagaaatactgtactgtgaggaagtgaagaaccatgccgtttctgaaatcgatgccctgtacgatgagataaggcctgcggttgaagagcacgagagggacagccaagatagcgtctccacaagcctcgcggagaagtggatcgaggctagctgccgcaagtacaaggccgaattcgacctgtatgctgcagtactcaagaacgttgcctccactccactacggtcgaaggatgatgtgggcccaagagagcagaacgggttgaagtatctggagaacggctcatgatttcttttagctagaagcgtggaatattacgtacgccttcaatttgtagtatagggattgcattttttttaactgtggttggtcttgtatttaggtagaggcattgtaaggttacatgattttaaatagcgtggaatcatgtcaaacgcacatttgatct

SEQ ID NO: 3570 - DNA, 2720 bp, Zea mays
  unsure (1)..(2720): unsure at all n locations
  Clone ID: TF_ZmC3767_4
ggtgagctcctcgtctctcttgctgagctcgacgcggcggtccggtgctcgctgcgaagctggtggatggcgaatatggattcggttgttgtgatggaggtggcgccggtgccgatcccgacgttcatggacgccactcccctgaaccccccactgccgcttgtggtggaggagctcgtgctgcgccgcagtgctcgttacctcaacaggccaacccggcctaactacgcggaccaggagcctccaaaaaaccccggcggccggggccggggcaagcgaaagagggatgaggagaagccggagctggcggcgcagcagggtaccaagaccccaggcaggaatgactccaatgttgaggcgggtgagaggaagccgatgcccgtgactgcggcggtgccggcctgttgcgctggcgttgctgcggaagacgatgcgacgccgactgggaagagcgccaagctgagggtgaaggagacactgagggcgttcaacagccactacctccactttgtccaggaggagcagaaaagagctcaggctgcgatacaggagattgaggctaagggtggcctcaaacgtcagaccaaggggggtaaaaagaagagcagtaagcaagaggctgaagctgaggagaaagagaaacgcccatcaaagcgacctgacctgaaggcaatcaccaagatgcaagaaatgaatgccgtgctttatcaggagaagacgattgggcatctaccagggctcgatgtcggagatcagttttattctcgcgctgaaatggtagtgttgggcatccacagccattggctcaatggcattgactatatggggatgaaataccaaggaaagaaggagtatgccaacttaactttcccattggccacatgtattgtaatgtcggggatatatgaagatgatctagacaaggctgatgaaattatttatactggtcaaggaggaaatgatttacttggtaaccaccgccaaattggctctcaacagttgaaacgtgggaatttagcattgaagaatagcaggaagaatggtaatcctgtccgagttattcgaggtcatttatcaaagaatagctatactggaaaggtctacacctacgatgggctttacaaggttgtagatgactgggtgcagaacggtgtgcaaggccatgttgttttcaaatttaagttgaagcggcttgagggtcagccatcattgacaacttctgaggtgcgatttactcgtgcagaagctccgacaactatttctgaattacctggactggtttgtgacgatatctctggagggcaagaaaacattccgattcctgccactaacttggttgatgatccacctgttcctccatctggtttcacatacttgaagtctctaaaaattccaaaggacatcaagatcccatctagtattattggctgtgattgtgaaggagattgtgctagcaacaaaaattgttcatgtgctcagcgcaatggttctgatctgccttatgtatcatataagaacattggcaggttggtggagcccaaagcagttgtatttgaatgcggggctaactgcagctgcaaccatgattgtgtaaacagaacatctcaacagggtttgcagtatcacttagaggtatttaagacagcttcaaaaggttggggagtcaggacttgggacactatcctccctggggctcccatctgtgagtacacgggggtgttgaggaggactgaagatctggatggttcacagaacaactattgttttgacattgattgtcttcaaaccatgaaaggtttggatggaagggagaaaagagctggatctgaaatgcacctgcctaatctttatccagagaatgactcagatgcaccacctgcacctgagtactgcatagacggcagttccattggcaattttgcaagatttataaatcatagttgccaacctaaccttttcgtccagtgcgtcatgagctcacacaacgatgttaaactagcaaaagtgatgctttttgctgctgacacaatacttcctcttcaggagctatcctatgactacggttatcgcttggacagtgttgttgggcctgatggtaaaattgtgaagctgccatgccactgtggtgctccagattgccggaagcgcctctactagacctgcagtgtgtttccattttgattttgcaggaaacaacctatattgtaggaaagcattcatgttatttatgtagttggcatgctctgatatatagcgaaagaggagcaacttaatctccttttagagcattcttattttgtgataattggaggacatgctggtcatggtagcatattttgcaggaaatcaattaactgatatgtctgggcatggaacacttaaactatgtactgtcgtgtttttttaatcacattaattgaatcaagagcatgtcacagcggggccatcattgacaacctctgaggtatacttgaacaaatacaacaaactgagttgttgtattgatagtgcccaccgtcttcttatgatttggatgggtggacttcgcgtgaaaataatatgacacatctcatatttgctatcaattgtcaaaacatttctagttctagtcatggttggtatggcgctaaggtgacctacgagtgatctaggtcctttntatattttaaatgtctaagagtttgtttagaagcactcagttttttaaaaactggtttatg

SEQ ID NO: 3571 - DNA, 456 bp, Zea mays
  Clone ID: TF_jC-zmXLIB3526P036bd01b1
ttaacttttggaaaatcaaaaattcatggttttggggtctttgccaaggttgcccacaaggccggaaatttgatggttgaatacttaggggaaattgttaaaccaccgttttcaaacactaaaaagcggcaaatttacaactcattagtgggtgctgggacatatttgttcaggataaataataaacgtgttttaaatgccattcgggttgaaagtttagcccgtttgatcaataattaatgcaagcctaattgcttttaacgtgccataactatttttggaaataaacacataatcatttttgcaaaacgggacataaatccatgggaaaagctgacatataattataggtttttttcaagtgataaacaacttccatgtttttggggattccccaaatgccggggagtatttaatgattttaaggcaaagaaacatccggttaaaatacaagtt

SEQ ID NO: 3572 - DNA, 2976 bp, Zea mays
  unsure (1)..(2976): unsure at all n locations
  Clone ID: TF_ZmC7397_2
ggtatcctttagccgttagcctcttccttccgtctgccaccggcacgttctctgccctcgggtacctcgtctgttcagtcttcagagctgggttcggtctattcctcatcctctcttgttgatccggagtgccttaagttttggccgtcttgttactgtctgctgttccacagtcgacgaatcacgagagtgcttatggaggaagaatgcgtagaggcaccgtcgtacatccacattgacagcaacgctttctcctacagaaagtgagcagttctgcgttagttctttctcaatctgtccaatgtgggttgaactttgatgggactgggtcgcaacatttcctctcgttttctgttgttntgggaatgttatacttcctggctacctgtgttatcttttggaggccttagagtctgacagaggaggacatagctgtgtgtgagtgcccgcctgatttcttgggtcccgagagtccatgtggagaccggcggttggatttaaacccacccaatcccactcaatccacatggattgagagctaaccgaacaaggcctaaaaagaaatctgttaggtttagcttttggtttttgccccctaaaagccaaaagctaaaccaaaaagctggatctagaaagcagctttttttaaaagccgattttctcgcagtgtaaaactgaaagcacctctagacctgcttttagcggcttttggatggaactgtaaaaatatatgtggaatattttttagctttttagtggttttcactaaacggttttagctttttagcacttcactgtccacatcagcttttttcacagatcacaacccacaacagcttttttcactgccacagcccaaccaaagagaccctaagtcttgcatgttgcttattctttacgttacagtttaatagcaattatgctgacacttaatctcttttgatagcggttccaaaaatgtcaatatgccaggacaagacttgtaagaactggagggcgtggatggggccttgtggctgatgagaatattatggctggtcaatttgttatcgaatattgtggagaagtaatatcatggaaggaagccaaacggagagctcaagcttatgaaaccccgtccgccagtgtctgcagatattctctcgcttctcatatttgaattgtggcaaactggcacttttttagctagctataacatctagcttctgtaactgcaggtttaaaggatgcctatatcatttacctcaatgctgatgagtcaattgatgcaacaagaaaagggaaccttgcgagattcatcaaccattcatggtaagtttgtattaaaggcacagcatacttgaatttcatcttgcttcttatgtgtgtgatttgatcattgattttttctgtcattgacttgtaagtaattaagtctaatagttcactattgaagcatacagccaaccgaattgtgagacaaggaaatggaatgtccttggggaagtaagagttggaatttttgctaagcaaaacattccttttggcacggaattatcctatgactacaattttgagtggtatggtggtgtgatggtgcggtgcctctgtggagccgccagctgttctgggtttcttggggctaaatcacgtggtttccaggtgggcgaacaaatttatgttgtgcatgtgacttcctatttcatgcttgacacttgacagtagtgttcgacagaaggaatcaccgctaccttttagttgttatatgtcaatcctctttgtcagacattggaatgactgattgcactctggttttctgcatttgcttatttgctgacataacgttttgagccttcatgctatctacttattgcttggaagattgacattctgcatcattatctggtcatttttgcatttccttgtaagttgatatttgatatgttcattatgttcctaatgtagctttattgattggtatgttgcaggaggccacgtacctgtgggaagatgatgatgacaggttttctgttgagaatatccctctttacgattctgctgatgacgaacctacaagcattaacaaggaaatcctcgtatcaagtgatggcatggttacccaatacagcaacatcagcagagtacagagtaccgaaaatcctggaaacactggaacaaatgaatttgcgccaattatcgtcgacgaactgacaacaagctcaaatggattagcaccaatgaacgttgaaccattgactgtaagctcaaatgagttcacgccatcgaacgccatgccaatggtagctcgtctagtcgagaatgggtcaactggatacagcgcacaggacactcacgacgcttctcagaattcagcgcccaaagctgcaaatcacgcgaaccaaactggacctcagaacaacagcaaccattcaacgttggtccctgtgaagcccgcgccgaaacgccgtggcaggaaaccgaaacgcgttgtgcacaagcagctggacatcccagatatctgcgaccggcttacatcgtctgtggcgtgcgaagaaatactgtactgtgaggaagtgaagaaccatgccgtttctgaaatcgatgccctgtacgatgagataaggcctgcggttgaagagcacgagagggacagccaagatagcgtctccacaagcctcgcggagaagtggatcgaggctagctgccgcaagtacaaggccgaattcgacctgtatgctgcagtactcaagaacgttgcctccactccactacggtcgaaggatgatgtgggcccaagagagcagaacgggttgaagtatctggagaacggctcatgatttcttttagctagaagcgtggaatattacgtacgccttcaatttgtagtatagggattgcattttttttaactgtggttggtcttgtatttaggtagaggcattgtaaggttacatgattttaaatagcgtggaatcatgtcaaacgcacatttgatct

SEQ ID NO: 3573 - DNA, 3269 bp, Zea mays
  Clone ID: TF_ZmC13490_1
ggcatctgtaccgccactgccaccacgtgctgcatgggtgttttgtgatgattgccaaaagtggcggtgcatacctgctgaacttgcagatgtgattggagaaacaaattgcagatggacttgtaaggacaatggagacaagacgttcgctgactgttctattccacaagagaaatcaaacgctgagattaatgcagaactcgatctttcagatgcttcagctgatgaagcagacaatggtggatctaactccaaagcttgcaaaccaccgtcatggactcttgttaggtcaaacttgtttctgcatcgaaaccgcaggacacaatccattgatgagagcatggtgtgcaactgcaagccaccccaagatggccgaatgggttgtagagatggatgtttgaacaggatgctcaacattgaatgtgtcaagcggacatgtccatgtggagaacaatgctctaatcagaagttccagcggcgtagctatgcaaaactgagatggttccattctggcaagaaaggctatggattgcagttgcaagaagacgttactgaaggaagatttcttattgaatatgttggagaggtccttgacataacatcctatgaatcccgccaaagatattatgcttgcaaaggccagaaacatttctatttcatggctctaaatggtggtgaggtaattgatgcttgcactaagggaaacttgggccgattcatcaatcatagctgcagccctaactgttgcacagagaagtggatggtcaatggggaagtctgcattggaatatttgctttgaggagcatcaagaagggtgaagaattgacatttgattacaattatgttcgtgtatctggtgctgctcctcaaaaatgcttctgtggtactgccaaatgtcggggttacctgggtggagacatatcaattgtcgataccatcatcacccaagatgatacagaagcagatcattttgaacaaatggttgttgacaaagactccaaggagttgctgggtccaaatgagtctgattctgatggtagccacccaaatatttcagaacctgaattttctatccaaggggaagatttacatgattgctcagctgcaaaagtagaattagatctgcttgaaggaactagaggaacctcattagaaactagtgagcctgaacatcccttggaagcatggagcccaccagaagatgaagatgtcattcgtacgcctgtgcatgtgtcacggacatttgaaagttctctgcagaagttctcagtacatgacactcagtcatcagatcttttgcgtaagactgcaaattcaatggaaggatcaaaggctccaaatataacaaacggatcgacacttggttctgatttcaggggcaatctggtgcctactttcagacctgctgagagaaaaaaacttaaaacaacataaaaatcagaaacgacaaccgtcttctccaattgacaatgaacatattttgggagttgaagggacactgaacagcctactggatgtggacggtggtatcagcaagcgaaaggatgctacaaagggatacttgaagctgctcgttgtgactgcagcagaagatggtagtgctgggggcacatccaaaagtctgagggatctttcgttgattcttgaggcacttctaaaaacaaaatcacattcggttctgttggatatcatcaataagaacggactgcaaatgcttcataatatattgaagcagagtagaggcatcttccaccggagacctattatacggaagcttctgaaggtacttgaatttctagctcagaaaggaattttgacatctgaacatataaatggaggtcctcggtttgctggagtcgaaagcttcagagacttgatgctgagtttaacaagacattcagacattcaggttcaacagattgctcggagcttccgtgatagatggatcccccctaataatgcaaggagtgaaccaacagaatatccacatacatcaacatttgtgcatgatatccagggaaccaatacagtctggagttctgctaggaggaaacgcaagagccgctgggactatcaacctgacgagcattataagatgccgggactaaaaatccaaaaagtttgttctggacatggtgaatttgatgttcagtttggctttatgaaaaataagttaaagaggaatcagggcgcaaacaactatcataatgatgttcttggcatggggagttcaacagagggtgaagatgatgaagcccctcctcctgggtttgagtcccagctggaccgtcggcctgcacaactttcaataggcagcgaggttgctccaggactttgcatggagaggtaccaatctagcttgagtatttcatatggggttcctgtaactcttgttcagcactttggaacccctgaatctgaaggaggccaatgccataaaaaatggaaagttgcacctggcgtgccttttagtccttttccaccattgcctccctatccgcgagggaatccttgcccctccacttcgtcttcccagatgtttcagcatgatggaacaccccaagttaaacataacaattctggacaacggggaaggatcatgggccgagatgggagagtgcataggtcatggagaaatgagtcaagaacaaaatggcaataccatcatcaaggaaggagattttcgagcactcatcatagatttgaaagatccgaacctgcaagacctcaatagtgattaagggttcagggcagtgattggtaccaaccttgcagtttttgaacctcaagtagtggtggtatacatggtaattcctgcttgtcagaagtgtaacagaaactgtgtcaggctttaacgatgtttaaagagtgtaaatttcagttcattgggggtagagcgtatgctgcacataggccattttccagtgcagtgttactaattaatttggtcattgtttttctctctcccaatgagtatttttcataggaacattttttatttgatttaatcctttttacaggtgataaggataaccaagtttagcgacaatcctctgtagtctcgtttggttctttgccttttttccccttttgctttctcagtaaagcttcaaaaaaaaaaaaataaaaaaaaatccatctgcaatggtgaagtgttgttactgttgtctactattactatccatgagatctgtttggaatatgcatcggacttgtggtgaacatgaatgactttggtcattctgagataatattagctacttacaca

SEQ ID NO: 3574 - DNA, 446 bp, Zea mays
  Clone ID: TF_LIB3075-013-Q1-K1-F1
tgctgttctggttgttttggggattgtttagcggagccacttccttgcgcttgtgcgagagaaactggcggagactttgcttatacgagagatggcctgcttaaagaaggatttctagatgcgtgtgtctcaatgctccgggaaccacttaaacaaccgcacttctactgtaagggtgtctgtcctattgagcaaataatgaagggagtcagctcagcgaaacctgatgcttgtaaagggcaccttattaagaagtttatcaaggaatgctggataaaatgcggctgcaccagaaattgtggaaaccgtgtggttcagcgaggcattactcgcaaactgcaagtgtttttagcttctcggaaaaagggatggggcttgcgttctgctgaaaatcttcctcgtggtgcttttgtatgcgagtatgttggtgaaatattaacaaacac

SEQ ID NO: 3575 - DNA, 2688 bp, Zea mays
  unsure (1)..(2688): unsure at all n locations
  Clone ID: TF_ZmC3752_1
ctggccgggattcccttcctgcttcgacgattctatgtttatcacgcccaacaaagtagtgtagtttttcgacgccggcggatccctcgagccctagctaggaaagtagggttttcgatggattctctgagccggagggagcgggcacaccgcgccgtcgacgccatgaagcctctgggcttctcgaagaaggaggtcttcgccgtcctcaagaacctcctccagctgttcgataactcctgggagcccattgaggacgagtgctaccgcgccctcgccgatgctatcctcgaagcccgcgaccggccccagatgcattgcagcaacagtacaagaggggttcggcttccgccggagggggagggctgccggccccggccttctacttcccgtgacatccacgacggtctggatggtgggaccgaggcccttcgcatcaagaggacgaggatcagcgctagttgctctatcgatccccagtctcccgtctccgctgcggaagcccttgatgaacctataggcgtttcgtctgagctaagccatccacaaatggggacctcaacccaatgtcagcggcccactgcatatggtggcgtgccttcacatgggaatactgcacacaagaagagggcaatacaaatgatggatgaagatttccaacataccgtcttcttgagggagcctaaacctgaacctgatactgatgatctacaatgcagtgcccctgcatccagctgtcagaatgcccaacttggccgcattgcttcccacccgctcaatgccagcaccttagatgctctacctgttcaggctccgttaaagatttcaggagctaatggcaggacagtccagcattatagaagtacagcgccttcttcctttgttgaacctataaatagcaagacgaagcaacctcaaagtctggaaaatgggttggaccatgcaactatgatgcacaatgctgggacaggatctgcagctggaaaaacacaggaagcaccttgtttacacactcttgtagcttcatccactatgggtgaggtcgagatgtcgatcaaatgctgcatagacccatcaaaattccacatgcctgatnttagaagctgttttcaagatggttgaggaaaaatgccttcgctcacacaagagcctcccacctgatttttccatagccggtctcatcaagcagatatgccagtgtgtcgcacgactaggcagtgatcatgctgcagaacataataaacaatcagatgcttttggcaagatcagaagctcacaggataagccaacaacgagtagtgctccatccttggaaccaattgattgcatgaacagcagaagcgnggaatataaagctgtagaagaatcattgattgtggaagcttcatgagaatggcccaccaaattcaactacccatcagcaggcccatctggtacttcctcccaatgggtgtacccatgatttatctgacatatcaaagggaaaatgaaaggttaagtatatcagcagttaacgaatttggtagcgagaattgtttaccttccttttattatataccaagaaatcttgtttcccaggactcctatgttaactctgttgaaacaattggcgacaaggactgttgttctgattgctctggcaactgcttgtatgcctctgaaccatgtgcctgtgcaagaaaaactggtggtgaatttgcctatacacgagacggattggttaggacaaagttccttgatgagtgcatctctatgaccccgcgtccggaaaaacataatatgttcttctgtaaatcttgcccacttgagagtatcaggaacgagccttcaccagagctttgcaggggccatattattaggaattttatcaaggaatgcgggagtaaatgtggctgtaacgcgcaatgtggtaaccgtgtagttcaacgtggtataacttgcaatctgcaggtgttttcgacacgggaagggaaggggtgggggctacgcacacttgatgaacttccaaaaggagcttttgtctgtgaatatgttggagagttgctaacaaatacgaagctacatgaaatgactactcaaaacatgcacaatgctaggtactcagtgctcttagatgctggttggggtcctgatggggtgctgaaggatgaagaagctttattcctggatgcgacattttgtgggaatgttgggagattcatcaaccacagatgctatgatgcaaatttagttgagatccccgttgaaaaggagacgccagatcatcactattatcattttgcatttttcacaaccaagaaggtggaagcatttgaggagctcacatgggattatggtattgattttgatggtgataagcatcctgtcaaatcatttgaatgcctgtgcggaagcagatactgccgtggtagaaagcattcgaggacgcgaggcaaagctgcttcgaagtgaagtgttgactgaaagcagcggtgcatggttggtttgggaaagcgaacggactaatcagttttagaatgctttgttaacctaggtagctatgcattcataaagtgcccgctgtgcttgactgcagaacgtgaaattcaattagacagactgaaatgcaatgtacgtacgctactcctaaaccctaagccatctggccatgatctactgatgatgaggtgaatttgattaaactaaaat

SEQ ID NO: 3576 - DNA, 2093 bp, Zea mays
  Clone ID: TF_ZmC7397_1
ccggccgggagaccgctctctccgcggacgcaccaggcatctcgtgtatcgtcctcggatccccgcggtcatccccatctcagccgccgttgtccgccttcccctcgacaacaagcctgccgccccgagctgcctccctccgtccgttcggtatcctttagccagttagcctcttccttccgtctgccaccggcacgttctctgccctcgggtacctcgtctgttcagtcttcagagctgggttcggtctattcctcatcctctcttgttgatccggagtgccttaagttttggccgtcttgttactgtctgctgttccacagtcgacgaatcacgaatgctaatggaggaagaatgcgtagaggcaccgtcgtacatccacattgacagcaacgctttctcctacagaaagcataagagtcagacagaggaggacatagctgtgtgtgagtgccagtatgatatcttggatccagagagtccatgtggagaccggtgtttaaatttattgactaacacagaatgcacgcctggctattgccgttgtggtgtgtactgcaagaatcagcggttccaaaaatgtcaatatgccaggacaagacttgtaagaactggagggcgtggatggggccttgtggctgatgagaatattatggctggtcaatttgttatcgaatattgtggagaagtaatatcatggaaggaagccaaacggagagctcaagcttatgaaacccagtgtttaaaggatgcctatatcatttacctcaatgctgatgagtcaattgatgcaacaagaaaagggaaccttgcgagattcatcaaccattcatgccaaccgaattgtgagacaaggaaatggaatgtccttggggaagtaagagttggaatttttgctaagcaaaacattccttttggcacggaattatcctatgactacaattttgagtggtatggtggtgtgatggtgcggtgcctctgtggagccgccagctgttctgggtttcttggggctaaatcacgtggtttccaggaggccacgtacctgtgggaagatgatgatgacaggttttctgttgagaatatccctctttacgattctgctgatgacgaacctacaagcattaacaaggaaatcctcgtatcaagtgatggcatggttacccaatacagcaacatcagcagagtacagagtaccgaaaatcctggaaacactggaacaaatgaatttgcgccaattatcgtcgacgaactgacaagctcaaatggattagcaccaatgaacgttgaaccattgactgtaagctcaaatgagttcacgccatcgaacgccatgccaatggtagctcgtctagtcgagaatgggtcaactggatacagcgcacaggacactcacgacgcttctcagaattcagcgcccaaagctgcaaatcacgcgaaccaaactggacctcagaacaacagcaaccattcagcgttggtccctgtgaagcccgcgccgaaacgccgtggcaggaaaccgaaacgcgttgtgcacaagcagctggacatcccagatatctgcgaccggcttacatcgtctgtggcgtgcgaagaaatactgtactgtgaggaagtgaagaaccatgccgtttctgaaatcgatgccctgtacgacgagataaggcctgcggttgaagagcacgagagggacagccaagatagcgtctccacaagcctcgcggagaagtggatcgaggctagctgccgcaagtacaaggccgaattcgacctgtatgctgcagtactcaagaacgttgcctccactccactacggtcgaaagatgatgtgggcccaagagagcagaacgggttgaagtacctggagaacggctcatgattttttttagctagaagcgtggaatattacgtacgccttcaatttgtagtatagggattgcatttttttttaactgtggttggtcttgtatttaggtagaggcattgtaaggttacatgattttaaatagcgtggaatcatgtcaaacgcacatttaaaaaaaaaaaaaaaaaaaaaaaaaacttggaaccatgcatgaatggttgataaatat

SEQ ID NO: 3577 - DNA, 755 bp, Zea mays
  Clone ID: TF_ZmC113_2
tggttattgagtatcgtggtgaacaagttagacaacgtgttgctgatttgagggaagcacggtaccatagagaaaaaaaggattgctatttgttcaagataagtgaagatgttgtcatcgatgctactggcaaaggaaacatagcgcgcctgattaatcactcgtgtatgccaagctgctatgctaggatcgtgaccgtcagtggtgacaggagccagatcattcttattgcgaagagagacgtctctgccggagaagagctgacgtataactacctgtttgaccctgacgagtccgaagactgcaaggttccatgcctgtgcaaagctcctaactgtcgtggatacatgaactagggtgctgctagaagagtaaaaaccaatctaacaaacaaggactgaggctaactccttacagaagccaaaagccggccattttttttttcctggaattctttcggtagtttctcgttttcttatattactcaccagaagcttacaattcgtgggctgcacaaggtttggaccattttgttcagaaattgcgatttagggcagccgtaggcagtcatccatttgtatattcttccattgctgtgataagatggtaagaatgctcaaaatttttttttggttaaatgaaaataagaaaaactcagtttgattcaaaaaaaaaaaaaaaaaaaaaaaaaaaaaaaaaattaaaaaaaaaaaaaaaaataaaaagagaaaatggtaaaaaaaatataagagaaa

SEQ ID NO: 3578 - DNA, 1447 bp, Zea mays
  unsure (1)..(1447): unsure at all n locations
  Clone ID: TF_ZmC2742_1
acccacgcgnncgaagacgaggatccttgtattcgtttactctcgtactgcaaaaagcatagacagccttctgctgctgaacgtccatctttagaaagtgatcctcctgaacccattcaggtagttcagacagatatggcttcatcatctggttgtgcaaggaccgaaccctataatttacacaggagaaggggccaaaagcagccacaagttgtcgctactgcttctctgaaacgtttatatgtggagaatagacctcatattgtcagtggctactgccaaaacagagtaggcaatacatgcggagaatcaattcaaccgtttggtttgtcagatgctgtgcagcaagaagctattggcaatgtgtcttctatggttgaaaaatatacaatcgtgaaggctacatttaggaagagactaacttttggaaaatcaaaaattcatggatatggtgtctttgccaaggttgcacacaaggccggagatatgatggttgaatacataggggagattgttagaccaccgatatcagacactagagagcggcgaatttacaactcactagtgggtgctgggacatatatgttcaggatagatgatgaacgtgttatagatgccactcgggttggaagtatagcccgtctgatcaatcactcatgcgagcctaattgctattcacgtgccataactattcttggagatgaacacatcatcatttttgcgaaacgggacatagatccatgggaagagctgacatatgattataggtcagaaggttaagattttgctttttgaccttttgaacatcatagttttgtacaaaatgttgtccatgctttcttcaggtttttttcaagtgatcaacgacttccatgtttttgtggattccccaaatgccgtggagtagttaatgatgttgaggcagaggaacagtcggctaaaatcagagttaagagaagtgaattatttgaaaaaagtgaaaagtaaaggtacatcatattggttgggatatgacatgcttgtgtgatatgcttgccagtgcctaaaggcaaattctaaaaaatggttgagtttcattcttgaatcctgataattcttctcattatttgagtggaagacgaatctaattgtataggtacccaatataggatcggcaatccaatttggggacataagttgaatcaattgtcgtgtaccattgaaatgttagttgttacacatatttcggccatttatcttgttgaacctaccctattttcaaccgttggagctgggaatcggaggggtggtttggttaaatgatttgagatggcctgccatgtgtaatgtaatcgaagtacatggttgcacttttcggtgttgcccatatattatccataacaatatgtagtttcagctgttctgcatttacgaaaatgcattggaagagaaacgtccacttcaactg

SEQ ID NO: 3579 - DNA, 3042 bp, Zea mays
  Clone ID: TF_ZmC12356_1
gccggccgggccgggagacaagtcccttccgtccctccccacgccgccgagggccgccgaccaggaggagatcacgcgctcatctctcatggagtccgtctagcttccgctcgtctgcgcccactccaagcagccgcagcggaactcaactactgcaggttgagatgaacggtccatcgaatttcatgcctactcctgaacaggatgttctggacgtcaagcccttgaggacattggctccaatgttccctgcttctctgggtgtcaatacatttaaccactcaaccacgccaccattgatatttgtcactccttctggacaatttcaagggggttttggtgattggaataattctgctgccaaatcatttttcgctttcagcagcaaggatgctcgtggaggcaaggctgatacatttagtgatcagaatactggtactggcaaggctgccacttttggtgatcaggatgcttttggcagccagaatgtttttgctagtgatcacagtactggtactggcaaggctgccacttttggtgatcaggatgcttttggcagccagaatgtcgccactggtgtgcaggatgctgcgaaaggccagactgcaacagattggacagatgtgagtgccaatgccaatcctaatggcccaattgatgccattgccatttcagcttacaggtcaacacagcctaatgttatatcactggatgatgatgacgacgacgatgatgagccttatgctgctaacaagacatcagcatctggacgcaagatcaagaggccatcccacctcagcggatacaatgtgagtgatgctttggtaagtgacagctccaacagcatgaaggttaagcgccccaaatcctctcacgggaaagctgctgctgacaacgagcatgccttgcttcctccttctgaggatcccagggaaattgtggaggcagttctcatgacctttgaggcgttgcggcgtaggcatctccaattggatgaggcacaagagactaacaaacgtgcagatctgaaggctagtgctatcttgatgtccagtaatatcagggctaaccctgggaagaggataggggttgttcctggagttgaaataggagacattttctacttcaggatggagctatgtattattgggctgcatgctcctagcatggccggaattgactatatgactgccaagtttggtgacgaggatgattctgttgcaatatgtattgttgctgcaggtggttatgacaataatgatgatgatacagatgtactggtttacagtggttcaggaggtaatagcaagaacagtgaggagaagcatgaccagaagcttgagaggggcaacctggctcttgagaggagcttgtccagaaaaaatgtaatccgtgtggttcggggctataaggatccaggttgcttgactgggaaggtttatatttatgatggcctctataggattcacgagtcatggaaggagaaaacgaagagtggaatattttgttttaagtacaagctgctgcgagagccaggacaacctgatggggttgcaatctggaagatgtcccagaaatgggtacaaaatccactgactagaggcagtgttttaaatcctgatctatcatctggtgcagaaaatcttccagtgtgtcttgttaatgacattgacagtgatgaagtgccacaccatttcacatataccactcaggtcgaacacttgaaaccactcagttctgtgaagcctttacagggttgcagatgccttagtgtttgtctgcctggtgatgccaactgctgctgtgcacagcgtaatggaggcagcttaccttacagctcatcaggactgcttgtatgccgcaagactatggtttatgaatgtggtgaatcctgtcggtgttctttcaattgtcgtaacagagtgacccagaaaggagttaggatccactttgaggtctttaagacgggaaatcgaggctggggtcttcgttcgtgggacgctatacgggctggttcatttatatgcgagtatgttggtgaggttattgatgatgctaacattaatctgaatgatattgaagatgattatatatttcagatgtcgtgtcctggtgagaggacattaaaatggaattttggacctgaattgataggggagcaaagcacaaatgtttctgctgatagctttgagactctacccattaagataagtgctaaaagaataggaaacatatcacgtttcatgaaccatagttgtgctcctaacgtattttggcagccagttcagtttgaccatgaagatgatcatcgcccacatatcatgttctttgctttgaagcatattcctcccatgacagagttgacttatgactatggtgacgttggagctgatcctagtggtgtacggtctcctagagcaaagaactgcctttgtgaatcctcaaattgtcggggattctttatctgaccgtggaaaatgcatattctatgattctatctatcaacattcaaccctaccagctagatcctttttggtggcacctgaaggaaaagtaggactgttcgaacagcttgcatcactctgtcgtggacattttacgcagatcttttagatgaccattcagcaattaatgcacaaacgttttttttgtgggggaagaatgttggtcttggaagatcaattttgtgtagtttgtagacttgtagagcatttagtgctgctaaacttgtgcaccttaagtcttttggctgtaaaagagcctccaggctccagctgaattggttagtcagtctaagtagcatttctttgatcctgaatttgactccacgtggagtcaatttcaagctggagttaaaaaaacattcttatgttctatactaaagtacagttctaaggctcaaccatgatcatagtcgttctcacaaaaaaaaaaaaaaaaaaaaaaaaaaaaaaaaaaaaaaaaaaaaaaaaaaaaaaaaaaaaaaaggaaaaaaaaaaaaaaaaaaaaaaaaaaaaggtcctctgcgttgttaccactgtt

SEQ ID NO: 3580 - DNA, 764 bp, Zea mays
  Clone ID: TF_ZmC2742_3
ctaacttttggaaaatcaaaaattcatggatatggtgtctttgccaaggttgcacacaaggccggagatatgatggttgaatacataggggagattgttagaccaccgatatcagacactagagagcggcgaatttacaactcactagtgggtgctgggacatatatgttcaggatagatgatgaacgtgttatagatgccactcgggttggaagtatagcccgtctgatcaatcactcatgcgagcctaattgctattcacgtgccataactattcttggagatgaacacatcatcatttttgcgaaacgggacatagatccatgggaagagctgacatatgattataggtttttttcaagtgatcaacgacttccatgtttttgtggattccccaaatgccgtggagtagttaatgatgttgaggcagaggaacagtcggctaaaatcagagttaagagaagtgaattatttgaaaaaagtgaaaagtaaaggtacatcatattggttgggatatgacatgcttgtgtgatatgcttgccagtgcctaaaggcaaattctaaaaaatggttgagtttcattcttgaatcctgataattcttctcattatttgagtggaagacgaatctaattgtataggtacccaatataggatcggcaatccaatttggggacataagttgaatcaattgtcgtgtaccattgaaatgttagttgttacacatatttcggccatttatcttgttgaacctaccctattttc

SEQ ID NO: 3581 - DNA, 2577 bp, Zea mays
  Clone ID: TF_ZmC3477_1
ctctgtagtgacgacgactgggcggcggccgctgccgccgacctacgtgcgcaggtctccatcttccggaccttcgctggagaggaacatcctcctgctaccagaggcagggttctactagctgatctgtcatctaaggctgaaactattccagtttctcttgtcaatgaggttgaccatgagaaaggacctgcacatttcacctatactaaccaggtcaaatacgtgaggcctctcagttctatgaaataggttcagggctgtcggttccagagttttcgccttcggggtgatgcaagtagcgctcctgcactacgttagggaggtaatttccccgccagttcaaacggagtattgtattccggcaaacgtattattggtgaatgtgatgccactcgtatctctgcatacaagacaaggtcaagcatatcacttaaagatggtgatgatgatccttactcgggtaaccaaagtttggcatctgaacggaagcctaggagaggccgtcctcccggttctggtcgtgatggctcaaatggtaagttaaagcgccctaagcccacttacaagaattttgttgctggcaaagagcttgtctttctgtcatctacatccgatcccagggatattgtggaatcagttcacatgacttttgaggccctcaggcgaagacatctgcagatggatgaaacacaggatgctagcagacgtgcagacctgaaggctggtgccatcatgatggccagtaacatcagggcgaattcaggcaagagggtaggaactgtacctggagttgaaataggagatattttctattttaggatggagctgtgtgtcattgggttgcatgcacctagtatgggaggcattgattacatgactactaaatttggaaaagatgaggattctgtagccatatgtattgtctctgcaggaggttatgagaatgaggatgatgacacagatgtgctcgtgtacagtggtcaaggtggaaataataggaatactgaggagaggcatgaccagaagcttgagaggggtaacctagctcttgagaggagtttgcataggaagaatgagataagggttgtacgtggcttcaaggatccattttgcctaactgggaaaatttacatatatgatggtctcaagattcatgagtcctggaaggagagaacaaagtacggtgtcaatgtcttgcttcaagtgctgctgcgggaacctggacagcgtgatggagctgcattatggaagatggttactcggcgatgggataatcctgctaccagaggcagggtcctactagctgatctgtcatctaaggctgaaattttgcctgtttgtctcgtcaatgaggtagaccatgagaaaggacctgtacatttcacttatactaatcaggtcaaatacttgaggcctctcagttctatgaaaaagttgcagggctgtggatgccagagcgtttgcttgcctggcgacgccagttgtgcttgtggacaacataatggaggcgatttacccttcagttcatcaggattgttgtcatgccgcaaaccaatagtctacgaatgtggtgaatcttgcaactgttctacaaattgcaggaacagagtgacccaaaaagggtccaggctacatttcgaggtcttcaggaccacaaatcgaggctggggtcttcgctgctgggaacctattcgtgctggttcatttatatgtgagtatgctggtgaggtcattgatgagctcaaatttaatttgaatgatagtgaagatgattacatttttcaaactgtatgccctggcgagaagactttaaaatggaattatggacctgaactgataggtgaagtaagcacatatgtatcgcctgatgaatttgaaccactgcctgtcaagataagtgcaaaaaacatgggaaatgtctcccgtttcatgaaccacagttgctcacccaatgtcttttggcaaccagttcaatatgatcatggagatgatggacacccgcatataatgttctttgcactgaagcatattccacccatgacagaactgacttatgactatggtgttgctggagctgaatctagtggttcaggttctcgtagaacgaagaactgcgtgtgtggatcacaaaactgcaggggattattttgatgggttgagagacgtgctctttgtggttaatcatgcaaaccactttctgctagatcctttctatgaaaccaaatttagtctccggataatatgacagatgatgtcatttgccatgtgtactgtgaagacagtaagttgtcgagcgagctgtagaatttctgttgctctgaactgcatggtggtcgctttcccaccatttcctcggatgtttatgtgggcgtggattgctgcattgcttccgctaaacttgtccaccaattgcaccggcttttgtagacttgttatcagccccgcttgcgttggacgcctggttgttaggatatggtcttgtaaattatcctggttaaggatcatgttgctttcgactcgaattttcgtcctcccttgcccttatgttcagcaatgttcaggtgttgagagctc

SEQ ID NO: 3582 - DNA, 1295 bp, Zea mays
  unsure (1)..(1295): unsure at all n locations
  Clone ID: TF_ZmC12905_1
attcanggttcaaaggccaaaatagaagtgaaatggtcattctaaaggcaagcaaacttcaatatttatatatgatggattgtacgaagtgttggaatgttggcaagaaggcccaaaaggcgagagggtcttcaagtacaagttacagaggatcgcagggcaacctgaattagccctacatgcagttaaggcaacgaggaagtccaaagttcgtgaaggtctttgtttgcctgatatatctcaaggaagggagcggatacccatatgtgtcatcaacacaattgatgacatgaagccagcaccatttaaatacattaccgaagtcatatatccagattggtatgaaaaagaaccaccaaaaggttgcaactgtacaaacggctgctcggactctattacatgtgcttgtgcagtgaaaaatggaggggaaatcatgttcaatttcaacggtgcgatcgtcgaggccaggcctctcatatatgagtgtggtccatcatgcaggtgcccgccaacatgccacaacagggtgagtcagcatggtgtcaaaattccactagaaatattcaagacaggcaagacaggttggggtgtaagatccctcagttctatatcatcaggcagtttcatatgtgagtataccggtgagctattggaagatgaagaagctgaaaagagagagaatgatgagtatctatttgatattggtcataactaccatgataaagaactttgggaggggctgaagtcagtggttggcctaggatctgctacttcgtcttctgagaccatggaaggcttcacaatagatgcatctgagtgtggcaatgtgggaagatttatcaaccatagttgttcaccaaacctctatgcccaaaatgttctctgggaccatgatgatatgaggatgccacatgttatgttttttgctgttgagaatatcccgccactacaggagctgacctaccactataactataagataggggaggtctacataaatggcgaggagaaggttaaacattgctactgtggcgcctcggattgctgtggaaggctctactgaagcattattgactgctgttagctctatgttttgaacacctctgtcctgtctctgcggtacccttcttttctcagttcgccttgtcttgtcggcgttctgatgtttacagcaagctgcatttgatcttgctgttttcatttagaaaaaaaaaaacattctgcttcgctctactgtgttttgaattgtgaatgaattttgaatggaaccccgttgtaccatgtgttcatgtggc

SEQ ID NO: 3583 - DNA, 462 bp, Zea mays
  Clone ID: TF_uC-zmromo17102d10a1
tttttgatacagaagtatattaaagaatatggacatgtcaatgcctgctaacgtgcatgatcaagctaaacatggtacaaaaaaatttatttaaagaatgaactggccgtagtgaatacaactgtggtattaacaggaatggaagctcgacttttgagctctaactaaacttattctaaaatgaatgtaaacaaaaaatagggaaggatcaatatataccaaaaacgggggtaaataagaaagaaagactgtcagtgatcctctaacatctaagtaaactaattcatgaatttccggcagttagcagtctggcaaaggcatggcacttcgcgttcatcaccctcatctggatcaaacaggtagtcatacgttagctcatcaccagcacaaacatttttcttggctattagaacaatacgactttcatcatgttcaacactcataatcctcggatagcagttt

SEQ ID NO: 3584 - DNA, 2149 bp, Zea mays
  unsure (1)..(2149): unsure at all n locations
  Clone ID: TF_ZmC3531_1
ccccgcgtccggtcaagaaaaaaaagggcaggaacatttccagtgagaccagtcagaaggtaaaaccggtgatctcatgcccagaatcagatggttgtgctagagcttccattaatggatgggagtggcgcaattgggcacggaatgctactccgtcggaaagggctcgtgtgagagggtaccatgttcggactattctttctgcctcaaatgataatgtgtggaaaaattctcaagcaaaggtttcatctgcaagaacaaatcgggttaaactgcgaaatctgttagcagccgctgaaggttctgaactgctgaaaattacccaaatgaaggcaaggaaaaagcgtttgcgttttcaaaggagcaagatccatgattggggtctggtcgcacttgagtcgatcgaagcagaagactttgtaatagaatatgttggtcaactgattcaccggcgggtctctgacatacgtgagtctcaatatgagaagagtgggattggaagcagttacctctttcgcttggatgatgattttgtggtcgatgccactaagcgtggtgggttagcaaggttcataaatcattcttgtgagccaaattgctacacaaaggtgatcactgttgatggacagaagaagattttcatttatgcaaagaggcgtatatatgccggtgaggaaatcacatataattacaaatttccattggaggaaaaaaagataccgtgccattgtggttctcggaggtgtcgtggatcaatgaactaagaaggccatcttttgaggttgctgcaacacttaagattcttggctgtgtgcaactcatcaatcaggatttacatcaatatcaaaatatggagtgcacgaacatgctggacagcaagaacaaactgccgcattatacttatttaagctatattggtcagactaattccacggtatcccaaggatggtgcaagaggaagcccatactgcgctgccctgtggaggtcgcgagcatgggaaatcagttgaggatgggctgagctagtaaagggttgttttctgacaaggccagtactattgtttttttttgacatacctgggtggagttgcaaactcttgtacaggcgcaggctttacttattacattgtttggattggggatatagttcacatggtgcatacgaaacggttagattggtttaaattctctacctcgtccttaaatcatttatcatactaattagttattgaaagatgaaacacccgaaccactagttcttgtaatacttccactgcttttgtgaaggatgttatgagcatcaaaccgaactgaatggatgccctgctcctgttgatcaacttgacttgaatggacggtccggtccctatttgatgtggatgcatggatggcagtatgaaactagccactggatgaccattttctgctttagtgcatcctggaaataataaagcatctattttccaccagggtgtacacgttttgcagcaataatctatactaccttttggttttagctatctcgtccattccgaatggcgtggaaaggatctacttactgtacccttggtgtcactttgtgcacatcctattctatagtagtgcactggggtacaagttgtctcttttgtaaaagcggtgcaagtgttttattcatggacctactgttcttgcatgcaggtaccaaatctgctagggcttgcttgtcgtcggttcatccatgaggtatacgcgtgtaggcgtccacgaatttttcaaatgagtggtatgtgttccatctcttgattggctgtctatattcgtgcatttttttattatcaaacaatagaaccgctaactcacaaatactcatgttttggacaagatacagccagagttttgagaccctgactaccaataaccctttcaaagatttagtttatttagaggcaaacatgcttcacaagtcacaacctcataaaatctacgagcttttatttacaaatacgtctcgataatgaagtttggagacaacaagtatcacatgtactgaaaagacacttctgtgacctcatcgtgccatcggagggattgtgtaacatgttacaacagaaatacaaaatagtggccacagtatggccaatgattaacctcctcctncccacccccc

SEQ ID NO: 3585 - DNA, 2667 bp, Zea mays
  Clone ID: TF_ZmC204_1
ttgaacctggggaatctgtgaccgatgatcgtatattgggtgcccgcatgacaaaggccagctgtgtctcttccgttcctaggaagtatgaagttgtcgaggaggagcttagtgtataagatttgggggaattacagcgacaactgatagttgctttacctgaagtctattctgagaagttcgtgtcaaagaagaatggcaccgaaaacttggaacttccagaggttaaggattatcaaccccgaaaagtagcaggagatgaaattcttgagcaagaagtatatggcatagatccatacacacacaatctactgagtgacattatgcctgctgatcttgagttgtcacctaccgacaagcatatctttattgaggagttgcttctgaatacattgaataagcaagttaggcatttcactggttcgggaaatacccctatgacttacaaccttaggcctgtcattgaagagatccaaaggtctgcagaggataatggtgatagacgaacttcaaagatgtgcttggggatgctaaagaccatgagaaatcgctctgaacagaacttcgttgcttatagaaagggtctcggtgttgtttgcaacaaaaaaggtggatttggtgtcgatgactttgttgtagagttctttggggaggtttacccttcttggagatggtatgaaaagcaagatggtattaaacatatacaaaacaacagtgaagatcaagctcctgagttttacaacattatgttagaaaggccaaagggagacggagatggatatgacttggtttttgttgatgcgatgcacaaggccaactacgctagtagaatctgccactcctgcaacccaaactgcgaagcaaaagtgacagcagtgaatggtaaataccagattggagtttacacacttcgaccaattgcagaaggcgaggaaatcacttttgattacaattctgtaactgagagcaaagaagagcatgaagcatcagtctgcctctgtggaagtcaagtatgccgtggcagctatttgaatttttctggtgaaggagcctttgagaaggtattaatggaattccatggtgtgctcgataggcatagcctgctgctacaggcttgtgaaacagactctgtctctcaacaagacttaattgacttgggtagagctggtcttggtacctgtttgcttgctggtttgcctggatggcttgttgcttacacagctcacctggtgcggtttatataccttgagagacagaaactccctgatgagatcttaaggcacaatgtggatgagaagcgccagttccttatagaaataaacatggattctgagaagaatgatgctgaggttcaggcagagggagtattaaattcaagattacagcaaatagtgcatacacttgacaaggtgagatatgttatgagatgcatatttggagacccaaagaatgctcctcctcctcttgtaaggttgtctgggaaaagtctggtatctgccatctggaaaggggacagttcaatagttgctgaactcattcagtcgatggaacctcatgttgaagaagaggtacttagtgatctgaaggccaaaatccgtgctcatgatccgtcagagtctgaagatattgagggaggcatccggaattctctcttgtggctgcgtgatgaattgcgaactctttcatgcacttacaagtgccgtcatgatgctgctgcagatttgattcatttgtatgcttatacaaagtgcttcttccgagtccgggattataagacagtaaaatctccaccagttcatatcagtccgcttgacttaggccccaaatatgctgataaactgggaccaggctttcaggagtactgcaagacatacccagaaaattattgcttagcccagcttatctattggtatagccagaattcagaacctgaatctagattaacaagagctagaaaaggttgcatgtcgttgccagatgtctcatccttctatgtgaagtctgcaaagccatcacaagagcgagcttatggaaacagaactgtgagattcatgttatcgcgcatggaaaaacaggcacaaagaccatggccaaaggataggatatgggtgttcaagagtgatccgagattctttggtagtccaatgatggacaccgtgttgaataattccccgcttgacaaggagatggtgcactggctcaagactagaccaaatgttttcctaggctagtaaaaaaggtttgtaggcagataaggtggtatttggttctttctcctttttggagattttagtctacatgattctttttccgactcacaccttggctacctgatcatggggagtttagcttttagatagcagggtagtctcaccacccccatctgtacattcctctctccctactttccttgtagagatgtatctggttaataactgatagattcgtcattgatttgatgtagtgaattttccccataggaatgctccctcttttgtttcatgtaaatgcagaacaatttcaatcttgaattcagtaatgtgttacaggcattttgcatttctatggttcagttgggttgtttcagtcaataaaatggttttaagggctcaaaaatttaattcataggaaaaaatctgtgcatgagttttgatgattgaacctgtg

SEQ ID NO: 3586 - DNA, 2455 bp, Zea mays
  Clone ID: TF_ZmC1758_2
tccgtcgtgaaaaagcgccggccgcggtcatcggagctcgtgcgggtctcctcgctcggtgtgcaggatcagatctacttccgcgacctcgtgcgccgggcgcgcatcactttcgagtgcccccgcgggctgctactcagggacgacgagcgtgctgagtccctcggcctcgcgggtgccgccgggttcggcgttgccagggaccggcgccgcgcccgcgcagacatgcgtgccgcagcgctcatggcagaccacgacctctggctcaatcgcgaccgccgcatcgtggggccgatgcctgggatctcggttggtgacgctttcttcttccgcatggagctctgcgtgcttggcctccatggccaggtacaggcaggaattgattatgtcagtgcagggaggtcggcctctggggagcctatagccacatctataattgtatctggtgggtatgaggatgatgacgatcatggcgacgtacattcggctcgagggcatggcggccgtgatcccaacctccacaagcattgcgtcgatcagaagctggagggcggcaatcttgccctcgagcgcagcatggcttatggtattgagattcgtgtaatccgtgctgtcaagtcaagacgaagccctgttggtaaggtttacttctacgatggcctctacaaggttgttgactactggctcgaccgtgggaaatctgggtttggtgtttataagtatagactgctgcggattgagggccaagaacccatgggtagtgtgaattatcgagtagctgaacagcttaaggtggatgtgtttgctataaggccaacagggtatttgagctttgatatctccatgggccgtgataccttgccagttgcactctataatgatgttgatgatgatcaggacccactcttatttgagtatctaacacggccaatatttcctacctctgctgtccaggggaaatttgctgagggtggtggtggtggtggttgtgattgtgctgagatttgctcaattggatgtaactgtgcaggaaggaatggtggcgagtttgcatataataagactggaaccctgctacgaggcaagccactagtatatgagtgtgggccatattgcaggtgcccacctagttgtcctaacagggttagtcagaaggggcttcaacataggcttgaggtattccggtcaagggagactgggtggggagttcggtctttggatctcattaaggctggcacattcatttgtgagttcagtgggattgtccttactcaccagcagtcagaggtcatggcagcgaatggtgattgcttggtgcgtccaaataggttccctccaaggtggttggattggggtgatatatctgatgtgtaccctgattatgtggcgccagaccatcctgttattcctgagttaaactttgcaattgacgtgtcaagggcaaggaatgtggcatgctatttcagccacagttgcagtccaaacgtgtttatccagtttgtgctgtttgatcattacaatgtgtcttacccccacctaatgatctttgccatggaaaacattccaccattgagggaactaagcatcgactatgggatggttgatgaatggactggacaattaaccatgtagctggagtaacctatttaaaaggcagtgttctctttctttcttttccctttatttttggaattctcataatgcttcccctggggatcatcaagccaactggactaaaattcctcagctgaaacttgcatgaggatgaccaagctacaactcattgtcatctacacttttacagtacatcagccatccattgtatatgttgcctgataacctaggtgcctcggccaattttctagatgaactcgcttttgaggtataacatgcaatgttgctgtaggaagcttgtttgatgtggctggttaattttaaccttcgtgttatgagttgtcactgctggaactcattttgtacatatatctgcagattatctagctggaagcgtgtccacttttgttggaaaatgttgatccatatgttgtaaagttatttgcactccttgtgcaattgaagattcactctctggctgtgggtagaatctagctgtagaaagagtctaagtatcatgtgaattacgtgctgaggaagataaagttcagacggtttaggatttagacagtcatgtatttatactatcgcgatgacttgaccgattctgtgtctatgtttattttggatgatttttactaaagtaattctcatagaaatgggatgagaagttaggcgtttagtagtttgcaccaccttttggtagctagaagatgaaaaaagttaaaacaaacaaaaaaaaaaaaaaaaaaaaaaaaaaaaaaaaaaaaaaaaaaaaaaaaaataaaatacaatattaagggctgtccacgtatatgagtctcgggctcccgagaattaa

SEQ ID NO: 3587 - DNA, 2195 bp, Zea mays
  unsure (1)..(2195): unsure at all n locations
  Clone ID: TF_ZmC487_1
ctcgaggtgggccggtcggggacgtcttcgttaggtttccacggctcccaccagcgtgagtgcgtgaccagccccaatgccctccaaaccctagtccacagctcctgtaccctggcggccatgccggatctgagcaccagctacctccctcccttccctgaactgtccctcgatgcgggggccctcgccgtcgaccacgcggggaatgctgcagccgccgcctcggccgatgcggcgtccgcgtacgcgtcttcgtctgcctctgtgggcagcggcgtagacgacctcgttattccagcggaatgccggtggaagggccatgtccgcaccttcgacatggcgggcgcgggcgctgtcaccacttgccccgccgcgcggcgtggcggcgggaagaagctgtcactgattccgtcactcgagccggcacggacgcaggcttcagcatcggctccgacgctcgaggaacgcgtgagcgagtgggcggctaagaaggcagcggccggcgttccgactcatcactgcgtgctgcctttcctcaccggggcgccaatggcggtcgaatgtcgtttgtgctccaagattatttatgttggagaagaaataaaatgttcagttaaaaagtgtccacaaatgttccatctcaaatgtgttgcggaagatacttcaaactttaccgttgaaagcttcaggtgccctcaacatgggtgtatggtttgtaagcaaaagatgttcttttggcgctgcggacgttgtacagttgcagcacatacgaaatgtgcaccatggccagtggttcacctaaaaaatgatcaaggaagtgcaatttgctggaggcatccttctgactggctgctgcaaaataagaatgctgactttaccaacagtgtagaggaagtattttgccggctacctcttccatatgttaatgaagacttaaatattgattcaatcatcagggattatgctgaggctgtttataagccacccccctatacatctatcaggcgcaatgtatatctgataaaaaagaagcgcactggtgttcgtgtggatattgggtgcacaaactgcagggctgattctacttgcaaagaagactgtgaatgcaggggtctttctatgagttgttccaagaattgtcgctgctcagatctatgtacaaacaggccattccgcaaggataagaaaattaaaattgtgaagacaaagcgatgtggatggggtgctgttgcgttggagccattggagagaggtgattttgtaatcgagtatgttggtgaagtcattgatgatgcgacatgtgaacaaaggctttgggatataagacggcgtggtgacaaaaacttctacatgtgtgaaatcagcaaagattttacaatagatgcgacatttaaaggcaatgtgtcacgttttctaaatcacagttgtgagcccaactgtaaactcgaaaaatggcaggttgatggtgagacaagagttggtgtctttgcctctcgttccatcgaagttggagagcccttaacttatgattacaggtttgtgcattttggagagaaagtgaagtgccattgcgaagcagtgaactgccagggatacctgggcagccaaataaagaacccaattcaaagcattcttgccactgtagcaccgcaagtgcagttgcgagagtattcgcccatgcaccacgaagctccaagattgaagccaataaatcacttgttaccctggaccaactgtatagaggtctcttttaacctgagaagcaaaaggaaaattgaccggctatgctgggcccgcaagaagaagagaacatccctcgtgccatcttcaacaagcatgccagcatcgccgagtgaagttcctgccgcggatttctaactgcccttcgttgaagagcaagcctgccctgtataataatttcatggtacattctttacatgcattggttggaaacgattctttcacattgctcatcaatggtgttgtaacctgcaacattctttatttggtttcatagggcattcagtcagtttacgggtggtagtttgtcggaacatgtacccaatttttctgatgaaacaaatgtttgagcttcaaaaaaaaaaaaaaaaaagcggccaaaaaaattnnnnnnnnnnnnnnnnnnnnnnnnnnnnnnnnnnnnnnnnnnnnnnnnnnnnnnnnnnnnnnnnnnn

SEQ ID NO: 3588 - DNA, 789 bp, Zea mays
  Clone ID: TF_ZmC3614_1
ggggtataatccgctacacggtacctggtttgcctgtatactggcacgcggcagcacctgcagccctgaccggcgacgattgggcggccgtcgctgcctccttactccaggtgtccagctcttcttcgtgccatttgccggccgtgagcaccaccaggggagtttttgacaactgaagaagcgcggagacgacacaaggtgtatgatgaacttgcctctggtggcaagctctgtcccgcgctgattgtcataagagagcacctcccttctggtaaagcatgcttaagagtcaacattgatgcaaccagagtgggaaatgtggctcgctttatcaaccattcatgtgatggaggcaacctgcacccagtgctggtgaggagctctggtttgttgctcccaaggctctgcttctttgctgccagggatatcgtggagggagaagagctcaccttcagttacggtgatgctagggttaggcccaagggtttgccatgcttttgtggaagctcgggttgttctggtgtgcttccttcagaagaaacttaagaactgatgccatcacctgggatgtcttacaaatgagtttgattctatttctgacttcgcaataacattggcttcatgaggaattgcctggcccattcttttagccatactgtaatgtgtgcaacaaacaaaaaaacaagctgtcagtttttggtgaagaactggtcatgtttgtaatgtgatttgttttggctggacatgtgtttcctgcttacagttgattggcagattctttgactgccg

SEQ ID NO: 3589 - DNA, 831 bp, Zea mays
  Clone ID: TF_LIB3245-301-B3_FLI
ggcatcggcctgccgcgccctccgcgcggctgtgactgctgtcaccgcgcgccgcgccggcgacgccgcacgtggcctagagccgctccccatcccgttccgcaactacgtcgattccaagccctatgcctacttcctgtatacccccttctccctcacccggctggctcccggcgcctccgcccccagcgcccagccgtggggtgccgcctggacccggccgccccgccccacctggccccgccccaacctcgacggcttaccatcagccgtgtacgggtgcgcgtgcgcggcggcggaatgcggtggtacccagtgcgcgtgcgccgatgtggaggccgatgcagcgggctcgggcttggaggccgggatggggagcctcacggagtgcggtgatgtctgcgcgtgtgcgccgtcatgtgggaaccggcggactcagcgcggcgttgctgtgcggctgtgcgtcgtgcgccacctgcacaaggggtgggggctgcacgctgcggaggccctcagctgcgggcagtttgtgtgcgagtacgccggggagtttttgacaactgaagaagcgcggagacggcacaaggtgtatgatgaacttgcctctggtggcaagctctgtcccgcgctgattgtcataagagagcacctcccttctggtaaagcatgcttaagagtcaacattgatgcaaccagagtgggaaatgtggctcgctttatcaaccattcatgtgatggaggcaacctgcacccagtgctggtgaggagctctggtttgttgctcccaaggctctgcttctttgctgccagggatatcgtggagggagaaga

SEQ ID NO: 3590 - DNA, 773 bp, Zea mays
  Clone ID: TF_ZmC1285417_1
atttcattcttctattcacagttcacaccttggacacgatctatttcagagttattatagtcataagtcagttcctgtagtggtggaattgtctctgcagcaaagaacataatatgtggcatccttttgtcaccatggtcccagagaatattttgtgcttgaagatttggtgaacagctgtggctgatgaaccttccgatgtttccatacacagatgcatctatagtgaagcgcacatcttccatggcctgggagcaagagctagaagagttcaaacctgaaacatttgatagcaacacactgctaacattctcatcatcatagttaaggcctacatcaaacaagtaattgttgttccttctcttgtcagccgccttttgatgctgcagctcaccgatatactcacatatgaagctgccagcaggaatggaccatagagatcttacgccccaacctgtcttggttgtcctgaatacttccagtggtattttcgtatcatgctgactgaccctgttgcggcacgacggaggacatttacaagatgaaccacactcaaatatcacagacttctcattgagaattgcgccacttaagtcaaatgggatttcccctccattcttcacagcacaggcacagctctcagagtctgagcaaccattggtgcagtcacaaccctgattgtgtttttctgtaagcccaaatggatatctaattctagtggtgtattggaaaggtccaggttgcacatcatcgactgtattaatgacacagat

SEQ ID NO: 3591 - DNA, 2498 bp, Zea mays
  Clone ID: TF_ZmC499_1
cccgcccgtccgctgctgcctctgggccggcctgcgtgctctctgttaccgccacaaatggccttggtggtcttggactcgggctacctggggcccattacctccagtcggcactagtcattcgatgtatgtcatgtaacagcaattttttgaacacagatctgctataccctcacattgtttctgaccattcacaacagttcaggcttcttgatgtccctcagcgaccaagtggtcaatctgctcaacaaacagaagggatgagtggtctgcccctttatgatagccacaacgttgaggatgaaaatggctcacagaagtttgtctgcagattatgtgggctcaaatttgatcttctgccagatcttggccgccaccataaagtcgctcatatggtctcaggtgctgttggccacattccactgggccgtgggaagtaccagcttaaccgcggccgacactactattccgctttcaagaaaagtttgcgaccaacaagtacattaaagaagagcagtagctctggaatcgataaaaatttgaagtttcagatctctggcttaacatctcaaatagttgaatctgaaacatccagccttggtaagttacaggatttccaatgctcagatgttgcacaaactttattttccaagattcaaaagacaagaccccatccaagcaactttgatgttttatcggttgcccgctctgtatgctgtaagacgagtcttcttgctgcgttggaagttaaatacggacctttacctgagaacatatttgtgaaagctgcaaagctttgcagtgacaatggcgtccaaattgattggcatcaagagggattcatatgccctaaagggtgcaagtctagatataattcaaatgctctgcttcctatgcaactcacggcagttgattttcttgaagctcctgttgattcccgtaatgatgatgaaatgtggggaatggaagaataccattatgttcttgattcaaagcacttcggatggaagcctaaaaatgagagtgttgttctctgtgaagacataagctttggcagggagaaagttccaattgtctgtgtcattgatgtggatgcaaaagattctttaggtatgaagcctgaagaacttttgccacatggcagttctttgccttgggaaggatttcactatatcacaaaccgtgtgatggattcatctcttattgattcagagaactctatgcctgggtgtgcatgttctcatcctgaatgttctcctgagaactgtggtcacgtgagtctctttgatggtgtctacaatagcctggtggatatcaatggaacaccaatgcatggcagatttgcatatgatgaagatagtaaaattattttacaggaagggtatccaatatatgagtgcaattcatcatgtatttgtgactcgtcctgccagaataaagtattgcagaaagggctgcttgttaagttggaactctttagaagtgagaataagggttgggctattagggctgctgaacctattctacagggtacctttgtctgcgagtatattggtgaagttgtgaaggctgacaaggctatgaaaaatgcagaaagtgtgtcatcaaagggtgggtgcagttacttgtttagcattgcttcccagattgatagggaaagagttcggactgtaggggctattgaatactttattgatgccacaaggtctggaaatgtttcccgttatattagtcacagttgttccccgaatctcagtacccggttggttttggtagagagcaaagattgccagcttgctcacattggattgtttgctaatcaagatattgccgtaggagaagaactcgcctatgattaccgacaaaagcttgtagcaggcgatggctgcccatgccattgtggaactaccaattgccgaggccgtgtctattgattttgcaggaatacactaactgttcaatgctcggttgcagaactccagagatttcaacagttgtgtaggcttgctgagcgatttagcattgcaattttcctacagcttgagtgcagggctaggatctcattgttaatgctacaaatagtgattgtgatataggactcaggcaagcattaggcaataacatagtgtcgattttagtcatggtaccatcatgtttaactgattatttgttagaagcagcctgaaatgaaactgattcaggctgctctgttcgtaggcgagaattctctctgtaaaattccttcattcatattttatggttcatgagcaccatcattgacgtgaagtaataaactagttatcccagtggcctattgtgcggataatactccctctgttttttttagggagcgacaaattcgagaggtatttttagttgtactaattgcgtgatggatatcagcaatgaaaaaggttttttccaaaaaaaaaaaaaaaaaaaaaaaaaaaaaaaaaaaaaaaaaaaaaaaaaaactcgaggggggggcccgggtaccc

SEQ ID NO: 3592 - DNA, 365 bp, Zea mays
  Clone ID: TF_ZmC181406_1
tgaatttgttatgtttgatcgttccaagctttcaagggttgattggaagtacattataattgatgaggcacagaggatgaaggacagagactccgtcttggcgcgtgatcttgatcgctatcgctgccagcggcgcctccttctcaccggtactcctctacagaatgatctcaaggagctttggtccctcttgaatttgttgcttccagaagtatttgacagtagcaaggcattttcagattggttctctaagccttttcagagggatggtcctacacataatgaagaagaagacgattggcttgagacagagaagaaagtaataataattcacaggctgcatcagattttggaacctttcatgc

SEQ ID NO: 3593 - DNA, 700 bp, Zea mays
  unsure (1)..(700): unsure at all n locations
  Clone ID: TF_LIB4172-030-R1-L1-E12
aattcggcacgaggaacaacttttgaagagagagccgggctgcggttgaccggtatccgtcgaactactggatttcaagttgcttgttcaaattaaagattataataccaaacatcgggctctattaacggggacctcattccacactaatcttaatgagcttctcatgcttatacacttccttgagggagaaagatgtggaagtataactgatctccaagaagaggtcaaggatataaaccaagacaatcaaattgagaagcttcatggaatgctaaatccacatcttcttggaagattcaagaacgatgttatgaaagaacttcctgcaaaaaaggaatggattctacaacgtgaattgacaagataacacaaggagtactataaagcaattctcaccaagaattatgaacagttagcccgtcgcaatggaggacatacatgtctaataaacgttggaatggaggtgcacacactctgttgccatggattcatgattgatgaacctgatcttgaacctgccaatccacaataaggtttaaagacgcttctatattcatcaggtaagatgcagctgctgcacaagatgatggagaaactganagacaaggncatagatctctaatttattcacagttccatcacatgttggacttgctggaggactatttgaattacaggaaatggacttatgaacgca

SEQ ID NO: 3594 - DNA, 3073 bp, Zea mays
  Clone ID: TF_ZmC170_1
tatatatgattggatcaagtctactggtaccattagagttgatcctgaagatgagaagcgccgtgcacaacggaatcccatgtaccaggtcaagacatacaagaatctcaataacaagtgcatggagctgaggaaagtttgtaatcatcctctgctgtcatatccattcttaaatcatgggaaagattttatgatcagatcttgtgggaagttgtggaatcttgatagaattttaattaagcttcacaagtcaggccatcgtgtacttctttttagcaccatgacaaagcttcttgacatcatggaggactatttgcagtggagacgacttgtttataggcgaattgatggaacaacaagcctggaagatcgagagtcagcaattgttgacttcaacaggcctggttctgattgttttatattcttgcttagtattcgtgctgctgggaggggtctgaatcttcagagtgcagacactgtcgtaatatatgaccctgatccaaatccacaaaatgaggagcaagcagttgctagggcccatcgtatagggcagacaagggaggtaaaggttatttacatggaggctgttgttgataacatatcaagttatcagaaagaggatgaattgagaaatggagggagtggagatttggaggatgatcttgctggaaaagatagatacatgggatcaattgaaagtctcatccgcaacaatatccaacaatacaaaattgatatggcagatgaggtcattaatgctggtcgttttgatcaaagaacaacccatgaggaaagacgaatgactctggagacactcctgcatgatgaagagagatatcaagactctgttcatgatgttccttcattgcaggaagtgaaccgtatgattgctaggactgaaagtgaagtcgagctttttgatcagatggatgaagactttgattggacaggtgatatgacgaagcatcatcaggttccaaagtggcttcgtgttaactccaatgaagtagatgctgtggtggctagtctgtccaaaaagccgtcaagaaatatgtcatctgggggcattgctttagacactaacgaaacacttgagaaaagagggggcggccaaggggtacgggcaagtactccatctacagggagatcgatgatgaagatcttgaagaatctgatgaagattctgaggagaggaatactgcatccctacctggggaaggggaagtaggggaattcgaagatgaagaagacaatgatgactcagtacctgataacaaggatgaatcagaggaagaagagcctatgaatgatgatgtatatgaatttactgaaggattaagaggcagaaaagctaataggatggaagaagctggttcaacaggctcttcttctggaagcaggagattaccaccacctgtaccttcctcatcttcaaaaaaaattgcggtctctatctgcattagatgcccgcccaggcactttgtcaaagagaactccggatgacctagaggaaggtgagattgcaatgtctggggactcacatatggacctccagcagtcagggagctggaaccatgaacgtgatgacggtgaggatgaacaagtactacaaccgaaaataaaacgcaaacgaagtattcgtcttcgtccaaaacctaatgcagaaaagcaggaagatagatctggagaaggggccttccctcagcgtgctgccaggcagcaagacgcggttcatcctatagtgaaacagaagcgcaacatgtcatctaggaaggtttcaccggcttctaggtctgggaaattgagtcacttgtctgggtctggtgaggggtctgctgaactctccaaggaaaattggagcagtaaggccattgattccactgcccctgagttcggtggcacaaagatgtctgacagtatgcaaagaaagtgcaaaaatgtgataagcaagctttggaggaggattgacaaagaaggtcatcaaatgatacctaacatatcttcttggtggcggaggaatgagaattcgtcgttcagaggtccggctggtagcacacttgacctacaaaaaatcgagcagcgagtcgatgggttggagtacggcgctgtaaccgagttcatagcggacatgcagcagatgttgaaaagcgtggtccagcacttcagctataggcatgaggtccggatagaggccgagaccctccacaacttgtttttcaacataatgaagatcgccttcccagactcggacttcatggaagctaagaacgccatgtcgttttcgaatcctggaagcggtgccgccgctgccccatcatcgtcaaagcacgccgcaccatcccttaagcgcagcagagccagtgccagtgccagtgccagtgaagcagagcagcagcatggctcgggacacagcagcaggcacaatcagcctagcgaggcggtcccgcccagccggtcccacagctccaggtcagagagagaccccagacatggcggcagcagggatcagcacctccaggacggcgccgctgggttgctgcaccctagcgacatgttcatcgtgaagaagaagaggcaagagcgcgcgaggagcggcatcgggtccccttccagctcgggccgaggcgccggacctctgtcgccggccaaccctgggcgtccgggccctgccccctcgcccagaggtgccaggacgccgttccagagggatccaccgccacacccgtctcagcagtcgatgcattccgctgggtctggatggggcagcggcggtgcgcattcggatcatcaagcgggggcaagctcgtcagcacccggcatcggagacatccagtgggcgaagcctgccaagaggctgaggaccgacagagcaggcagaggcggccgagcctaacggttggttcttctttagcgtcatatggatgtgtaaatgcatccacgtagcggatggaggcgtttgataataatcgtcagtgtatttagttcatcgtcctagcaagtcaaactttgctggcagtttttaaaacagttttttaaggaaaatcaggttatatttcagacctctttaattaac

SEQ ID NO: 3595 - DNA, 924 bp, Zea mays
  Clone ID: TF_ZM4624.C5.o1.fg
atgggtggccccctcaccgccgccggaggtcgaggagatgggggcgccaaggcggtggaaccgctccggcctccgccgccgcccgacccgaagacaatggccagatggtaccagctggaggcgctggagcgggcggtgcgggggaacaccctggcgttcctggagaccgggagcgggaagacgctcatcgcggtgatgctgctccgggcgtacgcgcaccgcgtgcggaggccggactcgcgccgcttcgccgtcttcctcgtccccaccgtcgtcctcgtgggccagcaggcgcgcgtcgtcgagcagcacaccgacctcgtcgtcaagcagttctgcggcgagatgggggtcgacttctgggacgccgccacctggcgatcccaactggaggacggcgaggtgctcgtcatgacgccgcagatcctgctcgacaacctccgccacagcttcttccgcctccaggacatcgcgctgctcatcttcgacgagtgtcaccacgccaggggcaatacgccgtacgcctgcattttcaaggaattttatcacccccagttgaattctagtgcgtcagaccctctgccaaggatatttgggatgtctgcttcgctcatttattcaaaagatttgaatccgcacaattattcaaagcaaatttctgagattgagaatctcatgaattccaaggtgtacactgttgatagtgaatcagctttgtcggagtacataccatttgcttctacaaaaatagtggactttgacgattccaacatttcatctgagctgcatgccaatattctcagttgtttgaatagattgaataaaaagttgagtggtaagactaggcatggcggccaatttggggtaagatacaagggagaggttggcactttcggcatgcctacagaagggaacagagattga

SEQ ID NO: 3596 - DNA, 678 bp, Zea mays
  Clone ID: TF_ZmC504615_1
gggtaccctccgggccggccgggattgaaagataatgttactatgatcaattcagaaaccagaaggctttgttatggttagcaaaactttctcctaaaaacttctcgagatggagtttgttggtttgactcgcccagttctagatacacgtgcaactacaggcaagggtgcccatccatattacaagatattccaagcatttggccttgtgagaaagattgagaaagatacaacgccatgtgtcctcggatacccttaatgtttttgtgtggggagaccacaagaagccatctgctcacaaccttgcttgggactatgacattgtcataaccacattcagcaggctaagtgcagaatggggtccacagaagagaagtccactaaagcagatccattggttcagggttatactggatgaagggcatacactaggttccagccttgccctgacaaacaagttacagatggctgtcgctttggttgcatcaaataggtggatattaactggtacacctacaccaaacacaccaactagtcaggttgctcatcttcacctcatgcttaagtttcttcatgatgaaacttatggtcagaattaccagtcatgggactctgggatccataggccttttgaggcgcaaatggaagaggggcgcgctcaccctgtgccactgcttc

SEQ ID NO: 3597 - DNA, 1563 bp, Zea mays
  Clone ID: TF_ZmC9159_1
aattcggcacgagggttttgttgactggaactcccttacagaacaacattggtgaaatgtataacttattgaacttcttacagcctacttcttttccttctctatcatcatttgaggagaagtttaatgaccttacaacagcagaaaaagtagaggagctgaagaaacttgtagctcctcatatgcttcggagattgaaaaaagatgcaatgcaaaatatccccccaaagatagagcgaatggtacctgttgaattgacatcaatccaggctgaatactaccgtgctatgcttacaaagaactatcaagtactgcgcaacattggaaaaggtggtgcacaccagtctttattgaacatagtaatgcagcttcggaaagtctgcaaccatccctatcttattcctggaactgaacctgaatctggttcacctgaatttttgcatgagatgcgcataaaggcctcagcgaagctaactttgttgcactctatgctaaaaatattacacaaggaaggccaccgtgtccttatattctctcagatgacaaaacttcttgacatccttgaagattatctgactttagaatttggccctaaaacatttgaaagagttgatggctcagtatctgtggcagagcgccaggcggcgattgctcgctttaatcaggataagacacgttttgttttcttgctgtctacacgatcatgtggacttggtattaatttggcaactgcagatactgttatcatatatgattcagatttcaacccacatgctgatatacaggcgatgaacagggcacacagaattggacaatcgaatagactcctggtttacaggcttgtggtacgtgctagtgttgaagagcgtatcttgcaattagccaagaagaaactgatgcttgatcaacttttcgttaacaaatcagaatcacagaaagaagtggaagatatcattcgctggggtacagaagaactctttggaagtagtgacagtgtggatggtaaagatagcagtgaagccccaggttctgttgctgatgttgaatttaagcatagaagaaaaaccggtggcctaggtgatgtttatgaggacaaatgtattggtggttctaccaaacttgtttgggatgaaaatgctattttgaagctgcttgatagatcaaaccttccatcatcagtggccgaaagcactgatggggatctggacaatgatatgcttggtactgtgaagtcaatagactggaatgatgagctgaatgaccaccctggtaccaatgaggatattgcacctattgataatgatgggagtgagttggcatctgaatcaaagcaaggtgctactaatcgtttagaagaaaatgaatgggataaacttttacgtgtcagatgggagcaatatcaaatagaggaggaggcatctcttggtcgaggtaaacgtttaaggaaggctgtttcttacagagagacatttgcaacacttcctaatgaagcattaagtgagggctctgatgagggagatgaaccaaagagagaatatacagcagctggactggtcttgaagg

SEQ ID NO: 3598 - DNA, 694 bp, Zea mays
  unsure (1)..(694): unsure at all n locations
  Clone ID: TF_LIB4172-009-Q1-L1-B9
aattcggcacgaggggatgttcaaagagatgattgttcatagaagttaatgttcttctgacaacatatgagtacttgatgaacaagcatgataggccaaaactaagcaaaatacaatggcactatataataatcgatgaagggcatcgtattaaaaatgcttcttgtaaacttaatgctgatttgaagctttatcggagctctcatcggatattattgacaggaacacctcttcagaataatctcgaggagctgtgggcacttctaaattttttgttgcccaatatttttaattcgtcagaggacttctctcagtggtttaacaaaccatttgaaagtaatggtgataattcacctgatgaggccttactttcagaggaggagaacttgttgatcataaatcgtcttcaccaggttcttcggccctttgtactcagaagacttaagcataaggtcgaaaatgagcttcctgaaaaaattgaaagacttgtaagatgtgaggcatctgcttatcagaaacttctcatgacaagggtggaagaaaatcttggtggaattggagccgttaaggttcgcttcgttcacaactctgtcatggaattgangaacatatgncaccatccatacttgagccagcttcatgntgaaagagatgagggctacctaccctaacattttactacatctattttgag

SEQ ID NO: 3599 - DNA, 583 bp, Zea mays
  Clone ID: TF_20337019
cggagcatgaagggcttcaaaatagcatgcaatctactaagctgatgttcattcaaagctcctccatgctcagcatgaccctcaataccctttgagaaccactcgttgaactgttcatggctgtcaaatagagtgggcatgatgaaatgaagaagtgcccataactcagccatattgttctgtattggtgtcccagtaagaagtagacgatttctacagctaaagctcagtaatgtcttccagcgctggctgcttgaacttttgatagcctgggcctcatccagtaccatgtattgccacttaacacgtctcaaaagcttctcttcattcacaagtatctgatagtttgtaataagaatgtggaagctagcatctctgcgatacaaacgcttggggttgatgttctttcgaagaatcatcctctctgggccccagtaaggaagtatctttaggtcagggcagaatctaatcaactcctcagcccagttattcacaacagatgcaggagccaccactagaaaggggccccatatgtttttgtcctcagccaaatgagacaggaatgccatagcctgaacagttt

SEQ ID NO: 3600 - DNA, 456 bp, Zea mays
  unsure (1)..(456): unsure at all n locations
  Clone ID: TF_LIB4978-050-A1-K1-E11
ctctaatttatataaactcccgatctagctcggaacgattcccgggcgcnatcccggcacaaaccgaacaagcgcctaaaacgcggacgcataaccacgntcaactcaaaagnctaagcagatcgggagaagatactcgatccgccggagactacttttancaggcactcctatccaaaaccgcctgcaagagctccggnctttgcttaactctctcctgcccaaaatnntncattcatcccacaantntgaggaacggnttaatgcaccatttgcatgcgacgccagccttaacgacgagcgaaccactactaatcatacatcgntcgcatcaagctctcgccncccatntttgctgaggaggaacaccgacgacctacagaactatctccccgcgaaaacacaagccattctcacgcgcgacccgtccgcttggcaaaaagcgcactaccaaca

SEQ ID NO: 3601 - DNA, 484 bp, Zea mays
  unsure (1)..(484): unsure at all n locations
  Clone ID: TF_ZmC137038_1
cggacgcgtggngtggatgaggggcatcggttgttaaacaaagattccaagttgtttggtcagcgtaaagattataataccaaacatcgtgttctattaacggggaccccagtccagaataatcttgatgagcttttcatgcttatgcacttccttgagggtgaaagttttgggagtataactgatctccaagaagagttcaaggatataaaccaagacaagcaaattgagaagcttcatggaatgctgaagccacatcttcttcgaagattcaagaaggatgttatgaaagaacttcctccaaaaaaggaattgattctacgagttgaattgacaagaaaacagaaggagtactataagccatctcacgagaattatgatgtacccgcgagtcgggattaatcacataacgtgaaagtaaccaactcgtgcatgatcagatgatgactgtctgactgcatcagagagttagagctcaatacag

SEQ ID NO: 3602 - DNA, 2666 bp, Zea mays
  unsure (1)..(2666): unsure at all n locations
  Clone ID: TF_ZmC38421_1
acacacagcctgtagcaccttggttcttgggcaacactgncgacactgtttctttggcagctccggtgcgtttatctcagtgaacagttgggcgggtgcaagatttttttatttacgcgctaatgaaatatctcattacggtcagacatgatcaaacacgtttcaaccccacggctgctatttttcagccctgttcctttgctttaattatcaacaccaaaactatgatcagtacagattaccctctttacacaaaattatttctatgtgtgctggtcatggatcatcctccatgcttatgtacatatatggtcacagccagcacaatgaatactgcagatgccgactgcattgctaacctctgcaggataaccctcgcctctaaaaggcaacccctgtcagcttattgtcactgcccaccgcactgacggcttaatcacccgatttcgctgctttccgtatgattcccatgccttcagtcagtagaagtctcctcccaagttcagcataataaattacttgtcttgtcatttagcatcttggtgttctcatcttctgtcagtggattaggctggagtgttctcatcaccttgaacctcttctctatcataatcatgggctcagtgattttccgcttcatttaccggtttctcatgatccgcacagcagtatccttgcatcagtaatgctcttcatcagttttgatctttttgagctcgatgtttctttttgctggtcgttttgtcttgatctacagcttctgcagtagcatcatccaagtcttcgagcgtcaaatctccttctttgtcaaccttgatgcccttcgctcgtctcctcttttgtcgatccttcgcctgcatggatatttctttcaacttgtgtgcaatctgtgtgtcatcaataagtaatgaaacaacatcctcttgtctcattaaatgatcgtcctggacatgtttccccttcataactaactcttgcactgcatttttctgctttgctctttgcaatattttctcctcaatggtatctttgcatataagcctgtacacagttacctcctttgtttgaccaagtctgtgtgttctatccattgcctgctggtcttgtgttggattccagtcaatttcataaaaaataacagtatcagcagcagtcaaattaataccaagccccccagctcttgtgcttaacaagaaaacaaatatgtcattcctgttctgaaaatctcggaccatgtcacggcggtctgagattgcagaagacccatcaagtctgaaatacttgaattttctgaaattcatgtaatcctcaagaatgtccagcattttagtcatctgagcaaaaagaagcacacgatgaccttcagctcgaaggcgtcgtagtagcatatccaaggtgtggagcttcccagaatcagtgagcattttagctggatcaaaattactcatcggtggagaagacccaaatatcctatagggtagctgcagcatcggctcaatgatgggcaaatcagtattaagttcttgtatcaaagatgaggagcaattggttgtctaggaccattgaactcagaagtacgagcaaatcccaggaacagtttcttggcccaaggatcatacatctcatcggtgaacttataggcaaaatttcgatcagcacaccaaacatttataggtggtgctctagctggcggaataaaagcatatgctgaacgaagaagcctaatgtttgaagcgagcctgtcgcgatgagaaagcaccagtgcttcatatgggccatcaattggcccagtcccaatctttgtcctaagcaaactgggcttggcctttgtagaagaaagcaacaaacgggcaactgcacgaacttttgtggaatcattctgactggactggatgccggtatcttctgaatcaaggaattcatccagaatttcagcagtgtagttcctattccattgcattactgaaaagactagtctctcaaacaatgaagcagtagccaggaaggaagcttcaactgggcacagatttgacaaacgtgtaaagccaaatgcaccagatgatagaagagactcttttgatgaactaacttctggaatggctgagcgatagatattgctgggcaaaaatatattaaacagcctgttcaaatatccattctgaaatccacagatgtttccagaattttccatgttggagatgattccctcataaactaactttggaatctcaaagattatgggatttctcttgcctgcatagtgtacatcttgcaattccccaaatgggggagaaagaagtgagtttgggatttcagcaaagttgaagtaagagcttccctcattccgctcaaacagctcggggtgattgcagaccttccgtaactgcatgacaatattcatcaggctaagtaacttcttgtcatttagactgccacgacttccagcaagcaactcgttaagcgagatcttattttttatggcttgatagaaaacttgttgacgagaactcaatttgcagggaacaatttcttctttctttttggtcatttcagcaatgacatcaatcttaacccggcggagcataaagggcttcaaaatcgggcgcaatctactaagttcccggccgggcacgtctactaaggttgagtgcctcggtgccgaatgt

SEQ ID NO: 3603 - DNA, 1800 bp, Zea mays
  Clone ID: TF_ZmC1082_1
cccacgcgtccgccaaaatgatttgcatgagctatggtcattgttggagttcatgatgcctgatatatttgctactggggatgttgatctgaagaagctgctgaatgcagaagatcgcgaactaatttcacagataaagtccattttagggccatttattcttagacgtttgaagtcagatgtaatgcagcagcttgttcctaaaatccaacatgttaagtttgttgtcatgggcacagagcagtctgaagcttacaaaaatgccataaatgagtaccgtgctgcttgccaggctcgtagtgccaagtcttcagatggcatttccaataatgttgctggattgattccaaagcgacaaatatcaaactattttacacagtttcgtaagattgcgaatcaccctttgcttataaggtgtatttatggtgacaaagatgttgatcgaatttgacggttgcggtaccctaaaggtgcatttggcttccaatgctccttggagagagcaatacaagagctaaagaactacagtgatttcaatatccaccaactattattgtcatatggtgatgtgggcacaaagggcgctctaaaggatgagcatgtttttgcatcggcaaaatgtcaggccttaggggagcttttaccttctctggcaaatgatggtcacagagtactcatatttagtcagtggaccacaatgcttgacatccttgaatgggcattggaaattataggagttacatatagacgccttgatggagggaccgctgtgacagaaaggcagactatagtggacacgttcaacaacgatctttctatatttgcatgtttactttctacaagagctggaggccagggtctgaaccttgtaggagctgacacagtcattatacatgatatggattttaacccccagatggatcggcaagctgaggaccgttgccatcgcattggacaacagaaacctgtcactatctataggctagtgacaaaggattcagttgatgaaaacatctatgagattgcaaggcggaagctagtactagacgctgcaattcttcattctggagcagagttggacaatagtaccgatgtaccagagaagacaatgggggagattttggcatctcttctcctggtctgaagttctaaccctggagtttcttgaaggtatacaattctacccgtgggatatcttcaacaatgggtttttggccttcatttaagcttaccattcaccctggttaatgtcttgaatcttgaggtcctaagatgtgcatccatgtatcctttttgctcttgaaacctcccatcttttagtctgccttatccatcttttgttctatgaatggcgtgctataaactgctggatttccgaagtgtttatggttctacataatgacataatgtttaaggttactgtaggttgtaatggagtccggttcccaccccccctctgatataggaagaactgaaatctgaagtaatacatctgtaccaaagttttaacttgttttaaatgaaacgcagaatagttccaaagtcgcaacattttcttcagtctgtaccattatttatctttatttttattttatctgcacaagtaggtacggggtacctaagctacacttaacattgtcaggatacgtattagagtgcagtttgaccacatgtacatgtatcttgacatactagtctaactgtcagtttgagattgacacccgctttatcagagaaactatatgggaaactttatatgtgttaaatttaactccccaaaaaaaaaaaaaaaaaaacccc

SEQ ID NO: 3604 - DNA, 2307 bp, Zea mays
  Clone ID: TF_ZmC38173_1
cggacgcgtgggtgaagggtggagtgcttctcattggttattcatcatttagaaatttatcccttggaaagcatgtgaaggacaaaaattctgcaaacgaaattacttatgctttgcagtgtgggccagatattcttgtatgtgatgaagcgcatatgataaaaaatagaagggctgacattacacaggctctgaaacaagtaagaacacaaagaagaattgcgttaactggatctccattgcagaataatctgatggaatattattgtatggttgattttgtcagggaaggttttcttgggagtactcatgaattccgaaacaggttccagaaccccattgaaaatgggcaacacacgaattcaacatcagatgatgtgaagatcatgaaccaacgatcacacatcttgtttgaacaactgaaaggttttgtccagcgaaagagcatgaacgttgtgaagaatgatctaccaccaaagaaggtttttgttattactgtaaagctctcacagctgcagaggaagctatacaaaaggttcttggatgttcatggtttctcaagtagtggttattcagaaaaatctcacaggtccttctttgccaagtaccagacattatcccaggtatggaatcatccggggctcctccagatggctaaagaacaaagaggaaatttgcgtcgtgaagacgcggttgagaattttatgatggatgagagttcaagcgatgataatgttgaaaattacttgcctaatggagagaagcaaaaggataaagctgatcagcagtccaagaaaagcaacatcattatgaatgaggaaagtaactggtgggaggaacttttagatgagaatacttatatgaaagcagattacagtggcaaaatgaccttgctccttgatatcctgtcaaaaagttctgaattaggcgacaaagtattagtgtttagccagagtttgaccactctggatttagtagagttttatctggcaaaattgcaaatcaatggaaaagaaggcaaacattggaagcgggggaaggattggtacaggcttgatgggagcactccatcttctgatcgtcagaatcttgtggagatgtttaatgaccttgaaaacacaagagtgaaatgcacattgatatcaactcgtgctggatccctgggtatcaaccttcatgctgcaaatcgcgtggttcttcttgatggatcatggaatccaacacatgatctgcaagccatttatcgagtttggaggtatggccagaccaaacctgtatatgcctaccccctaatggcacatcaaacttaaaatcaatttatatataagcgccaggtgacaaaggaaggccttgcagcaagggtggtggatagacagcaagtttcaagaaccatctccaaagaagagatgctgcatctttttgaatttggtgaagaggaattaatggaacagaacgagaatggttctactatgattgagaagccatccacttctaacactattaaaacctctgtgcctgttcctgtcgacagtctcatgctgagcctgctcagtgagcaaactcggtggatttcaggttaccatgaacatgaagctctcctccaagaaaatgaagaagaaaagcttacaaaggaggagcaggacctggctttgtccgaatgggagtcattgaggaaagctgcatctgatcctgagagaaaatcaagcatgagcgcagttccaacatatcccaatcctgtgcggccacttaagcctgcttcaagaagccggcaactgcagcaacctaaggctaactcaaataaccaaaagaagtgcaccaacttaacccacttgctgactctgagaagccatggcacaaaagcagggtgcacgacaacctgtaacgagtgcggccaggaaattagttgggagactctaaacagagatggtagatcgagatgatgcctgtctctgtggcattgccagatttttttggggtctttatgtaatgttaacgtccaggtagcagtatatatattgcgtatacgagagtattagagtaggtagaatgtagaatggacaaaaaatggctcttgtggtacacatggtagaacgcatgggatgcaaaaaatgaacgatcacattgttatggaatgtagtcgtaacaagatgtttgttatgcacttattgtcttttttttttccttatcctcagcgctagctattttaagtcaagtgtttgtctgaaatttgccaatcggaaggcataactttataggtttaaaataatgaatactaataatgtcttggaaaaaaaaaaaacaccacac

SEQ ID NO: 3605 - DNA, 3513 bp, Zea mays
  Clone ID: TF_ZmC262_6
tttcctggctcgagccccaagcctccaatccactgaactaaaccctaggacatggcgggtagagactactgccggttgccggtgcgcccgcgcgacttctgaggccccgcccccgtcccggcgtcgccggaactggctccactgtcgcccccatcactgggactgggagagtgggagttcagagccgcagacgctggggcgccgggtcaccggaaggccgggaaggaaggtgtggccgcaagacgcaggcaggaggcatcgactcgactcaccatgtctcagtcaccgggaggacgggaaggcatatattacagcaggcagaggaaacctgagcgcaatggcagtgtatttacacctatagctgcaatgtattccagtggtcatgcactccctgttgcaaataggagccacggtttggtatttggcagtctgagcaaggactgggacgacattcgccagcgcaaggatcagttggtcaacttccttgctagtcttgaacgagcctctggagattctgcggcagctggcaaaatcgaagatagcaaattggccagtccttctgtggagccaactgaacaaaaagagaaggctgccataatcgttcttgattcagacgatgaggacggaaatggttcaggaaacagtaagttggcatctgagactaacaaagaactcggaacatctggattgattaataatatcgcagaaaggatggcgtttaatgggagccaagcatttggaactgtgcatacttatggagataagaacacacagattgttccgtatggtcaatgttctgctttagtgaatcagtttcctttgcaaaccagttggcaaccatctattcagtttgagagagtcgtgctgcagaaaaggcctgaggagcagcgaatgcaagatcttgtggctgctagcatagccgagaagagagcagaaacacaagtgttcctttcacttcccacagagaaaaagcgaaggagatcagaccccagtctgcatgccagtgacgatactgctactgtccctaaacaaagaaaaagtaaaggtgccacagttgtagcagcagctaatttgtcattggtttcacaacaaactgctacatcaccagaacctgacatggttatagaggaagaggagaaacataaaaatgaaagtgatggtcttgacgattattggaaagattttgcattggctgttgaaagcacaaagcttgacgaagttgatgaggcggcaattgaaaaggaagataatggaaagatggaggacatcgattgcaatcatgacatccggattcatgaagatttgggtcatgtatgccgtgtgtgtggtatgattgtgagaagagctgattcaataattgattatcagtggaaaaaggcttcaaggagaagaacgaatggctatggaggacattcaaaagatgctgatgagatagattgtggtactgttaaactgtctgaagatttcatagtcgcagatattgctattcatcctagacatgctcggataatgaaaccacatcagttggaaggtttcaactttttggttaagaatttgattggagacaagcctggaggttgcattctagctcatgccccaggtacagggaaaacatttatgcttataagcttcattcagagcttcatggcaaggtatccatctgcaaggcctcttgttgtgctgcccaaagggattctaggtatatggaagacagaaattaaacgatggcaagtgcaggatataccagtgtacgatttttactctgtcaaggctgaaaaaagagtagaacagttgcaaatcctcaaatcttgggaagacaagatgagtatactatttcttggatacaagcagttctccacaatcgtcactgatgatgggggcagcaatgtcacagctgcatgtcgagacaggctgcttaaggttcccaaccttctgatacttgacgaaggacatacacctagaaatcgggagactaatgtactcgaatcactaaatagagtggaaacaccacgcaaagtggttctttcgggtacacttttccagaatcatgttgaagaagtgtttaatatcttgaatctcgttcgcccaaagtttctcaggatggaatcatcccgtcctactgccagacgtataatgagtcaagttgaaatagttggtagaagttcgaaagggcttgctgatggcgcattcactaaggcagttgaagaaaccttattgaatgatgagaacttcaagagaaaagctcatgttattagaggtcttagagaactaacaaaggatgttcttcactattataagggtgatatcttagatgaactacctggcttagtagacttcagtgtgtttttgaagctcacacccaaacagaaagacattatttataagttggaagcacatgatcggttcaaaagaaatgcagtagggagtgcactgtacattcatccatgtctttcagaactttcagaggttaatgctgagcatagggctaacacctttagagatgatttagttgatagtctggtagattctatcactgtgagagatggcgtgaaggccaattttttcatgaatatcctgtcacttgctaattctgcaggagagaaagtgctagctttcagtcaatatatatctcccatgattttctttgaaaggctgctggtgaagaagaaaggctggcatgtggggaaagagatctttatgatctctggtgatactagccaagaagacagagaattggcaacggaccattttaacaactctgctgacgcaaaaattatgtttggttctatcaaggcatgtggggagggtatctccctcgttggtgcgtcgagagttgtcattctggacgtacacctgaacccatctgtcacccgtcaagcgattgggcgtgcattcaggcccggacagcagaagaaggtgtttgtgtacaggcttgtagctgccgattctgacgaggtaaaggtccatgagacagcattcaagaaagaagtcataccgaagctgtggttcgaatggagcgagcactgtactacggaagacttcaaacttggtcaaattgatattgatgactctggggacgaactgttggatactaaagcaatccgcaaggatatcaaagcgctgtatagaaggtaaacaagctttgtggccactggacaccatgtacatattgcagtgctgaccgtcgagctgatccttaaactgaagaaagaggtggcgggtgttgcggtggctacattgcgcggtaacaaaagaagtcattcccagctatatccgtggaatggcggcttcttttgttcctagtatgtgccaacttggggcagcagtcagctgatccccagacacatttctagactcttttttaggctcaagtttctgagaattaacctgctatggcgtttagccttaagtaaatatttcgttcgcaacaataataacccagtaaacctaatttgtttttgtgcgtttgtgggggtggttcttgaaatttaccgggcccctttttcttgggct

SEQ ID NO: 3606 - DNA, 3050 bp, Zea mays
  Clone ID: TF_ZmC2934_1
gtcctggcatggcatgttcgggcacgtcaacgtatctcacggcaagagaaaaataggattaatcttctgaaaactggtgatcaagaagcatatatgaggatggttgaagagagcaagaatgaacgcttgaaaatgctccttgataaaacaaatgagcttcttgaaggaattggaaaagctgtacagcgacaaaaagatgctgaacatgttagtaagccagaaggagggagtgaagtgccaaaagggtcagaatctgaggattgttctcaaatttcgggcatcaagagtgaatcagctgaggagtctacttcagatgacgatggagacctccctggccctgcagatgaaagtaaattcaatgcaggacgtagacttgatgttactgttcattctattgaagaaaaggtaacagaacaaccatctgctctcgaaggtggtgaattgagaccatatcagctagaaggtctccaatggatgctttctctatttaacaacaatttgaatggcattctggctgatgaaatgggtttggggaagacaattcaaaccatagctttgatcgcttatctgttggaaaagaaggaggttgcaggaccacacttaataattgctccaaaagcagtattaccaaattggtctaatgaattcaaaacttgggctcccagcattgggacaattctttatgatggccgtccagaggaaaggaggctgttaagggataagaattttgacggagagcaatttaatgttttgctcacacattatgacctgatactgaaagataagaagttcctaaagaaggttcactggcattatttgattgttgatgaaggacatcgtctgaaaaatcatgaatgcgctcttgctcgcacactagtttctggatataagatccgccgcagactacttttaactggcactccaatccaaaatagcctacaagaactgtggtctttgcttaactttattctgcccaatatttttaattcatctcagaattttgaggaatggtttaatgcaccatttgcatgtgatgttagtcttaatgatgaggaacagctattaatcatacatcgtctgcatcaagttttgcgtccatttttgctgaggaggaaaaaagatgaagtggaaaaatatctccctgtcaaaacacaagtaattctcaagtgtgatatgtctgcttggcaaaaagcatactatgaacaagtcacaagcagggaaaaggttgcactaggatatgggctcagaaagaaggctctgcaaaatctgtcaatgcaacttaggaagtgttgcaatcatccctacctattcgtagagcattataacatgtaccagcgggaggaaatagttagagcatcagggaagtttgaattgcttgatcgtctacttccaaaactgcagagagctggtcacagggttctgcttttctctcagatgacgaaactgcttgatgttttagaaatatatttgcaaatgtacaatttcaagtacatgaggcttgatggatccacgaagactgaagaacgagggaggttactggcagattttaataagaaggattcggaatatttcatgtttctcctcagcacacgtgctggaggacttgggttgaacttgcagacggcggacactgtcattatatttgatagtgactggaaccctcaaatggaccaacaagctgaagaccgtgcccatcgtatagggcagaagaatgaagtgcgtgtgtttgttcttgttagtgtcggctccattgaagaagagatcctggaccgtgcaaaacaaaagatgggtatcgatgcaaaagttatccaggctgggttgtttaacacgacctccacagcacaggacaggcgagcattgctgcaggagatactcaggagaggaacaagctcactgggaacggatatccccagtgaacgtgagataaaccgcttggctgctcgaaacgatgaagaattccggttgtttgagaagatggatgaagaaaggaggctaagggagaactacaaatctagacttatggatggaaatgaggtcccaaattgggtgtttgccaatgataatgaaaccttacgcaagaaaaccgtggcagatgaattccggaatataattgttggttcaaagagacgtagaaaggaggttgtctattcggactcttttggtgatcagtggatgaaatccgacgagggatttgaagagattgcaaagatgactccaagggtgaagcgaactgcttattcgcctgacattcaagttgagtacaatgaaaggaggaaaaggcccaagtctgtggaaaacagcgcagatggcgcaagcaacccaacacggacacccgacaaaggaagggctggagtttcatcatacagcaaggatgagaccgaagatgatggtgaagacgaagtcatcaccagtggcttacagaagggtaacagtttcacatggaagacccttggaagaaaaaggtcaagccacttaagttcgtcgtcggactcaaaagggcgaccaccattctaatgtcagttgccttgatgcttttgctcgatgaagcccttctaataatggagtacccctggaggctagcagcgctaccatttcgaaagtaccttgaacctataaacttcaggatggaggctgtagctagcaggactaccattttgaaagtacattgaagctataaacttcagaattagtaatttactctggacttgttgccatgaattcgtaactcaaacgaacttaaattgcgttacagttcaagcctattttgggggtaaaggttattggtaaatagctggtgatggcttgccctgaatttgggctgtcttgtctgcacattccgttgagcagtcttcggctaatgcctgtccagattttactggtttatatggcaagcaaaactgtactaggtgctatttgatgtgcttccaccgaggcaagtcctcaaacaagtgtcatcttttattgtgtatagctagtagagttggctctgtggaaaaaaaaaaaaaaaaaaaaaaaaaaaaaaaaaaaaaaaaaaaaaaaaaaaaaaaaat

SEQ ID NO: 3607 - DNA, 551 bp, Zea mays
  Clone ID: TF_19436653
cgttgctgtcgccgttgctgtcggcgaaagaaatgtgaaatggacggaatatgtccagaaatttccatcggcagcaaaaggaaaaagcagagaaagccaaagaagaaaaacaaacctagcaattcagaaggtggcccacttgccagggtacgatggttcagagttgtgcttgatgaagctcaaacaataaaaaattaccggactcaagtgtctagagcttgttgtggactgagggcacaaaggagatggtgcttatcaggaacacctatacaaaacaaaattgatgatctgtatagctatttctgtttcttgaagtatgaaccttactcaaaatttagtaatttcaaatatatgatcaagcaccaaattactagagattcagttcgtggctataagaaacttcaagctatcttgaggataattctactgcggcgcacaaaagaaacacttatagatggggaaccaatcttaaagctgccaccaaagacaattcagctgaataaaatagatttcacccaagaagagcgagctttctatttgacacttgaaga

SEQ ID NO: 3608 - DNA, 2234 bp, Zea mays
  Clone ID: TF_ZmC3777_1
gaacttaccaaatatgatgttgtgcttactacatattctatagtaagcatggaagtaccaaaacaatcaaatcctgatagtgatggagaagagaaagggaagcctgacccgtatggtgcacctgtgtcctcttcagggagcaaaaagagaaaggcatcctcttctaagaaaacaaaaaataaaagtgttgcagagagttgcttgcctgaaaaacctcttgcgaaagttgcttggtttagggttattcttgatgaagcacaaagcattaagaactaccgaactcaggttgccagggcttgctggggtttgcgagccaaaagaagatggtgtttgtctgggacacctatacagaatgctgttgaggatctctatagctacttcagatttctcagatacaatccttacgctgtatataagcagttttgcactctgataaagattccaatcagtaggaacccaaataacggttacaagaagcttcaagctgttttaaagccggtaatgctacgccggactaaagcaaccatgcttgatggggaaccgatcatatccttaccacccaagactgtttcacttaagacggtggacttcactagcgaggagcgtggtttttataacactttagaagttgaatcacgagaacagttcaaggaatatgcagctgctggtactgtaaagcaaaattatgtcaacattctattgatgcttttgcggctaagacaggcatgcgatcaccctcacctagttagaggctatgactcctgttctagttggatgtcttcgttggagatggtgaagaaacttcccatggaacggcagcacaaattacttatttgcttgcaatcttgttctgcgttttgtgctctatgcaatgatgcgccagaagatcctgttgtcactctatgtggtcatgttttttgcaaccagtgcatactggagcaactcactggtgacgacagtgtatgcccagtgtctaattgcagagtccgactaaacacatcctcactcttctccagaggcactcttgaatgctctctgagtaaattagcctctgatttcaagtctgatgatacatgtatggaaatgatacatgctgaaaagcgccctgggatggattcatcctacgcatcttcaaaattgagagctgcattagatattcttctctcattgcctaaaatagatcccactattgatagcaaatgttcaatcgggattgaatctgagaagtttgatggaaagggtatttcagaacaaactgacaccaagttgacagagaaggccattgttttctctcaatggactagaatgctagacttgcttgaagtccatttgaaagcttctcatgtgacatatcgaaggcttgatggaacaatgtctgttgctgcacgggataaagctgtgaacgacttcaatatggttccagaggttactgttatgatcatgtcactcaaagctgcaagtcttggcttgaatatggttgctgcctgccacgtacttatgctagatctttggtggaacccaaccaccgaggaccaagctgtggatagggcacaccgtattggtcaaaaacggcctgtcacggtatcaagattaactataaaagacaccgtggaagatcgtattcttgctctccaggagaaaaagcgggagatggttgcttctgcgtttggagaagacaaatctggttcccgacagactcgattgaccgttgaagacctgaattatctgtttatggtgtagaatcgctcctgagagtgaacagttttgctcattggattggtgttagacgtggtagataaaaatgttctctgaaaaaataacaaaatgctttcatttagggattattagttcttgtagcttgtacagttgcagagatttaggggttgctagcgacgtgtcttccaattctttttgcacgggaagcagtaagatgctgaactaggtgaattcttcagatagctgctatagtgcctgttaacttggggggtgttttctatgtactaatttctagttcctccattttattttcttttacttcctaaattgtcaaacacagatactaaaatagagataatctctcttttagtctatgtgtttagcaatttaggggctaaaagggactaaaatagagagactaaagacaccccttaatgtaatgaagataacgacaatgaagctcagatgatatatatgtacatattcttctcgtataaaaaaaaaaaaaaaaaaggggg

SEQ ID NO: 3609 - DNA, 339 bp, Zea mays
  Clone ID: TF_LIB3245-229-P1-N1-A10
ttggggtttctgaacaacaggagggggggcaggggctccattaggtttttcgcccattccttcttacgaggctcacgtctgatgtataaaagggcctacctccaaagacagaaacactccttaaagtcggaatgcctcagatgcaaaagcagcactatcgtgctctgcttcagaaggattcggaggttattaatgctggtggtgaacgcacgcgattgcttaacattgccatgcatttgctcaagtgctgaaaccattcatatttattccaaggagctgaacctgggccaccctacacaactggtgaacatttaatcgagaatgcaggacaaatggtct

SEQ ID NO: 3610 - DNA, 2182 bp, Zea mays
  Clone ID: TF_ZmC10254_1
cggacgcgtgggcggacgcgtgggcggacgcgtgggcaaaaactcttaatccgtgttggagtgcctacaatattgcagacaggagagctcctccagtctatgttaatctttttactggtcaagcaacaacacaatttccaagtatgactgagactgtaagaggagggatactagcagacgcaatgggtcttggcaaaactgtgatgaccattgctctgatactttccaatcctaggggggagttctctaactgtataaaaggagacacaaggtatctaggagatcgtgcgaccagaggatacacttcaacatcctctgttagaggaggtacccttgttgtttgccctatgtcattattgggccaatggaaggatgagttggaggcacattcggcacaaggagctctttctgtgtttgtgcattatgctggtgataaaactagtagcctcatgctgatggctcaacatgatgtcgttttaacaacctatggtgtcctctcagctgcatgcaaaacggaatgcaacagcatttttcacaggatggattggtataggattgtgcttgatgaagctcacacaatcaaatctcctaaaactaaaagtgcccaagcagcttatagattaaagtcggaatgcagatggtgccttacaggcacaccattgcaaaataatttggaggacctctacagtcttctctgcttcctacatgttgagccatggtgcaatgcaaaatggtggcagaggcttattcagaaaccttatgagaatggtgatgatagagggttgaaacttgttagagctattcttaggccactaatgctaaggaggaccaaggaaacaaaagacaagattggaaatcccatactggttctacctccagctcgtattgaagttgtagaatgcgaacaaactgaccatgaacgtgatttctatgaagcacttttcaggagatcaaaggttcaatttgacaaatttgtagcacaaggcagtgttctgaacaattacgctaatattctcgagctacttctccggctaagacaatgctgcgatcacccttttctggttatcagccgagctgaccctaaaaagtatgctgacctcaaccagcttgcacagcaattccttgaaggggtgcagcagagttcgtctggaagacagaacgtagtgccttcactggcttatgtagaaggggtcgtcgaggaaattcgccagggtgccactatggagtgccctatctgtctcgagtcagcttcagatgatccagtgcacgaggcttgcgcacaccggatgtgtggcgaatgccttgtttctagctggaggactccagaaggagggccatgcccactctgtagacgtcacatcagcaagtctgacctgatcatactgcctgctcagagtcgtttccaggtggatgccaagaacaactggaaggactcgtgcaaagtgaaaacgctcgtaacgatgctggagagccttcagaggaagcaggagaagagcatcgtgttcagccagtttacttccttcttcgatcttctggagatccgcttcacccagaagggtatcaagttcttgaggtttgatggcaagctgagccagaagcacaaagagaaagttctgaaggagttcagtgagagccaggacaagctggtgctaatgatgtcgctcaaggctggaggtgtagggctaaatctaactgctgcctccaacgtttttatgatggatccgtggtggaatccggctgtggaagagcaggctatcatgagaattcaccgcattgggcagaaaagagaggtccgagtccgacgcttcatcgtcaagggtactgtcgaggagcggatgcagcaggtccagatgcgcaagcagaggatggtttctggggcgctcaccgacgaggagattcgtggcgctcgcattgagcatctcaagatgttgtttaaataaatgatcattgccgatgtgtatagctgacgctacgccgttgatactttggtagtgtcaagtaggttgttgagggcatgtttggtaggagtaagatctgggtttagaccattgtagatggggatggccggatgggagtgggtggaaccttgcccttccgatatgacggtcttcctttctaacgtgaatcatactgagaatgagcattttggaaaacatgactacgataaatcacttttctcttg

SEQ ID NO: 3611 - DNA, 2630 bp, Zea mays
  Clone ID: TF_ZmC13100_1
ttgattgcaagaaaatggcattggcttggatggtttcaaaggagaatagctcacattgtgctggcggaattcttgccgatgatcagggccttgggaagacagtgtctactattgcccttatacaaaaacagaggatggaacagtcgaaatttatgtttgttgattcagatcgtttgaaatctgaagcactaaaccttgatgaagatgatgagggagaacaaactgttagcaatgaacctaaaaaggaccaaggcgcttgttcattgtcaacatctgctggtactagtgctgaactttttgttaatcaaccgaataatgttgtgaataaaatggttgaaaccaaagcagaacgcaagaaaaaagctaaagtttccacatcatctgcatccacctcacgttccatgacaaggccagctgcaggtactctagtagtgtgccctgctagtgttcttaagcagtggtctaacgaattaactgacaaggttagcgaaagtgctaaattatctgttttagtctaccatggtggtgcaaggaccaaagatccacgtgagctggcaaaatacgatgtagttgtcactacatatacaattgtggccaatgaagtacctaaacagatggctgatgatgacgcagatcaaaagaacagtgaagaaccctctgctagcaataaaagaaagccatcggcgaatatgcaaaccaaggctaagaaaaagaagaagaaacttaaggactcaaactttgaccttgacagtggtccaattgcaagagtgcgatggtttggggttgtgcttgatgaagctcagtcaataaaaaacttccgaactgtagtggccagagcctgttgtgggctaagagcaaagcggagatggtgcttatcaggaacacctatacaaaatgcaattgatgatctgtttagctatttccgttttttgaaatatgatccgtattgcacgtataactcgttttgcacaatgattaagcacccaattgctagagatgcaattaatggatacaagaaacttcaggctgtgctgaaggtagttctcctgcgtcgtacgaaagaaactgtgatcaatggcaaaccaataataaatttacctcctaagacaattaatctgaataaagtagatttcacacaagaggagcggtcgttttatttgatgctggaagaacgctctcggcaacaattcaaggcatttgctgcggctgggacactcaaacaaaactatgccaacatccttttaatgttgctgcgacttcggcaagcctgtgatcatcctattcttgtaaagggcaatcagtcagaatatggaggtgatggttctatagaaatggcaaagaaacttcctaaggaagtggtgatagatttgcttgcaaaactggaagtggggtcaacactttgtggcttatgcaatgatacacctgaggatgctattgtgacaatttgtggtcatgttttctgctatcaatgtatacatgaacgaataacgactgatgagaatatgtgccctgcccctaattgcagtagaacattaggtcttgaattgttattttcgtcaggagctttaaagatttgcatctctggcaaatccagttctgcagtagctagttcatcatcagataacgagtcatcttcaatcagtcaaagcagctttgtctcatccaagatacaagcagccattgatatactgaattcaatcattgtcatggatcctcttactgaaagttatacaatggaatcaagcagaagtggactaggccctgtgaaagccattgtcttttcccaatggactggcatgctggatttgctggagctttcactgaatatcaactgtatacagtacaggagactagatggaacaatgtctctcaatttaagagaaaaaaatgtgaaggattttaacactgacccagaggttagagttatgattatgtcactgaaagctggtaatcttggtctcaacatggtttctgcttgccatgtaattctccttgatctctggtggaacccttatgctgaggaccaggcagttgatagggcacacaggattgggcagactaggcctgttactgtatctcgcttgacggttaaagacactgtggaagatcgtattttagctctgcaggaggaaaagagaaccatggtgaactctgctttcggtgatgacaaagccggcggccatgcgacccggctcaccgtggaagacctgcggtacctatttaggatatgattgcgagggaactctctcaatgcctcggtcaacttgtcaggtcatgatgcgttgtaccttgtaatcgtagtccggcaaaagggcggtgtaccattgcgagggtaggctcattggtccatgtccgccacgccttgctgcagctccagttttgtggtgctcagatttctagatgggtaatctagggctagatagcatgtgtaattataaccccccaaccccccctccccggggcatggaggagagttccgcagtgccaatgctttatgatttagtgtatgtatatacatgatcaccatgtctaacttgcaatgagttgttttagctcgagatgtgagactgatactgccagcggctcagcattttgtaccttctgtgttatgtccatttgcccgtcatcag

SEQ ID NO: 3612 - DNA, 810 bp, Zea mays
  Clone ID: TF_ZmC31890_1
ccttcccaagttatgggattgccttactgagttccttagacctgtaaaaacagaagatggtattccggaagatgatgcaagtattgcacagctgggcagatcgtatgaggataaggacccacagtcactcattaataatatccaggtcgttcgttccatttcacctcacttggctgagcccttaaggcctcaactgctaaatctccttccctctattcttgggtgtgttcgtcatcctcatgtggctgttagactagctgctgcaagatgcatcacatctatggcaaagtcattgaccgatgatgtgatggtactggtgatagaaaatgtcatcccaatgttgtccgatttatcttctgtctgtgcaagacaaggagctgggattctgttaagccttcttgttcagggtttggctgtggagttggttccttatgctcctttccttgtcgttcctcttctgaagtgtatgagtgacccagatggttctgttaggcagactgtgactcacagttttgctgctcttgttcctttgctgccattatcaaggggtgcttctttaccatgtggactaagtgaacgcttatctagcagtgctgaagatgtgcaatttctggaacagctccttgacaatacccaaattgatgatttcaagcttaatattgatcttaatgttgaactacgaaggtatcagcaagaagggattaactggcttgcattcctccgtcggtttaagttacatggaattttatgtgatgacatggggctcggtaagacgctccaagcatctgctattgtagcaagtgacattgc

SEQ ID NO: 3613 - DNA, 3812 bp, Zea mays
  Clone ID: TF_ZmC14226_1
gaaaaatcccctccgcctctcgagtgtttatcgcgtaattgccgcatccctcgacactcgagacgactcgaaatccaaagcgccccgccccgacccgaaccctaatcctgcatttcctctcccgccaccgcccgccccaatggcgaagccggtgaagtatgacgacgaggaggagatctcctcctcctccgccgaggaggaggatgaccagtccgccgccgccgcctccggatctggtgaggaaggggatgacgatgaggaggatgctgcggcgctgcccacggaggaggaggaagctgagggcgaggggcagcaagaggaggaggtcgacgaggaagagatcgaagccgtcactaccggcgctggagctgaggacggagaggacgccagtgccgctaccgccgctgaaggcgaagaggagtcccagtccaccgaggacgacgaatccgtcgcaaaggacaaggccatcggcgccgagactgatgcagtggttgggaagcgtgagaagacaaggctaaaagaaatccagaagttgacgcagcataaaatccgagaaaaattggatactcaaaaggctgccattgatgctgacatgaactataaagggaatggacgattgaaataccttcttcagcacaaagaagaattagctcactttgcaagtgcaagtcggacgaattatgtttatcctccttcatggatcaagggaaagacgcatgattctgaagaagaggaagacgaagaatacctcaaagaggaagaagatgcccttgctggtgcagggggtacacgtttagtttcacagccttcatgcatcaagggaaagatgcgtgattaccagttggctggacttaattggcttatacgattgtatgagaatggtatcaatgggatattagctgatgagatgggtcttgggaaaacacttcaaactatttcattgctgggctatctgcatgagttcagaggtatagctggtcctcacatggttgttgcgccaaagtccactcttggcaactggatgaaggaaatccaacgtttttgccctatcttacgtgccgtgaagtttttggggaacccagaagagcggaaccatataagggacaatttgctacaacctgggaaatttgatgtgtgtgtgactagttttgaaatggcaatcaaagaaaaatctgcgttgaggcgcttcagctggcgctacataatcattgatgaagctcaccggataaaaaatgaaaattctcttctatcaaagactatgaggatttacaacactaattatcgtctcctcatcacaggcactccactccagaataatctccatgagctctgggctctcctcaatttcttgctacctgaaatatttagctctgcggagacctttgatgaatggtttcaaatatctggggaaaatgatcaacaggaggtggtgcagcagcttcataaggttcttcgcccattccttcttaggaggctcaagtctgatgtagaaaagggcctacctccaaagaaagaaacaattcttaaagttggaatgtctcagatgcaaaagcagtactatcgtgctctgcttcagaaggatttggaggttattaatgctggtggtgaacgcaagcgattgcttaacattgccatgcagttgcgcaagtgctgcaaccatccatatttattccaaggagctgaacctgggccaccctacacaactggtgaacatctaattgagaatgcaggaaaaatggttctactagataaattgctgcccaagctaaaggagcgtgattccagagtccttattttttcacagatgaccaggcttttggatatcttggaagattatcttatgtataggggatatcagtattgtcgaattgacggaaatacaggtggagaagatcgtgatgcatccattgaagccttcaatagtccaggaagtgagaagtttgttttcttactttcaactagggcaggtggccttggtatcaacttggccactgctgatgttgtggttctctatgacagcgattggaatccccaagctgatctgcaagctcaggaccgtgcacatagaataggtcaaaagaaagaagttcaagtgttccgcttttgcactgagtacactattgaggaaaaggtgattgagagagcatataagaagctagcattggatgctttggttattcagcaaggacgattggcagagcagaaaactgtcaataaggatgaccttctgcaaatggtgcggtttggtgctgaaatggttttcagttctaaggacagcacaataactgatgaggacattgaccgtattatagctaaaggagaggagacaacagctgaacttgatgcaaaaatgaaaaagttcacagaggacgccattaaatttaagatggatgataatgccgaactgtatgattttgatgatgagaaggatgaaaacaaggttgatttcaagaaacttgttagtgataactggatcgagccacctagaagagaaaggaagagaaactactctgagtctgattactttaagcaagcacttcgccaaggtgcaccagcaaagcctagggaaccaaggattccaagaatgccgcacttacatgatttccagtttttcaataaccaaaggctaaatgaattgtatgaaaaggaagtgcggtaccttatgcaagcgaaccagaagaaagataccattgatggtgaagacgaagatcagttggagcctttgacagcagaggagcaggaagagaaggaacaattattagaggagggttttgcgtcatggacaaggagagacttcaacacatttattcgtgcatgtgagaaatatggtcgcaatgatattaaaagtatatcatctgaaatggagggtaagacagaagaggaagttcaacgttatgctagagttttcaaggagagatacaaggaactgagtgattatgatagaattataaaaaatattgaaaggggggaagcaaggatatcccgcaaggatgagattatgaaggctattgggaagaagctagaccgctacaagaacccatggttagagttgaaaattcagtacggccaaaataaagggaagttctataacgaggaatgtgaccgctttatgctttgcatggtgcacaaacttggatatggaaactgggatgaactgaaagctgccttccgtatgtctcccttgtttcgatttgattggtttgtgaagtccagaactacccaagagttggctaggcggtgtgatacccttatccgactggttgagaaagaaaatcaagaatatgatgagcaagagaggcaagcaaggaaggagaaaaggcttgctaagaacatgactccaacaaagcgagctgcactaaagaattcagagggtgagaatactccaccgagttcattcaagagacgacggcagtcccttatggacgactatgtgggctcgggaaagcgtaagagaggctgaccacgtttggcatcctcccttagacatgccgtctctacaatgattttaataccctgccgcgcagtagtgcttagttcctcttgcacgtgagtcgaatacctcaagggcatgtgactagcgtaatttatgcaatgatgacataggttagttattaatcctaaatgaagcatgtatgcgcatgctgtgttagtgtcgtagatctggactttgcaattgcaactgttgctgcccagctgacacagatccctttcgctgcaatcttccggtcctgcattttgcccgcaactgattttgcaaccaaggctaaacccaacgcgggcagtagtaactgttgcactcaggatccccgtcc

SEQ ID NO: 3614 - DNA, 334 bp, Zea mays
  Clone ID: TF_ZmC980466_1
cccacgcgtccgaggaggttcctcgctcagtacctggattaactgtggaggttcacaaattggatccgctagttcagcgtgctttagctgctgctttacgatccaaagatcttcgaggtttgtatgacaggattccccctcatctcgagtcaaagcttatgccatttcagcgtgaaggcatcaggtttgttttacagcatggtggcagagccctgattgcagatgaaatgggtcttggaaagacactacaggcaattgctgttgcttcgtgccttcgtgatgcctggccagtcccttgaatctctccatcttctttgcgattacattgggcatc

SEQ ID NO: 3615 - DNA, 2998 bp, Zea mays
  Clone ID: TF_ZmC30001_1
tcggccgggagtcccattccacaccgttggtggctcggaaccgccactgaccacttccctgaccccgcgctctctccctctactacagtcggagggcggcggcggtggcgaaccgacggcgtatgtaaggaatccaactgaacatttgacttgcttgttccgggagatctcttgcctaggtgtgaggaattgagttgtcacagaacagttggctgctcacaatggggacactttcaatgtccgacgccagccctatccctgccaagaactgggatgcttcccctgtcaagctcgaggctcaaggtggtgacaccatcctcggcatgaaggaggaagagcgactactggagctcgtgaaggatgagcaggctgatggaatcttggattcattaccaattgacctggaggccaagaatggcgatgcatcactcattactgaagcgatgaaaaaggaggaggagcagcttgaagacacccggatcaaggtgcaggaagaagaggaagccaggaagagggaagaggctgctagacttgcttttgatcctgagacacagtataacaagttagatgagctgctgacaaagacacaactcttttcggagtttctacttgagaacatggatcggattgccgatgaaagtgttgaaactcaagctgaacagccacaggtagaagagaagaagaaagggcgcggccggaagaggaaagcaaagccacagtacaatgataagaaggctaagacggcagtggctgccatgctcacaagatctcgcgaagaacgtcttgcggaagattctactctctcagaagaagaaaggtgggaaaaggagcaggctaatcttgtgccgttattgactggtggaaagttgaagtcatatcagataaagggtgtcaagtggcttatatcattgtggcagaatgggctgaatggaatactggctgatcaaatgggccttgggaaaaccatccagacaattggatttcttgctcatctgaaagggaaaggcatgcatggtccatacttaataatcgctcctctgtccactctctcaaactgggtgaatgaaatctcaaggtttactccatctctggttagtatcatataccatggaggtaaggctgcccgggcagagatccgaaggaaatttatgcccacaaatgttggccctgattttccgatagtagtgacttcatatgagatggccatgtttgatgctaaatttcttgctgcctataagtggaagtatgttgttgtggatgaggggcatcgtctgaaaaatgctaagtgtctattattgaagcagctgaagcgcataccaatggataataagctccttttgactggaacacccttgcagaataatcttgcagagctctggtcactattgaacttcattttgcctgatatattctcgtcacatcaagagtttgagtcatggtttgatttttctggtggaaatgaagaaactgatgagaagaaaaggctgcatgttgtttcaaagcttcacgctatcttgcgtccattccttctaaggcgtatgaaggaggatgtggaacagatgcttccacgaaagaaagagataatcatatatgccaacatgactgagcaacagaagcaaatccagcatcacctgatcgaaaaaacatttgacaactacttgcacgaggaatcagatattatattgaaaagacctggcattagggcaaggttgcataatctaatgattcagctgaggaagaattgcaaccatcctgatcttttggaatctccagttgattcaactggtttatatccacctgttgagaagctcctggaacagtgtggtaaattccaactttttgacaggttgctaaatttcctgatggcgcaaaagcacaaggttcttgtattctcgcagtggacaaaagtgctggacattattgaatactaccttgattcaaaaggccatgctgtttgccgaatcgatggtaatgtgaaactggaagaaaggaggaggcagatagcagaattcaatgacgtgaatagcagcatgcgtatcttcctcctgagcacaagggctggtgggcttggcatcaaccttactgctgctgacacctgtatcctctacgacagcgactggaaccctcagatggatttgcaggccatggaccgatgccaccggatcggccaaacacgcccagtgcatgtgtataggctggctacgtcacactccgttgaggggcggatgatcaagagagcctttgggaagctgaagctggagcacgtggtgatcggcaagggacagttcgagcaagacagagctaagccgagcgccttagatgaaggtgagctgctggcgcttctcaaggacgagcagaccgaggaggacaggatcgtccagaccgacatcagcgacgaggacctccagaggctgatggaccggagcgacctgatgggcccgccgcctggcgacgcgcaaacgcgcgtcgcctcttgtaccgctgaaaggtccgggctgggaggtggtggtgccggccaagagtggcggcggcatgctgtcgtcgctcaccagctgagccgtcgtggctgcggggatctgttgtgcttttggttggtcgcacgcactcagttttggtttggccccccactggtgctggtggttttggtggcagctgttgcgctgctcaggcgatggctgttgaactggggcgttgcccctgcagaagtagctttttagtttaggatcagcaacaaaacaagcaggaggactctaggccatgtgtggtcgagtctccgtacggtggtcgttgcgttagattacgtgggtgggtgatgggacggttggttgaaccagacccgacggcagcatggacacacgccggttgctttgtaaagttagtatcgcgtcgtccgtgatacaatgcggtcctccgtctacatgggtgctgacgctctcttgttcggctgtcttgtgatgttgcaaacgcccgtgccgtgacaaaagccggttccttcccg

SEQ ID NO: 3616 - DNA, 1815 bp, Zea mays
  Clone ID: TF_ZmC12070_2
gccacaagtttatctgtttttgattaaaagaattggtacatcagttctaacaggcacaacagcagtcgatctacacaccgccgaccccgtccgtactggtgatatggcagcgtcagggttccaacttccaacaagtcagtgctcctagtcctagcatagcctgccctccctactcatgcttaactacgtcagcatttagatctggaatagaaacttgaggtccgcctctgtaagcttcgacatggcatacgacgagtcccccacggtgccttcaaacaccagctccttcttctgttgcagttgcagtatgcgctcttcaaccgtgtcctttatcacaaacctagtgctcttgattggcttgaactgcccaattcggtggatacgatcctgcgcttggttctcgaccgctggattccaccaagggtccatcaggaacacatgagatgctacagtgagattcttagcgactcctccagcttttaagctcatcaggaagaccctgcagtctgcatcatgggtgaaggtgtctatggctcttcccttttcggtgatgttcatggctccattcagctggacacacttaatgccggacctctccaaggaaaactgaatcaaatccaagaatgatgtgaactggctgaagacaatccctttggcagaaccatcgtgctcaatcatgtttcttatctcctccctcaaggcatcaatttttgtactcgtcttaaaatccacaaggcttggtagtctgctcaatattcctgaacatttgcgacccttgacactccgagttacttttccaactgaattttgtgctgttaagtccacggtgagaggtattgaacaggatggacatgaaacattccccaaagctgcagagtagtctatcaaacaagtcttgcagaatgcatgatcacaagaggtaaccacaacatcttcagccaaattatgacatataccacattggctctccatggactcgtttccttcattcttcattccttcaggatgtcctgctgttttagaatatgctacaagatagggatgatcgacagcctgtctcaaccttgtgagaagatcgaagatatgagcgtagttattcatcagtgttccagcatctacatatgcatcaaatgtgtgacactctgagtgtacaaagcttcatagaattccatttcgcttttatcaaaagagtcccgcctcaatgtcacctatcatgtaaaaactaactgcctcaaaatgtttgcaaatgaggaaagaaagggtattactctgtatttggccagacgaggaaggccgaaattgaggtggtcgagtgctggcaatagcttgtctcatacggatggtgtgcgcccctggatatcccttctgttcatctcctgtcacagaaccactgggagcagtctgctgaccagaaacttgacctgataaagaatagttgcttgggtttgtctgagggcttcgttatgcctgcatttgatattgtgaagcagcttgcttaagcaatttatcaccaacaatattccttacagtttttaagaagtattccttgctgacttcatttttcatcgaaggtctaacacttccaaaatagcttcatcagccttctgatcctttgaataagatcctgattatccacagtaacaactaacaagaaacaacagcagcaatagccacggcactcatttccttctcaggcctatgctctttttcttctgagtgattgcaaatcgtctcgacatcgcaacattgtaaaatttcctcatatgctctgacaaccgatgtatcgcaccaaggttgcctacagctgataacctc

SEQ ID NO: 3617 - DNA, 3767 bp, Zea mays
  Clone ID: TF_ZmC5477_1
gactgaggggggtgttattcatataattatcagcagaaaaaagcattgtattgcataaacgatagacccaacccagagatgcaacaaaacgcgcagacttgattgatgctagtcacaacccagtgactaaagctattagtggtgtatagcaacaacttcaaaacactttacttttgccgagcgcagactctccatgccttggatcaggcatccaaagaaatcactttagtgcccccctccttaagccccttttcaggagaagtcagtttttcggacagctcatttatctgcctacttatcttcttaccaccatctggcagcctcgacaacagcacaccgttggaaaggcaaaaaaaaaaaaaaaaaaaaaaaaaaaaaaaaaaaaaaaaaaaaaaaaaaaaaaaaaaaaaaaaaaaaaaaagtgcccgcggtgctagtgacggttgctctagatccgttcatcctgggggttttgtgaggtcgaaagcggcgagcgaattaaaaaatgctggacaagctgtgggacgacgtggtggccgggcctcgcccggagacgggcctcgagaagctccgcaaggccaccaccgcccgcccgctcgtcatcaacaaaaacgcggacggcgagctacaagcgggcgcgtcaacgcctccccgccaccgcacccctcctggacgtcgccggccgcattaacaccaagaacagaagagaggaagagacaccgcaaccgcattaccatgagagagagctaggggggcctggcctgctgcggcgcagcggccacgtccctccctccccagctctcctctcctcctccagtactccacaccgcacccctcctggacgtcgccggccgcattaacaccaagaacagaagagaggaagagacaccgcaaccgcattaccatgagagagagctaggggggcctggcctgctgcccctgcatcgtctgaccctgaagatggcggcagcagcatccatggcggcccgtagccgcgcgctcgttgcgagcaggaggaggatgggtggcccgccgcgtctcttggtcgtcagctgcgacgccaggacagcggatgcctactgctccctggccgcaaagattttgggacctcccacgaccttcaatgcagcgaagctcaaggtggagttcgccggggaggagctccggcctcctttccccagagcctacactctgacccactgcgacttgacggcgaacctgacgctgggcgtgatgagtagcgagcagctgcgcaagtcgacgctgcagagggacgacgtggtggcagagtggaaggaaaccgccggggagatgacgctgcaggtgcattgcttcgtcagcggcgccaacctcctgcaggagctggccgcaggtttcagatactacgtcttctccaaggagctaccgctggtcctcaaggcggtggttcatggcgacgccgctctgttcgccgacaggccggagctgatggaggccaaggtgtgggtgcacttccactccagctctcgcaagtacaaccggttagagtgctggggcccgctctgggaggctgccacaactaccaggaggaaccaccacctgctggagctggaccaactgcagagcgccatcaccaagaagaagactatctttaacgccctgctcgcccttctcctctgattttgattcagccgcctatacaatgaacggacggactatagagtgatcaagcaaacccaccaagcattctgcatctctgtctgactgtaatggttgctgctttgtctggggattatattattcatataatcatcatcagaaaaagcattgtattgcataaacgatagacccagcccagagatgcagcaaaaagagcagacttgattgatgctagtcacaacccagtgactaaagctattcaaaacactttacttttgccgagcacagactctccatgtcttggatcagtcatccaaggaaatcacttcagtgcccccctccttcagccccttctcagcagaagtcagcttctcgtccagctcatttatctgcctccttatcttctcaccaccatctggtagcttcgacaacagcacagcgttggagagggtctgtgaaagccggttgattcttgcctttatctcttcaggactctctgcgcttctgttacttggaatgtagtttcgaacagtgaaactttcatcctttggcttcagcgcaaaagatgccccgttggcgacatagtcagatgaggatcccttgtaatattgctggggcatcatgggcatgccccgaggtttgctgtccagtgcatcattctcactcagagtgggcagggttgcagttttagagaataggaggctgtgatgactcacaccggctattccttgttgctccagaaactgtatatgcttcctcaaggactcatccagaacaacttgttgaccatgctcttcttgcaactgcttatgtgtgagggaaacatcaaatccttgttgtggcaaactaaatagctcttgaatctcactcttgctgaagtaacgtgtttgctctttttgctccgtagctgtcctgaacagagcgcccttcaaaacctgcaatttgtatatcttttcttcaatggtcgcagatgtcatcaagcggtatacaatcacatttttagtctgtccaattcggtaagcacgatcaacactttgattgtctgtactagggttccatgcaggatcaactacaatgacacgagttgccttggtgagtgtaagtccaagcccaccaacttgtgtggttagcagaaaaactggagctccacaaccctcttggaagtccttcacaatcctttcccggtcagaaaccttggtggtgccatcaatgcgcaaaaacgcatagccctctaatattatagcttcctgaataaggtttagcattttacgagtctgtgaaaatattaaaacatgatgcccctctccaacaaggttccgcaacaaggacatgatgaatgatagcttgcatgagacatcctgaccaacttccagtgcattatcatcatgagccatatctgcaaggttcatggccattttttccaccattccaatgtcttgatcattcaacatttcacccattccttccaacacaccctcagcacctttcttagttaatagcagtggatgatcacatattttcttcaatattgtgattgcagccaacggtgatgcctttggctgcaatgctaaatgaaccagctcactatttagaaaagcttcatatagtttcctctggcatggtgttaacttcagccagacaattagctcattcttcttggctaatgttttttcttctgatgcaccagtatcaaagacaacttcacttttcaggcgccgcaaaaagtatggcttgattcgctctcttagttcctttgctacatttgagcctacgtgcttctctcgagcggtagcatttttgtcatttcctcgaaggatagccgtttcataccttattttgaactgctgtttatcacccaagacatctgggcaacagaaattgaacagagtccacatttccttcaagttattttgaataggtgttccactgatcacaatgcgatgggcacaaggtatttcgtacaaactttgggccctttgtgtcttattattttttattagatgtccctcatcaagaattacgtaattccacaaagttccttcctcatcatcatcatcattgctgttgttgtaggagttgcctcttatgagcttgtagttgttcctgacaatgtcataggtggttatgag

SEQ ID NO: 3618 - DNA, 2219 bp, Zea mays
  Clone ID: TF_ZmC2934_3
ggacatcgtctgaaaaatcatgaatgtgctcttgctcgcacactagtttcaggatatcagatccgccgcagactacttttaactggcactccaatccaaaatagcctacaagaactgtggtctttgcttaactttattctgcccaatatttttaattcatctcagaattttgaggaatggtttaatgcaccatttgcatgtgatgttagtcttaatgatgaggaacagctattaatcatacatcgtctgcatcaagttttgcgtccatttttgctgaggaggaaaaaagatgaagtggaaaaatatctccctgtcaaaacacaagtaattctcaagtgtgatatgtctgcttggcaaaaagcatactatgaacaagtcacaagcagggaaaaggttgcactaggatttgggctcagatcaaaggctctgcagaatctgtcaatgcaacttaggaaatgttgcaaccacccctatctatttgtagagcactacaacatgtaccagcgggaggaaattgttagagcatcagggaagtttgaattgcttgatcgtctacttccaaaactgcagagagctggtcacagggttctgcttttctctcagatgacgaaactgcttgatgttttagaaatatatttgcaaatgtacaatttcaagtacatgaggcttgatggatccacgaagactgaagaacgagggaggttactggcagattttaataagaaggattcggaatatttcatgtttctcctcagcacacgtgctggaggacttgggttgaacttgcagacggcggacactgtcattatatttgatagtgactggaaccctcaaatggaccaacaagctgaagaccgtgcccatcgtatagggcagaagaatgaagtgcgtgtgtttgttcttgttagtgtcggctccattgaagaagagatcctggaccgtgcaaaacaaaagatgggtatcgatgcaaaagttatccaggctgggttgtttaacacaacttccacagcacaggacagacgagcattgctgcaggagatccttaggagggggacaagctcgctgggaacagatatccccagtgagcgcgagataaatcgtttggctgcacgaactgatgaagaattctggttgtttgagaagatggatgaagaaaggaggcttagagaaaactacaaatctagacttatggatgggaatgaggttccagattgggtattcgccaacaatgatttacccaagagaaccgtggcagatgagttccagaatataatggtcggtgcgaagcgacgtagaaaggaggttgtctattcagactctttcggtgatcagtggatgaaatccgatgagggatttgaagacattccaaaggcgactcagaggtcgaagaagactgcttactcatctgacatccaagttgagtttagtgaaaggaggaaaagacctaggtctgtagaaaacagcgcagacggtgtgagcaacccgacgtggacgcctgacaaaggaagggctggagtttcatcatacagcaaggacgagactgaagatgatggcgaagacgaagtcattactagcggcttacaaaagggaaacagtttcacatggaataccctaggaagaagaaggtcaagccacttcagttcgtcatcggactcgagagggcgcccaacattctaatggcaacatacatgaatgttatggcctcgacctgttggttgatggaatacccttgtagagcagggctgcgactatgactgagtaccttcaagcttatgaactttattaggattactagtatactgtatggacttgttggcatgaatttgtaactcctttaaatattaattgtttaaacaactggtggtgtttgctatcataccgcgccaacatgtttttatttttttgctaatcaaagtttttgtggccaggttttattggtgtcgggttgcattgcaatggctgttcatccggttagcagtcttcggctaatgcctgtccagattttactggtttatatggcaagcaaaactggactaggtgctatctgatgtgcttcccccaaggcaagtcctcaaacaagggtcatcttttattgtgtaaagctagtaaagttggctctgtgtatctatatgcccttacatagcctgatagccccccgataaatacgtaaaaatagctttgtgcaaaaataatttctttttgagttttcccctttaatt

SEQ ID NO: 3619 - DNA, 2099 bp, Zea mays
  Clone ID: TF_ZmC26704_1
gggggctcggtaagacgctccaagcatctgctattgtagcaagtgacattgcagaagcacgtgcacggaatgatgaaaaaattctgacatctttgattatctgcccttctacattagtggcccactgggaatatgaaatagagaagtacatagacagctctatcttgaaacctcttcagtacgttggttcttctcaggacagagtgacactccgtagtcagtttgataaggttaatgttatcataacatcatatgatattatacggaaggatattgattttcttggaaatatcacttggaactattgtgttctggatgaagggcatataataaaaaactcaaggtctaaaataacgtttgctgtgaaacagctgaaagcgcaacaccgtcttatcttgagtggcacacctattcagaataatgtgttggagttatggtctttatttgacttccttatgcctgggtttcttggaacagaaaaacaattccaagctgcatatggaaaacccttgctagctgccaaagattctaaatgttcagcaaaggatgctgaagctggtattcttgcaatggaggcactgcataagcaggtcatgccgtttctactgagaagaacaaaggatgaagttttatctgatcttccagagaagataatccaggatagatattgtgatctcagtctattgcagctcaaactttatgacaaattttccagctccaatgcaaaagacgagatttcaactatagtaaaagcaaatgaactggaggaatctgcacctcaaccaaaggcaactcggcatgtgtttcaggcattgcagtacctattaaaactatgcagccatcccttgcttgtaactggggagaaccccccaaatcatcttgtggatcttctgaatgaaataggtctgggatctggcagtgagcttcatgagcttcaccactcacctaagcttgttgctcttcaagaaatacttcaagaatgtggtatagggtcagaaatatctagtcctgatgcttctacagctgttgggcaacacagagttttgatttttgctcagcataaggcttttcttgacatcatagagaaggacctgtttcaatctcatatgagaagtgtcacatatttgcggctggatggctctgttgatccagagaagagatttgaaatcgttaaagcattcaattcagacccaaccattgatgtacttctgctaacaacccatgtcggtgggcttggcttgaacttgacatctgccgacacattggtgttcgtggaacatgattggaacccaatgaaggaccttcaggctatggacagagcacatcgattgggtcaaaggaaagtggtgaatgttcaccgtctcatcatgcgtggcacccttgaggagaaggtgatgtctctccagaggttcaaggtgtcagtcgccaatgctgtcatcaatgctgagaactcgagcttgaagaccatgaacactgaccagctgcttgatctgttcacatcaacccctgcttcaagaaaagcaagcgacgagcagagtaagaggaaatctggtggcaaaggcttgaagtccattcttaatggtctggatgagctttgggatcagtcgcagtatgccgatgagtatgatctgaaccagttcctggcgaagctgaacggctgagccaccaccggctggctcgtgtacagtgtataaagcaatttggggcaggttaattttgttgttgctgttgtttgatagaggaaggaaaagattagatgctaacagatataggtggtggttggggttacgatctcaatttttttggtttccatcttcctcaatttttgttttgaggagttgtatatactctgctcacctataatcaaagctgcagctcttatcagaaaaaaaaaaaaaaaaaaaaaaaaaaaaaaaaaaaaaaaaaaaaaaaaaaaaaaaaaaaaaaaaaaaaaaaaaaaaaaaaaaaaaaaaaaaaaaaaaaaaaaaaaaaaaaaaaaaaaaaaaggaaaaaaaaaaaaaaaaaaagggccctttttaaaaaaacaaatttttacccccggggttgggaaaataattttttttttttggggcccccaa

SEQ ID NO: 3620 - DNA, 2366 bp, Zea mays
  Clone ID: TF_ZmC2934_2
ttctgctaaggctgcatatgatgggttgttcatcggggctgtgcatttcggtcactatgaaagagttcggaaaacttgggccccctctaaatgccacttcttcctctggttatcggtgctaaataaatgctggacagcagataggttggcaaagagaggacttgatcatccggagaagtgtccgctttgtgaccaagagtctgaatctttggatcatattttggtttcttgtgtttttgcgagagaattctggttccggctgatgtgcattttcagactacaaaatctggctcctacacctagtacggtgtcttttacgggttggtgggagatgatagacaatggctctggagatatgattatgaagggtgtcaactcccttattgccttgggagcctggattatttggaatcatcggaaccgaattgtctttgatggaatctcccctagtgtttctgcagctctttgtcaggcaagggaggaacaacagttgtgggaaatgatacatgatccgccggtcactacttttaacaggcactcctatccaaaacagcctgcaagagctctggtctttgcttaacttcatcctgcccaatatttttaattcatcccagaattttgaggaatggtttaatgcaccatttgcatgtgatgtcagtcttaatgatgaggaacaactactaatcatacatcgtttgcatcaagttttgcgtccatttttgctgaggaggaagaaagatgaagtagagaaatatctccctgtgaaaacacaagtaattctcaagtgtgacatgtctgcttggcaaaaagcgtactacgaacaagtcacaagcagggaaaaggttgcgctaggatatgggatcagaaagaaggctctgcaaaatctgtcaatgcaacttaggaagtgttgcaatcatccctacctattcgtagagcattataacatgtaccagcgggaggaaatagttagagcatccggaaagtttgaattgcttgatcgtctacttccgaaattgcagagagctggtcacagggttttacttttctctcagatgacaaaattgcttgacattttagaagtatatttgcagatgtacaatttcaagtacatgaggcttgatggatccacaaagactgaagaacgtgggaggttactggcagattttaataagaagaattcagaatatttcatgtttctcctcagcacacgagccgggggtcttggattgaacttgcagactgcagacaccgtcattatctttgatagtgactggaaccctcagatggaccaacaagctgaggaccgtgcccatcgtatagggcaaaagaacgaagtacgtgtgtttgttcttgttagcgttggttcaattgaagaagagatattggatcgtgcgaaacagaagatgggtattgatgcaaaagtaatccaggctgggttgtttaacacgacctccacagcacaggacaggcgagcattgctgcaggagatactcaggagaggaacaagctcactgggaacggatatccccagtgaacgtgagataaaccgcttggctgctcgaaacgatgaagaattccggttgtttgagaagatggatgaagaaaggaggctaagggagaactacaaatctagacttatggatggaaatgaggtcccaaattgggtgtttgccaatgataatgaaaccttacgcaagaaaaccgtggcagatgaattccggaatataattgttggttcaaagagacgtagaaaggaggttgtctattcggactcttttggtgatcagtggatgaaatccgacgagggatttgaagagattgcaaagatgactccaagggtgaagcgaactgcttattcgcctgacattcaagttgagtacaatgaaaggaggaaaaggcccaagtctgtggaaaacagcgcagatggcgcaagcaacccaacacggacacccgacaaaggaagggctggagtttcatcatacagcaaggatgagaccgaagatgatggtgaagacgaagtcatcaccagtggcttacagaagggtaacagtttcacatggaagacccttggaagaaaaaggtcaagccacttaagttcgtcgtcggactcaaaagggcgaccaccattctaatgtcagttgccttgatgcttttgctcgatgaagcccttctaataatggagtacccctggaggctagcagcgctaccatttcgaaagtaccttgaacctataaacttcaggatggaggctgtagctagcaggactaccattttgaaagtacattgaagctataaacttcagaattagtaatttactctggacttgttgccatgaattcgtaactcaaacgaacttaaattgcgtt

SEQ ID NO: 3621 - DNA, 2730 bp, Zea mays
  Clone ID: TF_ZmC12070_1
tttttggccgccctctattatccaaacgggctactccaacggaaaaagcctcgctagtcgctgccatcgatgttacacacactgcaaaagtacatcagttccaacaggcacagcagcagtcgatctacgcaccgccgaccccgtccgtcctggtgttatggcagcgtcagggttccaacttccaacaagtcagtgctcctagtcctagcatagcctggccctccctactcatgcttaactacgtcagcatttagatctgaaacagaaacttgaggtccgcctctgtaagcttcgacatggcatccggcgagtcccccacggtgccttcaaacaccagctgcttcttctgttgcagttgcagtatgcgctcttcaaccgtgtcctttatcacaaacctagtgctcttgattggcttgaactgcccaattcggtggatacggtcctgcgcttggttctcgaccgctggattccaccaagggtccatcaggaacacatgagatgctacagtgagattcagagcgactcctccagcttttaagctcatcaagaagaccctgcagtctgcatcatgggtgaaggtgtctatggctcttcccttttcggtaatgttcatggctccattcaactggacacacttaatgccggacctctccaaggaaaactgaatcaaatccaagaatgatgtgaactggctgaagacaatccctttggcagaaccatcgtgctcaatcatgtttcttatctcctccctcaaggcatcaatttttgtactcgtcttaaaatccacaaggcttggtagtctgctcaatattcctgaacatttgcgacccttgacacttcgagttacttttccaactgaattttgtgctgttaagtccacggtgagaggtattgaacaggatggacatgaaacattccccaaagctgcagagtagtctatcaaacaagtcttgcagaatgcatgatcacaagaggtaaccacaacatcttcagccaaattatgacatataccacattggctctccatggactcgtttccttcattcttcattccttcaggatgtcctgctgttttagaatatgctacaagatagggatgatcaacagcctgtctcaaccttgtgagaagatcgaagatatgagcgtagttattcatcagtgttccagcatctacatatgcatcaaattgtgtgacactctgagtgtacaaagcttcatagaattccatttcgtttttatcaaaagagtcccgcctcaatgtcacaatctttggtggaagagcaagatctgctgctcggcctttctttgtgcgccttaacactatgcctttcagaactttttccttcagaagagtcatggctctttttccttcgaaacttgttgacccatactgtattggtgttgatatgtacttattccaccagcaaaagtgcctaacagatgagtgaccacagtcgcattgtttcttcatactggtatctagtatctcacagctacagtccttgcagaaatagtatgagtaggggaagatttgcaaaaaccgaataagagagtaaagttctccaacacggttctgcaaaggtgttccactcagagcccacttgcattctgactccaatgcaaaaacagcccgtgcagtattacatcgtctatcttttatgaagtgagcctcatccaggataacacgctcccaccgcacagaatgcagaggagattggccccttaactgtctgcccagttcatcagccaactcttgaaaatccttattcacctcatcacccttcttatgaaccctcctcttctccttcaccttttccttgctgctgtcccacttcctcttgctctgctgcttagcctgagcttctgtgcgtttagcattaggcccacagtgatacatcaagtgcaccttcatcttgttggggtagaacaatttattgcagtattggcaccgagtcttgggcggcatgatgtgcttccggtagtccgcctcaatggtagagtaggtggtgataacaaagtcatagctgttgaaatcgaaactctgagtgacacgcttggcaccgtggtagatgagcacgcgcacgctgccactagcagtgtggcgttcgatctcctcagtccactggatgacggccaccacagggcagacgaccagcgtgcacccgacctggggcttggtgcggcccaccgaggagttggacgaggaggcggcggagtgatggtccgggggccggaggcggcgcgcggttaggacgagcgagatagcctggatggtcttccccatccccatctcgtcggcgaggatgccgccccgcgtgacggacgcctcctgcgcgagcgcccaagcgagccactccttctggaaacgcagcaatcggagcaccacctccggggccgggtccgcggtcggcacggccgccaccgtggcgtccgtggcctcgacgcccccgtcggctgcgttccgctcgtcgagccaactgtcgtttgccacctgccactcttcccatggcaggggcggcgcgtccctcctcgccttcttacctcgcctcctcttctccctcctgttccgcgcctgattcttaatccggatcggcaccggcggcggcagggccgcctcgggcaccgcgggcgcgggcggggtgtccttatcgggcgcgaactcctcgtcgctgtcgtcgttctccaccgcgtccccggagtcggcgacgaaatcggtgtcggaggtgtcgt

SEQ ID NO: 3622 - DNA, 1484 bp, Zea mays
  Clone ID: TF_ZmC35142_1
agaacaaatgcttccacggaagaaagagaagagcatttatgctaacatgactgaggttcagaagcgaatccaggatcacttagttgagaaaacctttgatgtctacttgaatgatgaatcagatattgtgttgcgtagacctggcatcaagacaaagctaaatagtctctttattcaattgaggaagaactgcgcccatcctgatcttttggaagctgcatttggaacaacaagcctttatccacctgttaataagcttttagagcaatgtggcaaatttcagcttctggacaggctactaacttccctacttgcacgcaagcataaggttctaatattctcacaatggacaaaagttttggacattcttgagtattacctagattcaaaaggccttggggtttgcagaattgatggtagtgttaatttggaagagaggcggcggcagatagcagagtttaatgatttgaatagcagtctgaatgtctttattctgagcacacgggctggcggacttggtatcaaccttacttctgctgatacatgtatcctttatgacagtgactggaatcctcagatggatcagcaggccatggatcgatgccaccggattggtcaaacacgcccagtgcatgtatataggctggctacctcatattctgttgaggagcggatcatcaagaaagcttttgggaagttaaagctagagcatgtggtgataggcaagggacagtttgaacaagaaagagcaaagcctaacgctttagaggagggggagctgctggcgctgcttagggacgagcaggacgaggaagatcggatgatccagaccgacatcagcgacgaagacctcttgaagctgatggaccggagcgacctgtccggaccacctggtgctgccgatgccgctccactgatcccgctgaaaggccctggctgggaggtcgtggtcccaaccaagagcggtggcggtatgctctcgtcgctcaccagctgagcgatgccggcaccatgtttggggtgcccattttgctagtcactcatcatgtggacgatggggcgcttgttggccggtcgccgatcaggcggatattttgcatgtatgcccccctacaaactgttgatctgggtgttgagcctgcaacagtagggttaggttatttcctcccgtgtccgtgccagtgacacgcaagtcggattgagttatgctgtgaacttctgatgagtcgctgcaagctgcctttctgacttgagctttttgctgcttctgttgctgcgttctatgatgtagtaacagtagctgatggtttacaccaaagcggagatggatgccctctatgatgtagtccttgctatataacttgaacactgatgtgattttctgtagtgtcaactgccatgctttataagttttaaaaaaaaaaaaaaaaaaaacgttgccccatttttgtgatttgtgtccgggtgtatggtgcccccttgtg

SEQ ID NO: 3623 - DNA, 2053 bp, Zea mays
  Clone ID: TF_ZmC3853_1
gagcttatctagtcggcggccgctcgcgatctagaactactcttttagcaaacacaagaaacctaaggccccacttattggaggaagcaatctaattatctgtccaatgacactaattagtcagtggaaggcagagattgaagctcatactaagccaggcactgcgaatatatatgttcactatggacaaaacaggccaaaagatgcaagcatcattggtcagagtgatattgtcctgactacatatggtgttgtgtcatcagagttttcaatcgatggttcaacagaaaatggggctttgtactctgtacattggttcagagttgtgcttgacgaagcacacatgataaaatcttctaaaagtttgatatccctagctgcggctgctctgactgcagatcggcgctggtgtctcactggtacaccaattcagaacaatttggaggatttatacagccttttccggtttctgaaagttgaaccatggaggaactgggctttgtggaataaacttgtacagaaaccatatgaagaaggtgatgaaaggggcttaaagctactgcagtccattttgaagccaataatgctgagaaggactaaaaattgcacagacaaggagggcaggccaatccttaatttaccccctgcaaacattgaagtaaaatactgtgttttatctgaggctgagaaggatttctatgaagctctatttcgaagatctaaggtaaaatttgatcaatttgttgagcaaggaagggttctgcacaactatgcttcaattttggagttacttttgcgcctaaggcaatgctgtgatcatccattccttgttatgagtcgtggggatacaaaagagtatgcagacctaaacaagcttgcaaagcgttttctgcgtggtggtaatggtgctgttaatggtgattcttgcatcccctctagagcttatatcgaacaggttgtccaagaattgcaaaaggatgaaggggagtgccctatttgtcttgaagcctttgaggatgcagtattaactccctgtgctcatcgtttatgccgagagtgtctcttatctagttggcggagtgcgacagcaggcctttgtcctgtctgtagaatgtcaatgagcaagcaggaccttataactgctcctactgataaccgctttcaaatcgatgtcgaaaaaaattgggttgaatcttccaagatatctgctctcctgcaggagttggaagctcttcgcagttcaggcgccaagagtatcgtgtttagccagtggactgcttttttagatctgttgcaaattccactttctaggaataatttctcatttgctaggctggatgggacgttgaatcttcagcaaagggagaaagttataaaggagttctcagaggacaaaggcattttggttctgcttatgtctctgaaggctggaggtgttggaatcaatcttactgccgcttctaatgcatttgtcatggacccttggtggaatcctgctgtggaagaacaagctgtcatgcgcatccatcgaattggtcaaacgaagactgtttctatcagaagattcatcgtgaagggcactgtcgaagaacgaatggaggctgtgcaggctcgaaagcagcgaatgatttctggagctttgactgaccaagaagtccgcactgcacgtatagaagaactgaagatgcttttctcctgagactacaaaagggctgttgtgcatcggatggtcggcaattcggcatggctaaaacaagatggctggtagccagaatgttggaaggtaagacgagggtaggaaattgcacgcccaaatatcttggcgtttagctgctgttgtgcgcacgatttgtacatcatgaatggttaatggctgacaagagtccaagacgcttcattgagtgaaaatcgaaagcatcatctcaaaattgaatatttctgtttgggttttgtataagtagataaactgaacatttgcagtaatacgaaggcagctacctgctcgatcattaatttaacaataaataaatttggtaaggtggtcaagtatacg

SEQ ID NO: 3624 - DNA, 573 bp, Zea mays
  Clone ID: TF_cC-zmpo148030a10a1
cacctttctgaatgatctacttgtaatgtaaatcttacctgcgtttgttactttgtgatctcctgtagtatatgggggaccgggctccgcaccctggaagagataagggtgattgcagcatttccgtaattgcattgctatgttcaacagacgtttgcgttctccaccaccattaaccacttcaagatccttctgcagtaaagccttgtagtactgtttttgcatttgagacatgccaactttgagtattgtctccttttttggaggtaagcctttctctacatctgattttaacctccgaagaagaaatggtcgcagaacctacaaagatgaggtaaatgattagcataagaacttagagaataaccttgataaaatatgagtacataccttgtgaagttgttgaacaacttcttgctggtcgttttcaccagaaatttgaaaccactcgtcaaaagtttctgctgaactaaaaacctcagggagaagaaaattgagaaaggcccacaattcatggagattattctgtagtagaaacatatgaaatgaatacaatattaactcaagcaaatc

SEQ ID NO: 3625 - DNA, 365 bp, Zea mays
  Clone ID: TF_LIB3159-002-Q1-K1-E3
ggctcggcaagactctccaggcgattgctatagcatgctgtttcaaggacgagggctctatattgatagtatgtccagctgtattgcgttattcttgggcagaggaattggaacgctggcatccttcatttatgccaaaagatattcatattgtatttggtcgtcaagacagtcttgaacatctaaatgctactccaagggcagtgattatatcttaccagatgctaagtcgccttagagaaagtatggtgaatagaacatgggcactgatgattgttgatgaatcacataacatacgctgcacgaagaaactagaagaaaaaatatgagacaaaaagctgtgctacatctagctttaaaaactg

SEQ ID NO: 3626 - DNA, 973 bp, Zea mays
  Clone ID: TF_ZmC41243_1
aattcggcacgaggggttgatgaagcccaccggttgaaaaattgtgaagcatcactatatactacccttttggaattcagcactaagaataagctgcttatcactggaacacctttgcagaacagtgtggaagagctttgggcattacttcatttccttgatccagttaaattcaacagcaaggatagttttgttgaaagatacaaaaatttgagttccttcaatgaaaccgagcttgcgaatctgcataaggaattgaggcctcatattctaaggcgggttataaaagatgtcgagaagtctttacctcctaaaattgaacggattctacgtgtcgagatgtcaccccttcagaaacaatactacaagtggattttagagcggaatttccagaatctaaataaaggagtccgtgggaatcaggtatcacttttgaacattgttgttgaattgaagaaatgctgcaaccatccatttttgtttgaaagtgccgatcacggttatggtggagatagcattggcgatcggaataaagttgaacgtattgttatgagtagtgggaaacttgtcttgttggacaaactattggtgagactgcgggagactaaccatcgtgtgcttatattctcacagatggttaagatgttggacatccttgcagaatacctctctcttcggggatttcagtttcagaggcttgatggtagtacaagagcagatcttcgtcatcaagccatggaacactttaatgctcccggaagtgatgatttctgttttcttttatccacacgtgccggaggacttggtattaatctagcaactgcagatacagtgataatttttgattcagattggaatccacaaaatgatttgcaggccatgagtagggcacataggattggccaacaggagacagttaatatctaccgcttcgtcacatgcaaaagtgttgaggaggatatttggaacgcgc

SEQ ID NO: 3627 - DNA, 1875 bp, Zea mays
  Clone ID: TF_ZmC506_1
cccacgcgtccgtcttgggtgacacaactggaggaacacttgaaagcaggcagcctgaaagtctacatgtaccatggcgagcggacgagagataagaaggagctgttgaagtatgacctcgttcttaccacctacagcatcttggggacagaatttgagcaggaggactcaccggtgaaggatatcgagtggtttcgtgtgatcctggatgaagcccatgtgatcaagaactctgcagcacggcagacgaaggcggttatcgctctgaatgcagagaggcggtgggtggtcactgggacacccattcagaacagctcatttgatttatatcccctcatggcatttttgagattccagcctttctcaatcaagagctactggcagagcttgatccagcgccccttagagaaaggaagtaaggctggattgtcacggttgcaaaacctcttaggtgctatttcattgcggagaatcaaagagatggacgatggaaacaagagcatggttgaacttccctccaaaactgttttggcatgttatattgatctttctgcagaggagcgtgaatactatgatcagatggaacaggaagggaggaacaaaatgcaggaattcggtgacagagattcgattctgagtaattactcaaccgtgctttatttcattctgaggctccgccagctctgtgatgatgttgctttgtgtcctttagacatgaaagcatggtttcctgcaagctctatcgaagatgtgtctaaacacccagagctgttgaagaaactggccttattggttgatgatggagatgactttgactgtcctatttgcctctctccaccaactaaaactgtcataaccagctgcactcacatatactgccaaacctgcatcctaaaaatcctcaagagctccagttcccgctgtccaatatgcaggcgcaccttatctaaagaggacctcttccttgctccagaggtaaagcatcctgatgaagatggttcaggcaaccttgagtctgacagacccctctcatccaaggtgcaagcactgctgaagctgctgacggcttcacagaacgaagacccctcatcgaagtctgttgttttttcccagttcaggaagatgctgatcttgctggaagcgcccctcagaagggcaggctttaagacactacgcctcgatggctcaatgagtgcgaagaagaggctgcaagtcatccaagaattcagtcacggtggctctgactccccaactgtgctactggccagtctgaaagccgcgggagccggcgtgaacctcacagctgcctcgacggtgtacctgttcgacccctggtggaaccctggggtagaggagcaggccatggacagggtgcaccggatcggacagaagaaagaagtgaaggtgataaggctcatcgtgaagggcagcatcgaggagaggatactggccctgcaggagaggaagaagcggctgatcagcggcgcattcgggaagaagggaggcaagaacgagaaggagatgcgtgtcgaagagctccggatgatgttgggcctaggtaagtaaggaaaaggctggttggtggtgataggaggagtgatgcttgtgttgcttgtgatatagctctggcggtagaagttgtagctagggcgatggagtttcagtgtaggcatagggtagggctggaagaaaacgaaatccaggcacgcgtgcatgtatctctgatgctaaacattagcactagatcagtgctaaatgattgggtcctcacttcctcagctgtgatggtcaattactgaacacggtcaaatctagtagtagctgtgctaaatgaattgcgtttgcagctttcctattcaaaaaaaaaaaaaaaaa

SEQ ID NO: 3628 - DNA, 371 bp, Zea mays
  Clone ID: TF_LIB3079-023-Q1-K1-H5
acgcatcgtgaggccaccttctacaagcgcagggactgtctcttcaagaaaggtggggagctctccggtctgtgcgacgtcaacctgctgctggtcctgtcttccacctgcggcaagctctaccactacctctcggccaccgttccctacgtcgaggacctggtcgagaggtacgagggcacgacgcacaccaagggctgtaccgacatccgtcaagagcggcgcgcgcagctggcgaaggcggagctgacgtgcgagctgatggagaaagagctgcgggtcatgacaggggacgacggatagcagtacactgtgcccactgttgagctgcttgaacacaaactggatgcagccgtgcacaaggtgcgctc

SEQ ID NO: 3629 - DNA, 569 bp, Zea mays
  Clone ID: TF_LIB3206-120-P1-K1-F1
gccgggcgtgcgcagcgccgcgcgtttgcgagtccgggacgactacatggggaggggccgcatcgagataaagcgggtcgagaacccgacgcagcgggagtccaccttctacaagcgcagggacgggctcttcaagaaggcggggagcagtacacggtgccgtcgctggagctgctggagcacagcctggaggcggccgtgcacagggtgcgctccgagaaggaccgcaagatcggcggcgagatcgactgcctccagaacattatcagaggacgccacgaggagcgctacgggttgtgcgacaaggtaagcacacgattttgtgagctacagacgctcagaacgccccgagactgcacttaataagtatacatttcttgcaccataaaacgtagcgtcgtgtgagcaacttaaattacttgcgtacatttctttggctatatataagaacatttcttcatttgcttgcaccatacaaaacaaccgaagagatggttcatagcaggcaaaagaatcttcctgcgggcctgcctatggctttgcccgctagcagataaacaacctatctg

SEQ ID NO: 3630 - DNA, 345 bp, Zea mays
  Clone ID: TF_uC-zmflb73275a12b1
tggcgctatctacactacgatttagcacgggaccatggggccggagaggagaagctagctaactaggagcaactctgatggtgagagtgcgagaggaggggatctgcagccggcgctggatggaaaaggagagagaaacgacggggggtacgacggagctacagcggatcgagaacaagagcaaccgtaagacaactgaccccaagcgcccgagcgatctgctgaagaaggagcacgagcactgacggctctgcgacgaccgagctgcgcacagggtctgctgcagccgctgactgctataccagctctgtacgcggactaagcatgacgagaacacttgagagg

SEQ ID NO: 3631 - DNA, 298 bp, Zea mays
  Clone ID: TF_LIB3245-361-P1-N1-B8
aatttcgatggcgcaccctttactatccacaccactaacgcggtggttcactcaatggatggcgaaaaccttacgcagataaaagcaggcattcgctagcgcttaactctcgctgccctacggatctgtttgggagtggataactcagtatggggcgcccgaagaaccaagatcaaaattattgagaactctaccaacccccaagtgaccttctccaaactccacaccggactggtcaataaggcacggaagatctcctttctatgaaacacctaagtccgcgtaatcatcttctcca

SEQ ID NO: 3632 - DNA, 176 bp, Zea mays
  Clone ID: TF_LIB3279-011-P1-K1-D3
cccacactttcaccactaccaacctagcgtctccaggctcctgctcaagaaggttagaagaggggagccttccttgtgaagtcgctggttgtttataatgtgcacatagatggctccctggaagatcgatatcaagcggatcgagaacttcaccaaccgccaggtgacctttttca

SEQ ID NO: 3633 - DNA, 621 bp, Zea mays
  unsure (1)..(621): unsure at all n locations
  Clone ID: TF_LIB4764-056-R1-K1-E5
ttgggaccctcgaggccggccgggacgncgncggggcncacgagctcccgggtgattggcttggctcgcacggggtcgatggctcccctccccttccttccccactgatacataccatcaggtgttcacagccgagccgaactctacgaggcccgattgcaagtcttccaccaggacagcctcctccaacatggggagggcccgcatggagataaagtggatctagaaccccacgaagtggcaggccaccttctacaagagcagggtacggcctcttcatgaaggatagtgacttctccgttctgtgggacgtggacctggtgttgttcctcttttctacctccggtaagatctaccactacctctcgaccaccgtcccctccgatctggacctgatcaacaggaaccacgtcacaacgcccaccaagggctgaaccgacatccgccaagagagcagctggcacttgaataaaggcgatatcaaatgttacatgtgatgtaaaaagagctgcgcttcttcgacggtggacgatcggagatcgatacacggtgcacatctctggaactgctgcaacacatctggattgtgccgagcacatggtgccctccgataaggaccgc

SEQ ID NO: 3634 - DNA, 324 bp, Zea mays
  Clone ID: TF_LIB189-006-Q1-E1-G12
gctgcaacgatgcaggtcactttcaccatccgccgctgcggcatcttcatgaaggtttaagagctctccgtgctgtgctataccgacgtcgcgctcatcctcgtctcctccacggggaatcgctcgtaattatccaactgcaatatggatgagataattgacaactacttcacacattgctattttcgtgcgggacaacagagcagacttcgctggactttaacttatagcatagcatatatgtaaatttgaatgaccagcttgcggtaccaagccttcgactcatgcagattaaaggtgtagaacttgatggatttaatgttg

SEQ ID NO: 3635 - DNA, 387 bp, Zea mays
  unsure (1)..(387): unsure at all n locations
  Clone ID: TF_LIB4862-001-Q1-K1-E1
gcgcgagcgagagagggacggcggccgancnggcggcgcaggcggagggcncggccggggccggcaagncggcgccgaacaaggggaggggccgggncgagcncaagcggancgagaacaagancaaccgccaggncaccggggcgaagcgccgcaacggcccgcacaagaaggcgnacgagcncncggggcncngcgacgccgagggcgcgcccancancnncnccaaccgcggcaagcncaacgagnncnccagcacgcagagcangccaaaaacacnngaaaaggaccaaaaangcagnnnngcagggcccgaaacagcacnccagaacagagagaangagcaacngaaaagcagccgcaaggaggaccncaaacngaaggcac

SEQ ID NO: 3636 - DNA, 608 bp, Zea mays
  Clone ID: TF_LIB4756-102-R1-K1-E10
ctcgaggccggccgggaccgtatccaactacgacttgctctcgtcgcctggtgccttcgctgatcaactgcctcttcccggcctctgtaactagagaggtcaggacatggcgcctctgttctttggctctcttggtgcaactgtcttcgtcgtcgatgctgctgtgagtgtgaccatgagactgagattcaccgccggggactatgtccagaaagacactgaagacaacgaggagagagactgcgacagcggcctggtcgccgttctccaacgtcctgcgcctcctcttgctgaaggaccaagagatctccgtgctctgcgtcgacgacgtctggctcatagtcttctcctcctgcaccaacctctcccagatcatcacgctccttgacgaatgatgtaattgacgaggaccacacgcattctagaaacctggggaaaacacaacacttcttccgctggaattgcacttagagcatagccaatatgcttgtgtgaatgttcctgttgcggaagcatgccttctactctgctagatgacacgtgaatagcttgagggattgaatgttcaagaactccacagattggagactaatctggcatctggactg

SEQ ID NO: 3637 - DNA, 611 bp, Zea mays
  Clone ID: TF_LIB4764-131-Q1-K1-B12
cctcgaggccggccgggctggtatttcccactttgcttgcaggcccctgaaactgataaagaaggcacaagcctgcgatctccagcatggcgaggagaaagattgaaatccagaggctcaagaaaacacgacccgccagggcacctattgcaaacgccgaagagggctcctctagaaggcctacgagctctccgccctatgatacgacaaggtggcgatcgtcaccttctccctatgtgttttacctctactagcacgccagcaacagagtgtcagggtacctctggagaggaactcgagggttcacgccggatgtttcttcctctgaaccaccgctctgtagagtacagtggccacgatctcctcgctgatgaatctcgcacaagtgtccacccacattccgatgttgttcaacgctactctggactggtatgcagcactctgtgcagaaacattgtcgctcagagaatgtgtccagatgtcagagccgcctgtgatagaggcggtctctgaagatctgctactcgatacagtgagctgttagggtgccgccatctgttacatgtcacacatgagatagtgagcatttctactgaccacaatgactctca

SEQ ID NO: 3638 - DNA, 487 bp, Zea mays
  Clone ID: TF_ZmC733474_1
ggagagtctgagaccgagagagggacgatagaaggcataggagctaggagcgatgaccgtacgcgcatatactaggagcagcaaattaaaggcatatatagacaaatagtagtagtagcgagtagcgacgggcgagagagaaagcagtgctactgctacgactactccttagctcgtagccgggtagaaggtgacgagagagagagagagaaagggggagagagatcttgatctagttctagtagactgctagcagtgaacaggcccggtggaggagctgaggtagctgggaaggagaaggaaggaatcgaagaaaaaggcagcaaaacaagcaggatggggcgcggcaaggtggagctgaagcggatcgagaacaagatcagccggcaggtgacgttcgccaagcgccggaacgggctgctcaagaaggcgtacgagctgtcggtgctctgcgacgccgaggtcgccctcatcatcttctccagcc

SEQ ID NO: 3639 - DNA, 763 bp, Zea mays
  Clone ID: TF_ZmC32383_1
cctgttcctttccttcccagggcccagcagcgtgaagtgaggccagctagccttatcagcctatggcggctcggattggagcggacgggaaggcgatggcacgccgcggccgcgtggagctgcggcggatcgaggaccgggtgagccggcaggtgcgcttctccaagcgccgctcggggctcttcaagaaggccttcgagctctccctgctctgcgacgccgaggtcgccctcatcgtcttctcccccgccggcaagctctacccgcgtggagctgcggcggatcgaggaccgggtgagccggcaggtgcgcttctccaagcgccgctcggggctcttcaagaaggccttcgagctctccctgctctgcgacgccgaggtcgccctcatcgtcttctcccccgccggcaagctctacgagtacgcctccaccaggcaaaaggcgtggtgcgtcacttatccattcaaacacaggaatttgttgcaatcacgggattgtagaagaaaactacaagatgtgatgatgctgatgctacataagtcatgctaaaatgtctcgtttattgaagtattgtatctcaaatatattattttttaatttctttatcttgtagtttatatttgagattttattattatatttagtcactgcacactctcattaaaagagtaacgacctttttggtgactaaagatgcttatgaagaagggagattgctattaaaaaaaaaaaaaagggcggccgcccgcgatctagaactagt

SEQ ID NO: 3640 - DNA, 368 bp, Zea mays
  Clone ID: TF_jC-zmX700335674a1
gtgacccttatcaacctggaggcttgtttctttctagtgggcggctgacagcacggatcgatcgaggaagacgagacacgctttttattctggtgtctccttcgccaggtctagctcaccacgtgttactctccaatctgacaccgaccgcacatggtgcagggcatggagcaacttcagctccacgtgaaccaagtgcaccgactggcaacactgtgaaagcaccaagctgggcatgtcaagaaggccctggagctctccgttctctgcgacgccatcgtgtgaatcatcgtattctacgggcacggcatgatctacgacctagccaccaccgtgaccatagaggagctgatcgagatgtacaaggc

SEQ ID NO: 3641 - DNA, 610 bp, Zea mays
  Clone ID: TF_LIB4766-025-R1-K1-H7
cattgggtacctcgaggccggccgaggcctttcaagcaagcgcctcacaaggaaaagatctcctagcagctagccagctacagcctacagcaagagatcggcgcgttgattgcttggatcgaccgaccggccggggtggtcgccatgggacgcgggaagatcgagatcaagcggatcgagaactcgacgaaccggcaggtcaccttctccaagcgccggggcgggctgctcaagaaggccaacgagctcgccgtgctgtgcgacgcgcgcgtcggcgtcgtcatcttctccagcaccggcaagatgttcgagtactgcagccctgcctgcaggttggttacgctagctcggcgctagcttcaactgatggctcatgatcctgcttctgttcgatctgcgttctgcccggccagtccccatcgaccagatcttatattatcagtgttgctagctcgctcatgcgtgcatgattcttgatcttgatcccgatgaaactgccgatcgatccgtgtcttctttgtccttttgtttccccaggcttctcttctaccttgttttagggctttgcagaaacaatcagttactgaaaaaaaaaaaaaaaaaagcggcc

SEQ ID NO: 3642 - DNA, 958 bp, Zea mays
  Clone ID: TF_ZmC21289_1
cccagcgtccgcccacgcgtccgtgttcctccgattaacggaccggccggcgacgtgcatagcaggtacgcagcagctctagctagcaatggcgcctccccgccggccgagcatggggcggcagaagatcgagatccggcgcatagagagcgacgaggcgcggcaggtgtgcttctcgaagcgccgcgcggggctgttcaagaaggccagcgagctgtccatcctctgcggcgccgacgtggccgccgtcgtcttctcccccgccggcaaggccttctccttcggccacccgtccgtggagtccgtcgtcgagcgcttcctcgcctcgtcgtccccctcgcctgccggtgccggtgccggccactccgccagcggcggcgaggaccgcgcggtctcggagctgaaccgccagcacggcgagctgcgcgcgcagctggacgccgtgaaggcgaggcaggagcgcgcggacgaggcgatccggaaggagcgcgaggcggggagcccggcgatggcgtggatcgacgcggaactgagcgggggcgcgatggggcacgacgacctggtcgcgttctgggccgcgcttgcgggcgtgcaggccgccgtggcggccagcgccgaccggctgctgcgcgacgcgctgctcgtcgggcgcaggggccggcagcagcagcagccggcccagcttgccgggggtggtggcgtggcctttgacgtcggcgcgtttggcggcgttggcgtgcaggtgcagccgcctccgggattcgccggcgtcgtcgacctgcaggggttcggggggcaggctgcggccatcctcggcgccggcggtccctcatgagtgatcgaatgcgtgtgtgcatacttcactcaagttgtttggagataacgtcgcaaataaatttgcgacaaatgttttggttaatttgttcgtatgcattgttcgttctcaccttgctctatt

SEQ ID NO: 3643 - DNA, 961 bp, Zea mays
  Clone ID: TF_ZmC786_156
gccggcagggccggagccgccatcgggaaaccttcactccttctcctactcgatctatagctatgaagatcatatcgtacatctgcgtcgtctcctactcgatctatagctccttcgtcccccatcttcagaaattggaatttcttgcagtcgcttcgctggttctgctctctagcttttaactcgttcctgctctttcttcagaccgatctgagttgcgggccgtcgtccaaggcgaaaggaggacagccggcagcgacgagctccggcggcgacaggcaggggaggggcaagatcgagatcaagcacatcgagaacacgacgaaccggcaagtcaccttctgcaagcgtcgcaacagcctgctcaagaaggcgtacgagctctcggtgctctgcgacgccgaggtcgcgctcgtcgtcttctccagccgcggccgcctctacgaccttgctggttacacagaagacgcatttggcttgttggtgctgctcctcgtgcgagagaaggagccagtagtgccaccactgtccagcagcttgaggacttcaaggtcggtggctagtgcagcccccgcccaaagcttagctgacttctgcaaggattcctcctcttcagctgcacacggttcgacatgccccgtgcctactatcactctcgatttgaagaagagtctcaagattctgcaagtgttgtgttactcctaattcagttaccttactggcaataggatgccattgcaacttctgaaagtgcaaccatctgattgaagcggatttaattatacaagatagatctagaattgctttacttgagatccaagcaatgttggatgcttttgtgactgatcatctctagagcttttgtaaatgatctagctagctatctgtaaatgatctagttgtgaatgatattataattgtgatgcttttgtgaatatataattgtggtgcttttgtgttt

SEQ ID NO: 3644 - DNA, 312 bp, Zea mays
  Clone ID: TF_LIB3245-589-P1-K1-B2
gtgtctgcgtcgtccactgagatcagggatcggcggcggggtatggcgagggagcgacgggagataaagaggatagagagcgcggcatcgctccaggtaccgttctccacccgccgccgcttttttttcacgtatgctgctgagctctccctgctctgcaatacctccttcacgctgataggtttgtcctacacggggtagctctcctattccgcccggtccattatgtataatatcaccctcaaacccgacttacattccaaaaatccacccatggacaaacatccttcacttgacttgaacttagatcat

SEQ ID NO: 3645 - DNA, 287 bp, Zea mays
  Clone ID: TF_LIB3116-001-Q1-K1-G1
ttattccatggtttcttttgcataacttcacttgtctatttgattaattctctatcctctttatctctatctttcctcttcccatccttcatttttattcaaacccatcaagatatataaataactacctatatataaattataaatacactaaaaatctctcaatttatacattattgaatacataaaatactgctcaacatacaaacatattattttatatactataaaatacttctaaatatattttataattttaaacttttatttaacataaacccttatct

SEQ ID NO: 3646 - DNA, 412 bp, Zea mays
  Clone ID: TF_uC-zmflmo17001d12b1
tattttgagggatgctgcgcctgctggagccgccgcgcacagttattgcggggtcccacgagtccttcttccactcctcccacgcctcctggctggtctcattgcgcttgataatagacgacggctagctagcagcagctctgttggtgtgtgtgtgcgtgaggggggtagctgctgctggcgctagctggaaaggtccgcagtcatggggaggggacgtcttgtgctaagctaatcgggaacaatatcacccttctgcacaccttgcaccaagcgccgaaacgtactactcaagaaggcttgcgagctcttcgtgctctgcgacgcccaagcattgctcatcgtctactccaaccgcggtaagctatacgagttttgtcacggaccgatactaacgagaacacttgtgagg

SEQ ID NO: 3647 - DNA, 1449 bp, Zea mays
  unsure (1)..(1449): unsure at all n locations
  Clone ID: TF_ZmC1408_5
cgtgcgtgtgtgtgtctgcgcgctagnttagnacacctccatcgtcaataattgcaggcagatccatatagtctgctggtggcgagacaaagcaacggatcgtcgtcgatccggagagcggaaagcgcgcagatcgcggcggccatggggcgcgggaaggtggtgctgcagcggatcgagaacaagatcagccgccaggtcaccttcgccaagcgccggaacggccttcttgagcaggcccgagcgagatccaatctgcaccccacgaacgaaaagattcttccccgccggcgtcgctctctcatccgtcgacgtctcgctccttccttcctctctctctctcttctcttctctctctctctctctctttctctctctcagccagcagcaatcatatagcccagcaccaccacatgcccaagggccctccctctcgctcggggtcgagccaattgagtggcagcgccagaaaaacccagagcgcgagcagcgagcgcgagcgactcggcagcgagcgcgggctcctgtgtgcgtgtgtgtgtctgcgctagagggcgaagggcacggaccgccttcgtcaataattgcggtacgaacggggcaaatccgtcgtttaaagaggtcgctgatagcgcctgctggtggcgagagagaaagcagcagaatcgctgagggatcgtcgatccggagaggcaaaaaagccgagagatcaggcagggcaccatggggcgcgggaaggtggtgctgcagcggatcgagaacaagatcagccggcaggtgaccttcgccaagcgtcggaacggcctgctcaagaaggcgtacgagctctccatcctctgcgacgccgaggtcgcgctcgtcctcttctcccacgccggccgcctctaccagttctcatcctcctccgatctgcttaagactctagagcggtaccagaggcacatctatgcttcagctgatgctgcagttccatcttgcgatgagatgcaggtgcgcggactatcgattttactactattattgcaacattttaatatatgtggtactactttttgtatcatgtgtaacattatccatgttctcaaactgtacatatcaggttaataatttcttcaaacacgatcgcttgtcaccagctaataatgcccttcacaataacaaaactataagtttatgtttattttcttattatttatcattgatttgttctgaaaacacttgatcaccaagccgtgcatttgtatttcagtattttatttctgaagcaatgattttcatcaaaacaaattcagtataagtctaagtactagtgaaaattcttgctcaatttggttgtacaagaactactgttagtttaggcgctttttgctccaatacttaggatgacacagtcaaatgcgcaacaaaactgctgtggctttaattcatataatagntcttcttgaagat

SEQ ID NO: 3648 - DNA, 1456 bp, Zea mays
  Clone ID: TF_ZmC1460_1
accgcacaaattgaaggagaccctcggcacaatgggaacgagacccaactaatcggaggttgaattcagggatcgttggaggaagaggacacaagctgattctgcttcttcggctcccgcagccgccgccagctccgctccagctcaccatgacttactagccaatctgacaccgattcacacccggcaccgacggcgcatggcacggtgcaaggtgcgggttcggcgcgtccagagccccgtccaccggcaggtgacaagcgccgcgcgccgctgcgggctgctccccaaggcccgggagctctccgtcctctgcgacgccagcgtcggcatcatcgtcttctctgcgcacggcaagctctacaacctcgccaccaccgggaccatggaggagctgatcgagaggtacaaggctgccagcgccggagaagcgacgaccgacggctgcggcaggcacaacaggatggaccccaaacatgaaaccacggtgctgcaacaggaaatcaacctgcttcagaagggactgaggtaaattgtttgttactcacagctttgccttgcagttccccccctgtacaaatcgcctacaggtaaatcagtttgctttctgaagaataaactgctgctgcacccagtcacgcaacatgtcaatctaaaaccaaggcatttaagcaaaaggaatggagagacagaccttcattgattctaacaagaatgactcggtacaagaaatagagaagaattgttagaagaaaggaagcattgtggtcggtaggtaccactacgggagctggacgaacgtgcacatgaatgatgacgtgatgaacgctcatgagctgtacttgctgatagggttgtacaacagccgctctgcaaagatgcagataacggctcaagagtaccaacaaccaaaaaggaaggtatgtcagatccctgttcctattgactctacgaagcaccgaggcttttagcacccatttacttcactaaaagtgtctgcgtgtacgcaggaaggcatgttgaaagctgccaacgagattctccaggaaaagatagtagagcagagtagtttgcttgacgtaggcatggtggtagcggaccagcagaatgggcgttttagcacagtcccactggtagaagaggtgatcagtagtaacccactgactatactgagtggctattctagctgtaggggttcagagatgggctactccttctgaccgtaataacaaataccctgggggctccttctgttgattactagtagtgtgtaatacatacagtcaataatgtctattcgtatcatgtaggccttagataagcccttcaggagtgcccctggtattgtgtcgtcgtgccttctacttttccagaatgaagaaatattgtctattgaggagatctgatgctgtgctatttcttccttatcaacggaaatatatctatgtttgtgttc

SEQ ID NO: 3649 - DNA, 1119 bp, Zea mays
  Clone ID: TF_ZmC497_1
gccacaacttccaccgctttctggctttcttctctcttctcaccgtgaatttgttccgatcctcttatggttacgacccgcctgccgtccgctgccacacaacagcggagttagtgactacgcaatcggtcgagctcgtcgtgaggctcttccgctcttggtcggtggtgctgtttcgcgtcctgggaaaaatggatgcggaggcggcgagaaggaagcaggtggcgcctccgcaggagaagaggaagcgcggccggctggagctgcggcggatccaggaccggacgagccggcaggtgcgcttctccaagcgccggagcgggctgttcaagaaggcccacgagctctccgtgctgtgcgacgccgaggtcgcgatggtcgtcttctcccccgccggccgcctctatcactacgcctccctaggcaccagcattgagaaaacattttgtcgttactgggaccttgccaacacagacattgatctcaatatcgaggcgcgagactcgagggacaactataatacacagtttcctgagaatggccagccagctgaaggctcgttatctgacctgctaattatgatggatcaatggtctatggaagaaaatctgaatgggctgagcatggctgggatagcaggcttggaggaagcattaacagtcgctctggcagttatcaggaacaagctggcgatgaaggtgactgggtgcggtgggcctaaacctgaagcacacacgctctttcagcggcggtaagaaggaagtaacaaaactgtattatactagcatctagctctggttctacaaatattggtaattctccagtgctgcagtacatgaacatataaggccatatgttcagagaggtgatggtttcttactgtcatgtaccgcgtgtttaattcatactggtgactggaaagaggaggaggcagctctctaaagtcacaactctgaacgtatggcttttaattcatactggtgcctaagcttggtcgtggctttcttgatcacaaagagaaagctctctgaggaataaagggggggccctcgtagacaggcgttgtgtaactggttctgatggcactacagtatataatttctctcaaacatttccacc

SEQ ID NO: 3650 - DNA, 1037 bp, Zea mays
  Clone ID: TF_ZmC497_2
attggtacctcgagccggcggggccagcctggtatacccaccctctcagcgcaccagtaggtgctgtgccatcagatcctccaggccacaacttccatcgcctctctctctctatctctctctatctctcttctcaccgagaatttgctccgatcctcttatggttacgacccgcctgccgtccgctgccacacagcagcggagttagtgactacgcaatcggtcgagctcgtcgtgaggctcttccgctcttggtcggtggtgctgtttcgcgtcctgggaaaaatggatgcggaggcggcgagaaggaagcaggtggcgcctccgcaggagaagaggaagcgcggccggctggagctgcggcggatccaggaccggacgagccggcaggtgcgcttctccaagcgccggagcgggctgttcaagaaggcccacgagctctccgtgctgtgcgacgccgaggtcgcgatggtcgtcttctcccccgccggccgcctctatcactacgcctccctaggcaccagcattgagaaaacattttgtcgttactgggaccttgccaacacagacattgatctcaatatcgaggcgcgagactcgagggacaactataatacacaggttaagcatataaatagttgatactatatcaatttactctcgtatacataaagcccatagttgtataagttctctttttttcactcacgtgagcaattctctggaacggttaatttaattgactatatatagttccttctacggcaccgtcgtatgcatggaaggataagaaatcgaaaacaagtggtatataatggattagaatatttatgatgataaggtactagataaaattacagtggtattcagaaaattattctacatatataacataaaatctcttggtgtcatggcggagataggacccatgaggcataatttgttccaaaaagatattagtatattattttctagacctaggggttatcttccaagctaatatacagttgcaagttaaaagtatcttcttttttcgc

SEQ ID NO: 3651 - DNA, 579 bp, Zea mays
  Clone ID: TF_ZmC497_3
acttccatcgcctctctcttctctctcttctctcttctcaccggatttgttccgatcctcttatggttacgacccgcctgccgtccgctgccacacagcagcggagttagtgactacgcaatcggtcgagctcgtcgtgaggctcttccgctcttggtcggtggtgctgtttcgcgtcctgggaaaaaggatgcggaggcggcgagaaggaagcaggtggcgcctccgcaggagaagaggaagcgcggccggctggagctgcggcggatccaggaccggacgagccggcaggtgcgcttctccaagcgccggagcgggctgttcaagaaggcccacgagctctccgtgctgtgcgacgccgaggtcgcgatggtcgtcttctcccccgccggccgcctctatcactacgcctccctaggcaccaggtgaagctactctccatcgtatgcatggttgagctggtgctttctgctgcttttgcttcttcttcttcctcgcattaaattttagatttattgcgttgacgaccgccctactcctactggagtagcttttgactcgatcgatatggataaactg

SEQ ID NO: 3652 - DNA, 791 bp, Zea mays
  Clone ID: TF_ZmC3515_2
gggtacctcgaggccggccgagcgtcccactgcccagccgctgtgcgttcgcgctctctcccacactgtctgcgacgactgcgtgggtgggtgggtgggctaccgccgccgcccgtcgccaggtgccgatctcttcaccggcgaagagcgtctgctagcgactcccacacccttgaccctcctctcgcgtctgccgtgcgagaacgtaccgccacgacgaacgatggggaagccgagcagggggcggcaacgcatcgagatccgtcgcatcgaagaaggcggccggctgcaggtgaccttctcgaagcgcaagtccggcctgcaaaagaaggccgccgagctctccatgctctgcggctcgccggtcgccgtcgtcatcttctcccccggcaggaaggtgttcgcgctgggcaccccctcggtcgaccacgtcctccgccgccacgctcctccgatccccggcgaaggagaggaggacgggctccttccggtgctccaggacggaaacgtcgtgatgagcagcagcgccatcgccgaccgcgcggaggtggagaacatcgtgcggcgtacggaggagaccaaggcgcgttcggtggcggagaaggcgcggatggacgccgtcgggaaggccgtgtggcaggccgcggcaaaggccggaaggaggttctggtgtgaggcggactccggtgagctcggggacgccgagctggcaggattcgccaaggcgctccatcggttcagggtcaacctgcagcgccatttggactcgctgtcggcgtctgctaataagc

SEQ ID NO: 3653 - DNA, 445 bp, Zea mays
  Clone ID: TF_LIB3076-018-Q1-K1-A4
ggccgacgccaagggccatggtgaagccttgaaagagaacgagcagggggcgccagaaagttgagatccgccgcatcgacaacaaggagagccgtcaagtcacccagtgcaagcgcaagggcgggctcctaaagaaggcctcggagctccatctcctctgtggtgcccaagtcgccatcatcgtcttcaagagaagggaccccgaaagaaaggaggtgcccgttccgccccgcggccaacgcgacgacggcggccttgccttcgcgatgggcaccctctccgtcgaccacgtgctccaccgctgtggcctgctccacgccgacgagggcctcaccgcgatccaggatgtgggcgccatcgtcgcatagcgtgccgctatggacgcgagagcggggcagaccgagcagaccatggcgctcgtggaggcggagaatgcgctgaatga

SEQ ID NO: 3654 - DNA, 596 bp, Zea mays
  unsure (1)..(596): unsure at all n locations
  Clone ID: TF_ZmC3479_1
ggagctctctatcctctgcgacgcggaggttggcctcatcatcttctccagcaccggcaggctctacgatttctccaacaccaacatgaaagctgtgatagaccgatatgggaaggcaaaagacgagcagcttggcaagaacgatgcaacttcagaactcatggtacggtgaggaaaatgtatacctatttctagctaactagcagttattggtcgtagtacacacgtgccatatgatgtatgttggtcggaccaagatcagaagtttagtccttcattactcacaaataatgacaatttgttgtgtttagctaatcagctagtcggctattcaaattttttgtgaaaggacatctagctgacttggttagttgatctgaatagcactcctcaggttctgagttcggcttctcgtggaagctcgacttcccgtgggagcgaatttcagtttttggggacatagattcgagggttttcttgaccttcatgagaatgtctttttagtataatgtatcggggctgccttaccacccatatgtnnnnaaacaagaaaatatttatgtattaagttagaaaaaatatttaaagttgccnct

SEQ ID NO: 3655 - DNA, 653 bp, Zea mays
  Clone ID: TF_ZmC1211241_1
tttttttttttttttttttgttcttttgtcggtctatttgttaaggatcaggttctctccctttttttttggcgaaaaaatgtaggcccctcagatatttgtttaatctgctcatacatctagctactagagatagcaagttaattaattatacgcaaagcaaattacagatctgttaaagttgaaccaagtctgttcatcggtaagaaattacatacagatatatgtctagctagctagggagagtcacgacgtagatgaatcgtacttggtgttggagaaatcgtagagcctgccggtgctggagaagatgatgaggccaacctccgcgtcgcagaggatagagagctccttcgccttcttcagcagcccgctccgcctcttggagaaggtcacctgcctgctcgtggagttgtctatcctccttatcactatcttccccctccccatccctccttctatctctcagatctagtctaggccggaccggatgggaaggaaggatcacacgggaagacgaagagctcgccggcggccggggggacgagcgatgactggtctgatgggggaattaaaggcggaagctatagcctagctactagaggccggttccattcctagccaccttccaaagagcggaacgggaagtgccg

SEQ ID NO: 3656 - DNA, 689 bp, Zea mays
  Clone ID: TF_ZmC1089_5
tgggaccctcgaggccggccgggtgtcgaaaaaatgtctgtgattttgttatatgaatgtaacgcgcaatgaaacatacaggactagctgcttgcttgacgatgcgtttgcgtgtatccgtataaattaaaggctataagccacatcgtatatgcgtaaaaaaaaaaaaaaaaaaaaaaaaaaaaaaaaaaaaaaaaaaacccatctcctgagtcctgcctgcgctcgcctcagctcctttcttccccgccccttggcttttgcttggttgcatcgggccggtcgagccggagaggaaaagctagctagcagctaccagctctcggccggcggtggtagtctgcctgcagctggggttagctgcaagggttgggagctagccatggggaggggtcgggtggagctgaagcggatcgagaacaagatcaaccgccaggtcaccttcgccaagcgccgcaacggcctgctcaagaaggcgtacgagctctccgtgctctgcgacgccgaagtcgcgctcatcatcttctccaaccgcggcaagctctacgagttctgcagcggacagagcattaccaaaacacttgagaggtatgaaaaaaacagttatggaggaccagatactgctgtacagaacaaggagaactgtgctgctgtaattgctgtttgattattattaattattaggggtt

SEQ ID NO: 3657 - DNA, 1011 bp, Zea mays
  Clone ID: TF_ZmC3819_1
gccacgagcgctgcggccctccaatttaaagcagcaacgacgggcaaagagcagctcggcgggggctgctgcagcgccgcgcgtttgcgagtccgggacgacgacatggggaggggccgcagcgagataaagcggatcgagaacccgacgcagcggcagtccaccttctacaagcgcagggacgggctcttcaagaaggcaagggagctcgccgtcctgtgcgacgtcgacctgctgctgctgctcttctccggctccgggaagctgtaccactacctctcgcccaccgtgcccactgtcaaggacctggtcgagaggtacgaggccgcgacgcacagcaaggtctgggccgacgttcgccaggagcggcgcgcggagctggagaaggcggagcggatgtgcgagctcatggagaaggagctgcggttcatgacggtggacgacggggagcagtacacggtgccgtcgctggagcagctggagcacagcctggaggcggccgtgcacagggtgcgctccgagaaggaccgcaagatcggcggcgagatcgactgcctccagaacattatcagaggacgccacgaggagcgctacgggttgtgcgacaagaacttcttgcaaatttggccgcagcttgctcattctcaggcctggaacaacggcggggaaggtggagggtcgaccccaccaagcggcggcggcctggaactcaaactgggattcaactgacgctggctggcttggaagctggaggatggatcgaagactatgcgctgcttcattgtaccctatcactctgtcaggctacctccccccctgcaccctgttggttatggtttaaaatggttgttgaccaaagttgtcctggatcaaacaaggctcagcttgatgttaatgagctgagggatctaatgtattattagccttatccggctcttgtttacgtgctcatgtatccatcgcaatccatgcacgttaggatagattgtctaaaatagttcaaatttcgtt

SEQ ID NO: 3658 - DNA, 236 bp, Zea mays
  unsure (1)..(236): unsure at all n locations
  Clone ID: TF_LIB4073-012-Q6-K1-E4
tctgtcttgcttgagctgagctcttgctgtctgtggacctctttgggagtggtgaacggaggatggggcgcggtaagatcgagatgcaagaggatcgagaactcgcaccaacagggaagtgaccttctccaagcgccgggccggactggtcaagaaggccagggtgatcggngtgctctgcgacggcggggtcggngtngtcattttgttcagcgggggctggctgcacgactact

SEQ ID NO: 3659 - DNA, 1173 bp, Zea mays
  Clone ID: TF_ZmC3515_1
ggccattgggtacctcgaggccggccggggactccgtcccactgcccagccgctgtgcgttcgcgctctctcccactctgtctgcgacgactgcgtgggtgggcgggctaccgccgccgcccgtcgccaggtgccgatctcttcacacccttgaccccctcctctcgcgtctgccgtgcgagaacgtaccgccacgacgagcgatggggaggccgagcagggggcggcagcgcatcgagatccgccgcatcgaggaaggcggccggctgcaggtgaccttctcgaagcgcaagtccggcctgcaaaagaaggccgccgagctctccctgctctgcggctcgccggtcgccgtcatcgtcttctcccccggcaggaaggtgttcgcgctgggcagtccctcggtcgaccacgtcctccgccgccacgctcctccgatccccagcgaaggagaggaggacgggctccttccggcgctccaggacggagacgtgatgagcagcagcgctatcgctgaccgcgcggaggtggagaacatcgtgcggcgtacggaggagaccaaggcgcgttcggtggcggagaaggcgcggatggacgccgtcgggaaggccgtgaggcaggccgcggcaaaggccggaaggaggttctggtgggaggcggactccggcgtgctcggggacgctgagctgccaggattcgccaaggcgctccgtcggctcagggtcaacctgcagcgccatttggactcgctgtcggcgtctgctaataagcaactgcagtaggagcggctgtgcaaactggctcatttcatttggtgttgcttaggcacttagggtatattactaatatttacaacgttaatatcatgctaaaagctaggtcttcacgcgtagaggcacgcccacggtgcatctcttaacactaaaagcgctactccttctcactccgcaagaagttttgttagcactttaagagcctgtttggttcgtgattaactgtgtcacactttgtctaaggttagtcgtctaaattgaagaactaaccttagtcataaaagttaggcaaagtgtggtaacttagtcatcaaaccaaacatgccctaaagctcgtgttgtgtaaggaaatcggcctgtaatcttcaactgaagagggtgagttggttttgggatcaggatc

SEQ ID NO: 3660 - DNA, 451 bp, Zea mays
  Clone ID: TF_LIB5116-070-A1-PF1-G2
gttacagcctttgcctggaaggaccaagaagaagaagaacagtatacgtgccacacaagccaagagaagatggggcgcgggaggacggagatgaagaagatccagaacgatgtgtcacggcgggccaccttcggcaagcgccgccgcggcctgctgaagaaggcgcacgagctcgccgtactctgcggcgtcgacctcggcctcctcgtcttcgacgacgacggcgccggcaagctgttcgactactgcgcccctaacacaagctggagcgagctaattgagcgctacgagagcatcaccaaacaccagttccagttccagggccaggggatacatcatgatgatcatcagcagcaaccgtcggcggatatcatcgcagggctgaggcgtgagggtgaccatctggaggccagcgtgacgaggcagaccggagaaaacctgtcatccactg

SEQ ID NO: 3661 - DNA, 706 bp, Zea mays
  unsure (1)..(706): unsure at all n locations
  Clone ID: TF_LIB4740-041-R1-K1-E12
actgttgtggtcaccggatgcgttgtgggatgtattttttagatcctccaggggccacaacttccatcgcctctctctatctctctctatctctcttctcaccgagaatttgttccgatcctcttatggttacgacccgcctgccgtccgctgccacacagcagcggagttagtgactacgcaatcggtcgagctcgtcgtgaggctcttccgctcttggtcggtggtgctgtttcgcgtcctgggaaaaatggatgcggaggcggcgagaaggaagcaggtggcgcctccgcaggagaagaggaagcgcggccggctggagctgcggcggatccaggaccggacgagccggcaggtgcgcttctccaagcgccggagcgggctgttcaagaaggcccacgagctctccgtgctgtgcagcnccgaggtcgcgatgggtcgtcttctcccccgccggccgcctctatcactacgcctccctaggcaccagcattgagaaaacaattttgtcgttactgggaccttgccaacacagancattgatctcaatatcgaggcgcgagactcgagggacaactatagacaccgtatcttatgagcaaggagcaccaacgctccttgcgcacaagatacgttctcacaactataatacacaggttaagcattaaaataagntgatactatatcaatttactctcgtatacat

SEQ ID NO: 3662 - DNA, 1121 bp, Zea mays
  Clone ID: TF_ZmC672_2
tcgggctcttcttttttaccctcgctggcgggtcgcctcacccgttcactccgtccatgacgaaacggcaagcgtcgccctctccaccgccaccagtccacctcctcgtcctcctccggtcacgcacgcagctagcttacccgccccgccactataaaaatccacctccaccccaccgcgcgtctacagttccacacacgcgtgcacgggcgggcaagcaccagaaaggaaaggcggaggccgcgcggcgggcgccagctgcagccaagagcccactagtagtagtagtagctagttcaccaccgcctgcttgcctcctttactttgccatatttgctagcgtttcctggattggggacgcttccgtttcgggaagccgtgaagggatcggccacgacgatggtgcgggggaagacggagctgaagcggatagagaacgcgacgagccggcaggtgaccttctcgaagcgccgcaacgggctgctcaagaaggccttcgagctctccgtgctctgcgatgctgaggtcgggctcgtcgtcttctccccgcgcggcaagctctacgagttcgccagcgccgccaggaccaaaagcctgaagaaaccgatgacagcatcgtacatgggggcaacgcggaggtcctgaattaatgcgcggccaatcggaggaagagtgagtggaaagaggcaggcgtgcccagtaactgtgggtggaaggattgctgctcatgggccatggctacaaacggagaagcgtcgtcatgtgacttctggtcgcttggcttgttcctccggcctgccaaagccacttttttcttggtttgtatttcggaaacaatcctttcttgtagtggtggtgccgattgacttttcttgcttgcgttatccaatcacatcatcagttccggacgagaaaaaaattgcgcggttgcgcctcgccgtcgctgctcatgcgttttgctgtgacgttggctacagtttgtagtagcatattaataattctttggttgggttgcctgcttttggtctgggaatatagtacatgcgatattgcgacactgtagtttcagcaagatctctataccttcgattttatgacgacaaaaaagtctgaatgtctag

SEQ ID NO: 3663 - DNA, 2015 bp, Zea mays
  unsure (1)..(2015): unsure at all n locations
  Clone ID: TF_ZmC672_4
gggaccctcgaggccggccgggacagttccacacacgcgtggcacgggcgggcaagcaccagaaaggaaaggcggaggccgcgcggcgggcgccagctgcagccaagagcccactagtagtagtagtagctagttcaccaccgcctgcttgcctcctttactttgccatatttgctagcgtttcctggattggggacgcttccgtttcgggaagccgtgaagggatcggccacgacgatggtgcgggggaagacggagctgaagcggatagagaacgcgacgagccggcaggtgaccttctcgaagcgccgcaacgggctgctcaagaaggccttcgagctctccgtgctctgcgatgctgaggtcgggctcgtcgtcttctccccgcgcggcaagctctacgagttcgccagcgccgccagcctccagaaaacaattgaccgctacaggacatacacaagggacaatgccattgtacacaattcctttcttgttttccacatcgtaattttcttctatttctttatccatatagaactttcttgtcatttcttgtttttggtctcatataatcaaggaaggggtataaactaaaatccagtcaaatttcacctataaaagaaagactactattccttagtaatgtataggaagaaggggtcatcttttttagggataggaaaatctcgtctatacggttcattctatatatatataatatttattttgtttttttagttaggaatttcgcctaaacaaaagaaatacaaaggatcttgggcaagagtatctgatcatatatgtattccaatacggaaggaggattttcaatgcgggatataaaaacatatctctctgtagcacccgtgctaagtactctatggtttggggctttagcaggtttattgatagaaatcaatcgtttattcccagatgctttgtcattcccttttttttaattctagttattcctatgcgagagatagaattcttcgtgacatgacgaaaatttcccctttttgaattcttttttagtatatgaagcaaaaagaaagaaaagatggataaggattgtattctttaattatttctctatgttttattacttaatttacgaatttcaaaaattttgtattctattggattggatttgttcgataattcgaagaattacaacaaaatctttagaaatcacatttttagttaggaacttctatggattttattcttcttcttttctttggatccaaaatagaagaataaaagaataggtataagaattaagttaagtcgatccaaaaaggaaaggaggttcatggccaagggcaaagatgttagaatccgagttattttggaatgtattagttgtgttcgaaagggttccaataaggaatcgacggggatttctagatatagtactcaaaagaatcgccacaatacgcccggacaattagaattaagaaaattttgtcgttattgtcgcaagcataccacccataatgaaataaagaaataggagcatcgtgtgttcgatttttccaaagaacagaaagagtaagaacttcttattaaatatatagaacatagatagaatactaaatacaaatcaactcatctgattttagcccgatattatttcatatgtatagagaggtttttatttttatatattgattttttatatttttatatagtatttcccggcgccctcgagatncctncacatggcggcgtccgagcagtatcagaggcccaaacaaannnnnnnnnnnnnnnnnnnnnnccnnnnnnncnnnnnnnnnnnnnnnnnnnnnnnnnnnnnnnnnnnnnnnnnnnnnnnnnnnnnnnnnnnnnnnnnnnnnnnnnnnnnnnnnnnnnnnnnnnnnnnnnnnnnnnnnnnnnnnnnnnnnnnnnnaataggtataagaattagttagcgatccaaaaggaaaggaggttcaggcagggcaaatgtagaatccgagtttttggaatgatatgtgtgttgaaagggt

SEQ ID NO: 3664 - DNA, 1195 bp, Zea mays
  Clone ID: TF_ZmC1460_6
tccgaaaccccggggcgtatggtagaggagattatagctcaaggaggagcctcgcggagctggaggctagtccaaactagtgggaggttgtgtgcagtgatcgatcgaggaagacgagaagcttttcgctgctagctaccgcccgcccggtgtctgtcgatctgtgacgaccgccaagccgaagccaaaaaggcagcagtagtcgtgagggggatggatctcggcatcgacgaccgcccgtccatggcgcggggcaaggtgcagctgcggcgcatcgagaacccggtgcaccggcaggtgaccttctgcaagcgccgcgccgggctgctcaaaaaggcccgggagctctccgtcctctgcgacgcccacgtcggcatcatcgtcttctccgcgcacggcaagctctacgacctcgccacctccgggaccatggaagagctgatcgagaggtacaggactgccagcagcatagaagcagccgacggctgcggcgacaataacagaatggacgcaaagcaagaaaccatggtgctgcaacaggaaatcaacctgctgcacgaaggcctgaggtacatctatatgaacagaacaaatgaacacatgaatgttgaagcactgaatgctctctgcaaagatgcagataatggctgtagaacaccaaagcactgaaaaagcaaggcatgtcaaaacccctgtacatattaactctacgaagacccgaggctttcagcacccatttacctcactaaaagtgtctgcgtgtacgcaggaaggcatgttgaaagctgccaacgagattctccaggaaaagatagtagagcagagtagtttgcttgacgtaggcatggtggtagcggaccagcagaatgggcgttttagcacagtcccactggtagaagaggtgatcagtagtaacccactgactgtactgagtggctattctagctgtaggggttcagagatgggctactccttctgaccgtaataacaaacagcctgggggctccttctgttgattactactagtgtgtaatacatacagtcaataaagtctgtaatgggttggttgttctgctgctttggtgtatcatattcgattattcgtatcatgtaggccttagataagcccttcaggagtgcccctggtattgtgtcgtcgtgccttttacttctccagaatgaagaaatattgtct

SEQ ID NO: 3665 - DNA, 444 bp, Zea mays
  Clone ID: TF_LIB3077-002-Q1-K1-D11
ccgaattcccgttcgaaccactcgatcccccactcttcacgaattccgcacgatactatgcgtttttgctacgtgggcttactaacaaaagtttgttttcctttaaaggtaaaacggcaaaatattcatatatctttttttcaactaatactgatcgagaacaatattatcatacaagtaacattctcaaatacacgaagttttttattaaacaaatccaatgatatctcagatttatgcgatgctcatgttgctttaattgttttctctaacaaaggaaaactctatgagttctcttctgatcccatcatggacaggatcctagaacgataccaacgacaaatatatgccccaactggttctgaatcacacgcaaatttgtctttggaatcttccaaactcatgtcaactattgaagtctttcaaaagaactttaagaacttt

SEQ ID NO: 3666 - DNA, 500 bp, Zea mays
  unsure (1)..(500): unsure at all n locations
  Clone ID: TF_LIB4744-023-R1-K1-A12
ctcgccggggcctttaangcagcgcctcacagggaaaagatctcctagcagctagccagctacagcctacagcaagagatcggcgcgttgattgcttggatcgaccgaccggccggggtggtcgccatgggacgcgggaagatcgagatcaagcggatcgagaactcgacgaaccggcaggtcaccttctccaagcgccggggcgggctgctcaagaaggccaacgagctcgccgtgttgtgctacgcgcgcgtcggcgtcgtcatcttctccagcaccggcaagatgttcgagtactccacccctgcctgcagcttgagggagcttattgagcagtatcagcatgctaccaacagccacttcgaggagataaaccatgatcagcaaatactgctggagatgacaaggatgattttcttgcgtctaaaaaaaaaaaaaaaaaaaaaaaaaaaaaaaaaaaaaaaaaaaaaaaaaggaaaaaaaaaaaaaaaaaagcggcc

SEQ ID NO: 3667 - DNA, 716 bp, Zea mays
  unsure (1)..(716): unsure at all n locations
  Clone ID: TF_LIB4762-104-Q1-K1-C2
cattgggaccctcgaggccggccggaagaagccctaccgcctcgcctctctcgttccccctcatcgccacgccagtcgcctccactcccagtcatctcccatcaccgacgacgtgtcgaggcgagagaagagggcgagtccaagtctagggttcccgccgcatcgacacgggcatcgcaccgcaccgcgaggggcgggcacggaggaagatggcaccgcgcgggcgcgtggagctgcggcggatcgaggacaaggcgagccggcaggtgcgcttctccaagcgccgcgcggggctgttcaagaaggccttcgagctggccctgctctgcgacgccgaggtcgcgctcctcgtcttttcccccggcggcaagctctatgagtactcctcctccagatgttggcaaaagaaaacaatggtggtgccggtgcaagtacaagcagccagatgttgctttactcggcagagcgtgcaaccgacaaatgaaacggggcgtgcatctgttgctaacggggcggtgccggtgccgcatactattgttgtgtagctgaggtttgtcaaggtggctgctggcaaggtagccgagggaagtggagttcaataacaggatgcggaaactgtgccgctccttgccgaacttaagccccgttacgttgtcgcnacaagtttattttctagcactgtgcttgctgccaaaaaaaaaaaaaaaaaagcggcc

SEQ ID NO: 3668 - DNA, 1095 bp, Zea mays
  Clone ID: TF_ZmC7457_1
ctcgaggccggccgggaagatagccctaccgcctcgcctctctcgttccccctcatcgccacgccagtcgcctccactcccagtcatctcccatcaccgacgacgtgtcgaggcgagagaagagggcgagtccaagtctagggttcccgccgcatcgacacgggcatcgcaccgcaccgcgaggggcgggcacggaggaagatggcaccgcgcgggcgcgtggagctgcggcggatcgaggacaaggcgagccggcaggtgcgcttctccaagcgccgcgcggggctgttcaagaaggccttcgagctggccctgctctgcgacgccgaggtcgcgctcctcgtcttttcccccggcggcaagctctatgagtactcctcctccagcatagaagatacatatgaccgctatcatcaatttgcgggagcaggaagaaaagtgaacggacataacaacgataaccgggatgtagctgcttcagatttacagtcgagacttaaggagatcgcaacatggtctaaacaaaacaacgctgaggagtcggatgccaatgaacttgagaaacttgaggaactcctgacaaatgctttgaggaatacgaaagccaaaaagatgttggcaaaagaaaacaatggtggtgccggtgcaagtacaagcagccagatgttgctttactcggcagagcgtgcaaccgacaaatgaaacggggcgtgcatctgttgctaacggggcggtgccggtgccgcatactattgttgtgtagctgaggtttgtcaaggtggctgctggcaaggttagccgaggaagtggagttcaataacaggatgcggaaactgtgccgctccttgccgaacttaagccccgttacgttgtcgcacaaagtttatttcctagcactgtgcttgctgcttatgtttgtttggatgtgccaacctgcagtgaccctcgtggagcctgggtctcacgctcctcttacctagtgtgatgtgcagaaaaagtgtgatgctgtaaaattatgtgattgcctagcagatgtcaaattttcaatcagtagctaactccttttaatggtaaaaaaaaagcggccaaaaactc

SEQ ID NO: 3669 - DNA, 716 bp, Zea mays
  Clone ID: TF_LIB4827-070-R1-N1-A7
ccggccgggacacatagaagcatcattcccctctcggctagcttcctcctctctccctcctcttcgtcttcctctttccttctcccttgggaaacctgctgcctttgagctttcttcttcgagtgctcccaccagatctcctcctccttaccttctttggcacgttcggcggcgcgcgcggagatagatagatcccgccatcgtcgtcgccgtccttgcttccgatcggagggccacaaccacaacctctcgctccttagcgtgcgcgcgcgagccagggtcaagaagagagctagctataggccggagatcgatggggaggggaaagatcgtgatccgcaggatcgataactccacgagccggcaggtgaccttctccaagcgccggaacgggatcttcaagaaggccaaggagctcgccatcctctgcgatgcggaggtcggcctcgtcatcttctccagcaccggccgcctctacgagtactctagcaccagcatgaaatcagttatagatcggtacggcaaggccaaggaagagcagcaagtcgtcgcaaatcccaactcggagcttaaggtttgctctagataattttttctctctattctgaagtgtttgcttgtttaactaaaagattgctatattttttttgctttcgttttgatatatatatcctttaagtttatggtttgcaaaaaaaaaaaaaaaaggggcggcc

SEQ ID NO: 3670 - DNA, 321 bp, Zea mays
  Clone ID: TF_LIB3136-040-P1-K1-B6-R2A
acgctcatgctgtattcactggtcgccggctatctacatctggagatccattattgagcgtaacaccaaagatacgatcggctcccctgctttctgggacatgggcccctagacgcgatacatacgggggatagagagcgcggcggcgtactgggtgaccttctccaagcgcctgcgcgtactgtgcaagaaggcgtaggaccttgccgtgctgtgcgacgccgacgtctcgctcgtcgagttctccgacaccggcaagctctagcaattcgtgagcctccagtgttgaatgacatcgttgacaggtacaggccacatttc

SEQ ID NO: 3671 - DNA, 860 bp, Zea mays
  Clone ID: TF_ZmC1145_12
gggtacctcgaggccggccgggctcccggcctgtcccctcacctccctccccctatctctccaccgccgcagctagctgcgacgtcatgcactcgccggcgccaccgccaccgcatactatctacaattagccagccgtaggcttacctatcctgtgtcaagcaagcctctcgcaagcaacaaggaaggaagctagctagttttatagctgctgtcggcggcggcggctgaagcgacgtgcctgagctaggatttaggttgagatcaggagagggagaaggcggcggcgatggggcgcgggaaggtgcagctgaagcggatcgagaacaagatcaaccgccaggtgacattctccaagcgccgctcggggctactcaagaaggcgcacgagatctccgtgctctgcgacgccgaggtcgcgctcatcatcttctccaccaagggcaagctctacgagtactctaccgattcatggtacgctctcggccccctccgttgcttacgtttcgacactgcccgctgcgtgctgccccatttccaagctgtttgaaactatgaattgaggtgatgcgtaattatctctgttcgaacttgttgagaatttttggaattatggttattgggtagacagacgtacagctctggttatgtgtagatgagtcgaagaggcgtgtagcgtgtcccgttcgtgcgcgcgctatatatatacggggtaattttatgctccgctttcgctggtatggcgttggtactgctctgtttggggaaatttttgctgccatgctgcatgtgctaattgcttgactaacttgacttctccgcagaacaccaatactatacatctcatctcgcccttattc

SEQ ID NO: 3672 - DNA, 750 bp, Zea mays
  Clone ID: TF_ZmC1145_16
cctcgaggccggccgggcggggcctgtcccctcacctccctccccctatctctccaccgccgcagctagctgcgacgtcatgcactcgccggcgccaccgccaccgcatactatctacaattagccagccgtaggcttacctatcctgtgtcaagcaagcctctcgcaagcaacaaggaaggaagctagctagttttatagctgctgtcggcggcggcggctgaagcgacgtgcctgagctaggatttaggttgagatcaggagagggagaaggcggcggcgatggggcgcgggaaggtgcagctgaagcggatcgagaacaagatcaaccgccaggtgacattctccaagcgccgctcggggctactcaagaaggcgcacgagatctccgtgctctgcgacgccgaggtcgcgctcatcatcttctccaccaagggcaagctctacgagtactctaccgattcatgactagtatatatgtggggaacttccacataccagaactgattgaaagagctagatacaatataatgcagtcagaaagtatggacaaaattcttgaacggtatgagcgctactcctatgcagaaaaggttctcatttccgcagaatatgaaactcaggaaaaaagattcggatcagaagtatgattttttcgtgttgatcaagttgttctgaacaaacgtatttgtgctctcttgcgagggatgattaactttgaattggtgccatgaatatagaaaactaaag

SEQ ID NO: 3673 - DNA, 1012 bp, Zea mays
  Clone ID: TF_ZmC3065_1
ccggccaagaattcgcctgcaatcttcggggtgatcgattacacagcattatgggtcgcgtgaagctacagatcaagaggatagagaacaacaccaatcggcaggtgaccttctccaagcgtcggaatggcctcatcaagaaggcctatgagctctccgttctatgcgacatcgacatcgcgctcatcatgttctcgccctccaatcgcctcagccacttctccggcaggcgcaggatcgaggacgtgatcacgaggtacatcaatctcccggagcacgacagaggaggagttgttcggaatagagagtatctgatgaagatgcttggtaaactcaaatgtgagggtaacatagccgaacaactcacacctaataaagagccaataaattccaacgtagaggagcttcagcaggagattaagacgtaccaacaccagatggaagtcttaaaggagcaacttagatctgacaacattgatgtcgatgaacgatttcgagacgtgtgagaaattcctcatggacaccctcacttgcgtggaggagcgaaagaaatatttgctgtgcaaccacgtggccccgttcgatccgtcggcctccaacatgcaacaacacgtagacgtacgtaggtgtctggtgtctttaataattatggttggaacacataattacttccgttgattcggttcagcgagtacgtaaccgtaattagtagagtacgtaattaacgattcaacgtggaggatgatcatgggtccagatgttcgccctgccgccggcgccgcctcaccaacaggagcaacaaggggacgacctaggaggcgccgccagcgcgttcggtggcgatgtctcgtggttcgccgatgggatgccgacgtcgtcgatctttgctgcgtcggacccaatcttgtactttaggtaggagaaattccattggatgggcgacatacagatatatatcacctctttttcgcttaagattgattatcacactattataaaaaaaaaataataa

SEQ ID NO: 3674 - DNA, 418 bp, Zea mays
  Clone ID: TF_LIB3068-061-Q1-K1-E2
acgcgttcgaccacgcgttcttccactcgttcggactttcttttactcactccatcttccccccggtgactttttcatagatgcatcgggcccatccaacctgataggaaaagctagctagcatttaccatctctaggccggcggctgtagtctgcctgcagctgatgttagctacaaacattgggagctagccatgtggagggatcccctggagctaaaacagatcgagaacaagatcaaccgccagagcaccttagtcaaacgcctcaacggcctgctcaagaatgcttacgaacacttcgagctctgcaacacctaagtctcactcaacattctcttcaaccgccgaaagctctacaagttctgcatccgacaaaacattaccaaaacacttgataggactaaaaaaacattatt

SEQ ID NO: 3675 - DNA, 594 bp, Zea mays
  Clone ID: TF_LIB4666-029-R1-K1-C10
cggggcaagtccggcctgcaaaagaaggcctccgagctctttctgctctgtggctcgcccgtcgccatcgtcatcttctcccccggcaaaaaggtgttcgcgctgggcactccctcagtcgaccacgtcctccgccgctatgctccgatccccggcgaagaagaggaggatgggctccttccggtgcttcaggacacagacgatgtgagcgctatcaccgaccgcgtggaggtggagggcattgtgcggcgaacggaggagaccaaggcgcgttcggtgatggagaaggcacggatggacgccatcgggaagacggtgaggcagaccgcggcaaaggccggaaggaagttctggtgggaggcggactccggcaagctcggggaggctgagctaccagaattcgccaaggtgctccgtcggctcagggtcaacctgcaacgccatttggactcgctgtcggcgtctactaggcagctgcagtaggagtggctgtgcaaaactgggtcattcgatttggttagggcttggatgtttaggcacttaggatagtgtcattgactacaaaaaaaatcaaaatgttagtgtgattagtct

SEQ ID NO: 3676 - DNA, 330 bp, Zea mays
  Clone ID: TF_LIB3245-215-P1-N1-E10
tgggttgttacaacagtatatgtggattataggtcaaggtccaatctcattgtagtatcataagcgatccttacaaacgagacaagcttgttctattgatgtctacgtcaccagcatctagctgaccacgagttactagtcaatctgacaccgaccgttcatggcttgtggtaaggagcaacttcggcgcgtcgagaaccctgtgcactggcaggtgacattttgtatgcgccgagcggggctgctcaagaaggcccttgagctctctgttctttgtgacgccagcgttggtattatcgttttttccgcgcacggtatgctcttttatct

SEQ ID NO: 3677 - DNA, 691 bp, Zea mays
  unsure (1)..(691): unsure at all n locations
  Clone ID: TF_LIB4185-025-R1-L1-C4
aattcggcacgagggggcactggtgaatgaacgagagtgacctgacccccgtgcggccgtccgccgtcaccgaccgagcgccgggtcccaccactccccgtccccaacccctcgcgctcgctccagcctccagcaaccgcgctccctgttcctttccttcccaggcggccaggcccagcagcgtgaagtgaggccagctagcctattatcagcctatggcggctcggattggagcggacgggaaggcgatggcacgccgcggccgcgtggagctgcggcggatcgaggaccgggtgagccggcaggtgcgcttctccaagcgccgctcggggctcttcaagaaggccttcgagctctccctgctctgcgacgccgaggtcgccctcatcgtcttctcccccgccggcaagctctacgagtacgcctccaccaggttgggcggcttccgaagtcattcagacctgcgtccgagcctacatcatcatttggtttgaatcgcggaacgatgtcgttcgtcactgcgttgttctaataacaaactaacatgtgagatcagctcactccgcaataaagtgcaggaccgctccatccggagccagaccacgatggatgagccaaaccatcagaccaaacacgctattagtacctgcttgtcgtgatcagagggaaagataaaaanacatattggatg

SEQ ID NO: 3678 - DNA, 676 bp, Zea mays
  Clone ID: TF_ZmC32383_4
gcacgagctgggcactggtgaatgaacgagagtgacctgacccccgtgcggccgtccgccgtcaccgaccgagcgccgggtcccaccactccccgtccccaacccctcgcgctcgctccagcctccagcaaccgcgctccctgttcctttccttcccaggcggccaggcccagcagcgtgaagtgaggccagctagcctattatcagcctatggcggctcggattggagcggacgggaaggcgatggcacgccgcggccgcgtggagctgcggcggatcgaggaccgggtgagccggcaggtgcgcttctccaagcgccgctcggggctcttcaagaaggccttcgagctctccctgctctgcgacgccgaggtcgccctcatcgtcttctcccccgccggcaagctctacgagtacgcctccaccagcatagaggatacatataaccgctatcagcaattttctggagaaggaaggaatataaatgacgatcgaaatagaaacgataacaaggatgaagcttcttcagatttgcagttgatgctgagcaagattgccacctggtctccccagagcaatgctgacgaatcagatgtagatgagctggagaagctggaaaatcttctgagaaatgctttgaaggatacgagatccacgaagattcagatgttggcga

SEQ ID NO: 3679 - DNA, 903 bp, Zea mays
  Clone ID: TF_793905
ctgcgtcgtctcctactcgatctatagctccttcgtcccccatcttcagaaattggaatttcttgcagtcgcttcgctggttctgctctctagcttttaactcgttcctgctctttcttcagaccgatctgagttgcgggccgtcgtccaaggcgaaaggaggacagccggcagcgacgagctccggcggcgacaggcaggggaggggcaagatcgagatcaagcacatcgagaacacgacgaaccggcaagtcaccttctgcaagcgtcgcaacagcctgctcaagaaggcgtacgagctctcggtgctctgcgacgccgaggtcgcgctcgtcgtcttctccagccgcggccgcctctacgagtacgccaacgtgtatcttgtgcctagatcctacacgctgcgcgcgtcagctgtttgcgttgtccaaattcggagcaagttcgctcccatctttctcgaggcaaaaccgcggggctggagggtcaattggggagctagctagctgctgcatcttttgctgtgtgatccttgctggttacacagaagacgcatttggcttgttggtgctgctcctcgtgcgagagaaggagccagtagtgccaccactgtccagcagcttgaggacttcaaggtcggtggctagtgcagcccccgcccaaagcttagctgacttctgcaaggattcctcctcttcagctgcacacggtctcctgaatattctacctaacatgttgtttctctaaggctactatgtgatctttttgttagtcacaatctattagttagaatcatagagatccttagaagcatagcaaaatcactttctgagtcttggtctttcctttcaagagtggacaatcagaccatagttgatatgcatcaagcactaccagtatctt

SEQ ID NO: 3680 - DNA, 657 bp, Zea mays
  Clone ID: TF_ZmC786_177
tcgagccggccgggccgggatcgggaaaccttcactccttctcctactcgatctatagctatgaagatcatatcgtacatctgcgtcgtctcctactcgatctatagctccttcgtcccccatcttcagaaattggaatttcttgcagtcgcttcgctggttctgctctctagcttttaactcgttcctgctctttcttcagaccgatctgagttgcgggccgtcgtccaaggcgaaaggaggacagccggcagcgacgagctccggcggcgacaggcaggggaggggcaagatcgagatcaagcacatcgagaacacgacgaaccggcaagtcaccttctgcaagcgtcgcaacagcctgctcaagaaggcgtacgagctctcggtgctctgcgacgccgaggtcgcgctcgtcgtcttctccagccgcggccgcctctacgagtacgccaacgtgtatcttgtgcctagatcctacacgctgcgcgcgtcagctgtttgcgttgtccaaattcggagcaagttcgctcccatctttctcgaggcaaaaccgcggggctggagggtcaattggggagctagctagctgctgcatcttttgctgtgtgatgtgagtgacttcattccgttatatgaactactgcgtgcatgctgtct

SEQ ID NO: 3681 - DNA, 570 bp, Zea mays
  Clone ID: TF_ZmC119_1122
tgtcgctttttttttttttttttttacacacacatatttaatagcattataattaatataatataagtaagtaccattcaatatctcataaataagcattgtcaaataactcatacataagtgtactctaaatccaaactaaaatactaatttaatatttgtccatcaactgtttatgctaatattaagcctaactaagtatatgtgaatttaagtctccacacttgtgcggccaccaaaatttaagtttcattccattttttccttggggtcatattctgcattacatgcttgaagggcaattgcttttagatctaatttaccatccaaattgatcgtcgacataatatctgttaccacaccaaacatctttgaagcggaacatacaaatgacctcaacatctctgtggcaaatatacaaagaaacaacactgaacaatattaggctaatttaaatttcttcattttccattatcggtctaccagaggcctagcaagcatagggcacttgacaagcttttgatggcacaaatttaaacaaggtttaacatttagacatacacatcaaac

SEQ ID NO: 3682 - DNA, 555 bp, Zea mays
  Clone ID: TF_LIB4758-033-R1-K1-D3
gggtacctcgaggccggccgggatcccttctgtgcgccgccaccacattgcagcgcacgaattgcacgtgaggtcaaagagggagctgtatactcagccaccgaactccaaaatcgccgccggagctaccctcaaccccgtgaggtcccaagaatctgaagatcatcctggagcctggaatcttgagtcccagtatgaagcaaagctcttgcctggcttgatctatcgaatgaagcagccaaaaatcgtgctgctgatttttgtttccggcaagattgttctgacaagagctaaggtgagagatgagacattgcttttgaaattatctatccagttctcgtaaagtcataaaagtccggcaatgctaagtacatggtaattgctaatggacaagaataattagggtatgttgttcaagtatgtgcccagttgttgttgttgtcccccttttattgttttgttttctgatttcgatggtaccattacctaggacgctcacgagacttctataatatactatccttctatggaaaaaaaaaaaaaaaaaaagcggcc

SEQ ID NO: 3683 - DNA, 1575 bp, Zea mays
  Clone ID: TF_ZmC21769_1
cattgggtacctcgaggccggccggggctccccctcccgtccaccgatacacaacccaactcccgcacgcatctacccccaccaccagacgacctcccccctcccccgcattctctcacgccgcctgcgctctccccctcgcgagatagacaaccctagctcccgtctccttgcttaccctcctctccaacccctctccgatctctataaaagacccgaatttcgaattccccctcgaacccgcgatccgcgctttccttcccgcccatttcggtctctgattcggcgcggattcgctgcgcgggagcccccgaggttgcgtgcgtgattcggatggcggagccggggctcgagggcagccagccggtggatctgtccaagcacccctctggcatcgtccccacgctccagaatatcgtatcaacagttaatttggattgtaaacttgacctcaaagcaatagctttgcaagcacgaaatgcggagtataacccaaagcgttttgctgcagtcatcatgagaataagagaacccaaaaccacggcactgatatttgcatcgggtaaaatggtatgtactggagcgaagagtgaacagcaatccaagcttgcagcaaggaagtatgcccgcattattcagaaacttggttttccagctaagtttaaggattttaagattcagaatattgttggctcttgtgatgtcaagtttccaattaggcttgagggccttgcatattctcatggtgccttctcaagttacgaaccagaactctttcctggccttatctatcggatgaaacaaccaaagattgttcttttaatttttgtttcaggcaagattgttttgactggagcaaaggtgagagaggagacctacactgccttcgaaaacatctatcctgtactgtcagagtttagaaaaattcagcaatgatgacatgtgatgtgaaggtcacgttcttcaaattacaagcttcctcgaggattctcgtgtgaccatgaattctaaatgtacataaaagtctggcggaacttatagcatcttgtaatctctgtgagctgcggtctgtcagtattgggtgggcttgctgtggtaactggtggacatgtcgagttcatccatttgggtaggccttggtgaacacggacgccccacatcatgtctcagtttgagtagtttgtgtgaactgaagggtacgtgcttctcccatgtggttgcagcgttaacttgagttgctaacaagagtagataaaattttgcccctgcttcgtctttgaggcaggagtccttcaaagtctcttctgagtatgtttcagtgtgatgtgcgatgatgaaaaggctggcgctgtatgtaacgtgggacaagggcaaagggcaagggcaatgtactgacgactggttgtaagttatctgttgtatttgagtttgagatgctgtagcgtttgacatggggaaaaaaaaaaaaaaatgaacttgtggaggaaccagtcagtcgaccgttctatttgtgtggccctctgctactgactaatgtggcctgttccaaatgtcgctgcgattttcgtttctttt

SEQ ID NO: 3684 - DNA, 1417 bp, Zea mays
  Clone ID: TF_ZmC21769_2
attccccctcgaacccgtgacacgcgcgctcctttcccgcccatttaggcctctgattcggcgcggattcggcgcgcagccgccgaggttgcgtgcgtgattgggatggcggagccggggctcgaggacagccagccggtggatctgtccaagcacccctccggcatcgtccccacgctccagaatattgtatcaacagttaatttggattgtaaacttgacctcaaagcaatagctttgcaagcaagaaatgcggagtataacccaaagcgttttgctgcagtaatcatgagaataagagaacccaaaaccacggcactgatatttgcatcgggtaaaatggtatgtactggagctaagagcgagcagcaatctaagcttgcagcaagaaagtatgctcgtattattcagaaacttggttttccagctaaattcaaggactttaagattcagaatattgttggctcttgtgatgtaaagtttccaattaggcttgagggccttgcctattctcatggtgccttctcaagttacgaaccagaactctttcctggccttatctatcggatgaaacaaccaaagattgttcttttaatttttgtttcaggcaagattgttttgactggagcaaaggtgagagaggagacctacactgccttcgaaaacatctatcctgtgctggcagagtttcgaaaagttcagcaatgatgacctgttgtgaaggtcacatccttctaattacaagcttccttgatgattttcgtgtgaccataaattctaactgtgtacataaaaagtctggcggaatttatagcatcttgtaatttctgtgagctgctgtctggcatgattgggtgggcttgtcgtggtagctggtggaattgtcaagatgatccgtttgggtagaggccctggtgaacacggacaccacattatgtcgcagtgtgagtagtttgtgtgagctgcagggtacatgcttgtcccatgtggttgcagcgttaacttgagtgctaacaagagtagataaattttggcctgcttcgtctttgatacacgagtccttcaaagtctcttctgagtatgtttcagtgtgatgtgcgatgatgaaaaggctggcgctgtatgtaacgtgggacaagggcaagggcaatgtactgacgactggttgtaagttatctgttgtattttagtttgagatgctgtagcgtttgacattggggtaaatcttgctggttatgaccgtatggaggaaccggtcgattgaccatgctattggtgtgactctttgttagagacaataatgtgcacttaaaccgtgcaatcaaacgatctgatgtatgcaagctattttagatgaaagatttcaaatataaaattgctataggttaaataaagcagggattaaatataaaatagt

SEQ ID NO: 3685 - DNA, 728 bp, Zea mays
  unsure (1)..(728): unsure at all n locations
  Clone ID: TF_LIB4727-003-R1-K1-F7
gggattttagcttctatatgacttgcttgctcttaggtttttctattgaatgcagtctttctcagttatgatgataatgatataatgtcacatgctggtttttgctaagttttctctctattattatatttttatcttgacccttttatctgtaaacagcgttttgctgcagtcatcatgagaataagagaacccaaaaccacagcactgatatttgcatcgggtaaaatggtatgtactggagcgaagagtgaacagcaatccaagcttgcagcaaggaagtatgcccgcattattcagaaacttggttttccagctaagtttaaggtaactttttcatacttgtgtacattgacctgttctttgaacaatatgtacatcagttgctaagttgctgttctaagccagggttttaagatccagaatattgttggctcttgtgatgtcaagtttccaattaggcttgagggccttgcatattctcatggtgccttctcaagtgtatgtccaaggatggtttattttatcaccacagtaattcttttaccctttttgtctgcattcttggataatgacatttttcatttgttttatagtacgaaccagaactctttcctggccttatctatcggatgaaacaaccaaagattggtcttttaatttttggttcaggcaagattgttttgactggagcanaggtgagagaggagacctacactggcttcgaa

SEQ ID NO: 3686 - DNA, 832 bp, Zea mays
  Clone ID: TF_ZmC418581_1
aaatattcttaatctgctgagggttttgtgaataataactgtttcactgtttgcatgcagtatgctcgcatcatcagaagcttgggtttccagcaaaattcaaggacttcaagattcagaacattgttaggtcctgtgatgtcattttcagaacattgttcggtcctgtgatgtcaaatccccaatcaggctcgagggtcttgcatactctcacggtgctttctcaagttatgaaacagagctcttctctggcttgatctatcgaatgaagcggcaaaaaatcatgctgctgatttttgtttccggcaagattgttctgacaagagctaaggtgagagatgagacgtacactgcttttgaaaatatctatccagtcctcacaaagttcagaaaagtccggcaatgttaagtacatggtaattactaatgggcatgggtaattagggcatgctgttcaactatgtgcccagttgttgttgttgtcccctttttatcgttttgtttcctgatggtacgggtgatcacattttcagaaaacttaagttcggcacttggtgtatgtagataacttaggaatgggcaaatgctgttgctggccgccagctctaacttccaagtgtacatatttcgtaggagcctatgcatacgctgcccatcagtttcccatgagacctggtgctgtgcacttgttgattgatgtccacacagctcaattatttgtggcaagaataattagggtatgttgttcaagtgtttgcccagttgttgtccccccttttatcattttgttttctgatttcgacgataccattaactgggaccctcacgggac

SEQ ID NO: 3687 - DNA, 608 bp, Zea mays
  Clone ID: TF_LIB4719-004-R1-K1-B12
tctggccgggatcgatgccggcatggcggcggcgcgcggcgtccaggtaacgcgtgaactaggacacagaaccgacggagagaccatggagggggtgatgcggaaggtcgagcctaacataactgcggcgtcaccagaaccggcggatcgaccgaggacggacgctaggggagcgcccgcggctaccgcatcgcgtagcgtacgcgtcgctctacgcaggcgctggactacaccgcacacctgatgcagccagccgctcaccggcaatgaggacgctgtcggcgctgaactcgtatacgggactggtgccgacagcaactaggatatggggaacgaggattatcaaatggcagcaaggctaaaagctacttagcagacgaggggctatgatgagcgctatgtgttcataggctaaaccttgggagaggatgaccacgacatagctagcaaaactgagagagaaggtaccaacgaactagaatgacctgttgcaaagagctcggtgagaggacgaacgaacatgaaaaagagggcctacgccgcagctttagggggttgagcgtggcacaagcggggacctactgtacacagggctatagctgctatct

SEQ ID NO: 3688 - DNA, 759 bp, Zea mays
  unsure (1)..(759): unsure at all n locations
  Clone ID: TF_LIB4969-021-Q1-XP1-A8
gccggccgggttgggctcattcctctctgctctgctctgctccaccaccctgatgacgacgaggccagacggcagcgccgccacgcccgcggacaagcagctcgtggcggcctccaacggcaacggcaacccgctggccgtccgcaaggcgccctccaaggaccggcacagcaaggtggacgggcgaggccggcgcatccgcatgcccatcatctgcgccgctcgcgtgttccagctcacgagggagctcgggcacaagtccgacggacagaccatcgagtggctgctcaggcaggccgagccctccatcatcgccgccaccggcaccggcaccacgccggcctccttctccacctcgtccccgtcatcgctccgctcctcctcgtcctccacagccggcgtccacccgcacgccgccccggcccaggggttctgggcgctgccggcgcgggccgacttcggacagctctggagcttcgcggccgcgccggagatgatggtcgctgcggctgcagcagcagcgccgggcatggccggggaggcgtccgccgccagggtcggcaactacctccccgtcgcgcagggcaacctcaacctgctggcctccttctccggcgggcctgctcccacagcggccgccggacgggccgaggaggagaccgcccgctaagggtcgtcaattcccagtctctctgtgtgtggctcaatccgggatagacagtgtcactctcacccaactctccatttctttntttgggg

SEQ ID NO: 3689 - DNA, 713 bp, Zea mays
  unsure (1)..(713): unsure at all n locations
  Clone ID: TF_LIB4171-030-R1-L1-H3
ttttcggcacgagggtccagtgtgccagcgcgtgccagagccggagaaaaatgctggcacgattgtaggagcacgggcgatgcactaggcgcgggcagcgtagggataagacagcagcacagcagccgggccgacggctggacgtggccggcgcgcatgaccagcaagcagcacgccggggagcaccagccgttgccgcattccagcagcgacaggcaccgagccgaaaatcgccaggcgccagcccacgccgccaggcctagtgctccctcataaaagcgtcgcattcctctcacggtcacggcactcgccgcgccagcagccagcctatgagcagcgcttgcggcggcggcggttgtagggaatggaggcagcagccgtgggcgacggcgcgccagcgggccgctcccatcagggcgccaagcgcgcgcgcggcggcgccgtgaagggcagcgagacggaagtggcggcgtggggccagccgccgccgctcccgccgccgccgggcccgggggcggggtcccggatctcccgcgtgggggcgagcgggggcaaggaccgccacagcaaggtgtacacgaccaagggcatccgcgacggccgcgtgcgcctgtccgcgcccaccgccatccagttctacgacctgcangaccggctcggcttcgaccagcccagcaaggccatcgaatgggtcatcaacgccggcgccttcg

SEQ ID NO: 3690 - DNA, 592 bp, Zea mays
  unsure (1)..(592): unsure at all n locations
  Clone ID: TF_LIB4827-005-R1-N1-C8
ccggccgggtccgcatcccggccatggtggcggcgcgcgtcttccagctcacgcgtgaactcggacaccgcaccgacggagagaccatcgagtggttgctgcgccaggccgagccttccataatcgccgccaccggcaccggtgtcacgaccgaggaggcgcccccgtctctcgtccccgtcgcccccatcgcgtcctcagtgtcccttacgccggtcccgtactacaccgcgctcctcatgcaaccaccgcccaccgccaatgagtcccctgtcgcctctgcatccgtatctggcactgttgcggataacaactaggctaggtggaagaggattatcaaatggcagttaggctaaaagttagttagtggttagggtttattatgtgtgctatgtggtcatggcttattaccttgggagaggattacggtgatttagctagcaaaactgattgagaatgtaacaacagaaggaatgacatcttttaaagtgttttttgagtcatactggtgttgcaaacgaagtcttatctcttgtgatatgtctagtgcttctgatttctattaaaaaaaaaaaaaaaaanaggggcggcc

SEQ ID NO: 3691 - DNA, 633 bp, Zea mays
  unsure (1)..(633): unsure at all n locations
  Clone ID: TF_LIB4699-001-R1-K1-A9
ccgtactgccttgccccctactttgcctcgcttagcttaggcggcgctgatacccactctcgccgtccttgttgccgcggcgctctgctcacgatggagttccgcgatgcatgtgctgctcgcggctcggggcgcgcgtgctggtcgacgcgccgcaagcgcacgagatggacatgggtgagacgaccgcgccgacgcccgagacgagcaccacaacctgggccgcgcagtatgatctggtcgaggctaaggtcgaccagtagttcatgctccacgaccaggagcaggagcagtaccagcttcagccgaacctgcggatacatattgaccaggcgtcagcggcagcccaggacgatcgcggtggacttaaggagcagcagaagcatgatgcatgtggtggggcagatcgggggattggatgcagcaggcgctcgcccccaagcggagctacaacaaggaccgtcacaccaaggacgacgggaggggccgacggatccggatgccggcgctctgcgccgagcggatcttacagctcacgcgggagctcggccacaagtccgacggcgagactgtgcagtggctgctgcagcaggccgagccggccatcgtcgccgncaccggcacgggcaccat

SEQ ID NO: 3692 - DNA, 1557 bp, Zea mays
  Clone ID: TF_ZmC819_1
gagctagccggacgaattcgggcgtgcggcttcgagctctcgcttatatcagcgccgcgcgcgccggccggcggccggaggagccactatcatccccggcgtttgattcggccagagcagcggccatggtcgaatatatttgatctctctcgatctgatctgagctgagccggctggtggcccgggaaggacgaagtgtgtcgccacctataatttgatgatgtttgtgtcatcatgatcggtggctagcagaataagagatgataagcggcaacctcaacaatgaagagctggggggcggcgggtgcaccaaggccgaggggccgggcgcggccggcggcgccggcgccgtcgtcgcaaagagtcccgtgctgtcgagctcccggcactggccgccgtcgacggagtcgaggatcgtgcgcgtgtcgcgggtcttcggcggcaaggaccggcacagcaaggtgaggacggtcaaggggctgcgcgaccggcgcgtgcggctgtccgtgccgacggcgatccagctctacgacctccaggaccggctgggcctcagccagccgagcaaggtggtggactggctgctcgacgccgcgcaggacgagatcgacaagctgcctccgctccagttcccgccgcaagggcaggacctcgtcgcccatctcccgccgtccatggtggcgcccttcgccaacgttgcagccgaccgggccgccgccgccgctgccgccgcgaacgcgtcggccgcgatggccgaaggcggcaaacgccactgccacggaggcatcaaagggctcatgggcatgggcctcaacaattctatcggcctcgccaacgccaccatgccgctggctcacggcttgtactacacgcccggtgagtcttggaccaatggaggcaatgccgccgtccatgatcatcaggtgagccacggcggcacctcgcctcagacggtggctcaccactcgccgttctcgtctctgctgtctcttgctgctccggggccccagctcgtcttctactcgccggaaggcggcggcttcgccatgaaagaagccaccgatcatcagttcgctgtagatagcctcgatcactcgcaaggccagctctcactgagctcagctagaagcttccttcaccccggcaaccagggatgatattaggtcactgatctctactgctccaagaaggtacgtagaacaataaagcttggtgtagtagtaatcaagtactcgtttgaaggctccgtaaagcttgcaactgcagttttgagatgttattgtttggtatgatcgagtagaggggctctagcgtagagagctgctagcatgcatagtaattaaggttaattttgcaggacatgcaatgcaattcgttgcttcttttttatacaaggaagtaaccggtcatggggtgtgtggtgtgtgtgtgtgttggcaatgtaataacaattttataattcgttcttgaatttgtgcttagctagattgcgttcctttttagactttgttttcatatatactcgatcaatccataccaatatttcgaggccgggcc

SEQ ID NO: 3693 - DNA, 837 bp, Zea mays
  Clone ID: TF_LIB5117-027-A1-PF1-F8
agctacagctccagctccactccctcactccagtcttctccccctccttctcttttgcgcgctggcccctgccgtttcggacccgccgcgctccggtccccgctccgccgccgccgcccgtccccgtcgaccccctcctccgccccttcagaggaagctgcggactggcatgagctagggggccatggaagaggcagacaaggaccgcaattcctgcaagcgcctgcgagcggtaggcggcggcggcgactcggcggatgcgtggcggactttccgggtggcgcgtgctgcggcgggcggcaaggaccggcacagcaaggtggtgacctcgcgcggcctccgcgaccgccgcatccggctctcggtgcagacggccattcagttctatgacatccaggaccgcctgggcgtcgaccagcccagcaaggccatcgaatggctcatccaagccgccgccaccgccatcgatggtctcccgtcgctggactgctccttcgccctccctgtcgcttccccagcagcagaagacgccgcggaggtcagcacctcggagaccagcaagggctctgtgctctcgctcgccaacggccctgccgacaatgacaatgccactcaccaagccaatgcatacaacgggggcagtgccaatggcacgttcgccgagctcctgcactgctccaacgctgccgacaagccaatgcagcatcagcatcagcagccgacgcttgcctactacgcccgctccgggttcacacatcgcacccatgtccttcgagatgattccccgctccccctctcccaggacaacaaaacgccacacccacacaacatgcctct

SEQ ID NO: 3694 - DNA, 1821 bp, Zea mays
  Clone ID: TF_ZmC1215_2
cgcgtccgatcttctccttcccccggcaatcgtcctagctgcaacgcactcggcctgtcgacaaacccaaccagaactccataaaatagtgtcgatcaccacaggcaaacctccctccccgtttctctctctttcactctttttctctctccaagaaataattgactccaacgccaagcgccacaagcacaagcccttgcttgcttgatgtcactctttcgctctcgctagctctaacgccaccgctgacggcgctgccgagcctccagtccaccgcccaacgtcatacaccaagtcaggtcagcagccccacaagaacacttcgtaggtcagcaaatccattattagtaccgatatttctccaggtccctgaagagaaagcatcgtcttgtgtatttatatataccatggcctgatcggctatggacgtcaccggagatgccggcggaggtcgccgccccaacttccctttgcagctgctggaaaagaaagaggaacagccctgctctacgtccccagcggttgctgtgggtgctggggctaatgggtcgggagagatgcagatgaagaaggtggcggcgccgaagcgcacatcctccaaggacaggcacacgaaggtggacgggcgcgggaggcgcatccggatgcctgcaatttgcgcggctcgggtgttccagctgacaagggagctggggcacaagacggacggcgagacgatcgagtggctgctgcagcaggcgaagcccgcggtggtggcggccacgggcacgggcaccatcccggccaacttcacctcgctcaacatctctctccgctcctcgggctcttccttctccatcccagcgcacctccgtgcggccggcccacgcttcggcggcgcgcggggggacccgtgggagcgcgtcgtgggagtgggactcgggttcggcgccgccgccgaggaccctccgtccgctacgtcctcggcgtcgtctcctctgctgctgagtttccactccggcagcgtcggtcttgacgtgtcgccgtcgccgtcgtctgccgccgccggctccgacctgtcgaagaaacggaggtgggagcaggaaatgcagcagcagcatcagcagcaataccaccagcagcagcagatggccgggtacacgacgcagagccaaatgccaggcgccgtgtggatggtgccgagcgcgagcagcaacgctcaagctgccgcagcggctggcggtggcggcagcaacgccaacgagtcgatctggacgttcccgcagccagcaagcggcggcggcggcggcgcggcgaccgtgtaccgcggcgtgccgagtgggctacatttcatgaacttccccgcggcgcccatggcgctggtccccggtggtgggcagcagctcgggctcggcggccccgtgcccgtgggcggcgccggcaacgacagtagtggcagtgccagcggcggcggcggcggcgagggccacatggggatcctcgccgcgctgaacgcgtaccgagcacatagtgccgtctcggacgctgcgccagagcagaacggagcggaaggcggctctcgtcagcaccagcagcacggcggcggcggtgagcgacaggagagcgtgagtcctcccagcgacggctcgtagcgtcttcggagttcggaggcgtgtgcgtgcactggtctgctatggcgtctctctctctttctctctctctcctgtgttaattagtctgtgcttctcgacttatcgtttgcggtttttgttaattggttgcactgttgtggcctcctctggctccttcacattcttgcaaggatcatacagagtttggttt

SEQ ID NO: 3695 - DNA, 1729 bp, Zea mays
  Clone ID: TF_ZmC456_1
cacggagcctgatttggtttgctttttgttgcccagactcggagggagttggtgcctctgtgtctctgtgtgtgtggagatggaccccaagttccccccacccccaccgctaaacaaaacggagcccaccaccgcgacgaccaccaccacctcgaccgcgcagcagcagcagcagcagctggatcctaaggactaccagcagcagcagcagcagccggcgcagcacctgcaaatccaaatccaccagtcgtagcaggacggaggcggcggagggaaggagcagcagcagctgcaggtggtggcgcagcccggggagaggaggcagcaggcgctcgcgcccaagcggagctccaacaaggaccgacacaccaaggtcgacggcaggggccggcggatccggatgcccgcgctctgcgccgcgcggatcttccagctcacgcgggaactcggccacaagtccgacggcgagaccgtccagtggctgctgcagcaggccgagccggccatcgtcgccgccaccggcacgggcaccataccggcgtccgcgctcgcctccgtcgcgccctcgctcccgtcgcccacctccgggctcgccaggccgcaccaccacatgtgggcgccgtccgccggcttctcctcgccctccttcctgaactctgccgccgcgggcacgggcgatgccgccggtatcatgcagcggatggggatccccgcgggcttcgagctgccgggagcctccgccgccggagccaccctcggcgccggcggccacatcggctttgcgcccatgttcgctggacacgccgccgccatgccggggctcgagctcgggctatcgcaggacggccacatcggcgtgctcgccgcgcagtcgatcagccagttctaccaccaggtgggtgctgccgccggcggcggcggccagatgcatcacgcgcacgggcaccatcatcaccatcaccagcagcaggaggacggggaggacgaccgcgaggacggcgagtccgatgacgagtctgggcagtagtagtgtaaccgttcaaccttttgcgttgctgaatcttccctcaagttggaaggagagaaaagtgtatgcgtgcagccacgggatgcttctgctactcttggactgttgttggtcgagttctgatggatttttgtgttcatttttttctcgtgtggtatccaaactcaacggaggcctctcttgctgtgaggacttgcggattcgagatcatcctcagttcttcctacaatctcatggagtggatgatcgccacagccttctctccgacttccaggtgtatactagctgagaaaatgatggattggatcgatcacccttgagtgagtgccttatttgttattgcagtgtgtagatattcaggtaattttgcagttagagaggtgttctttttattgtagtagtgatccacgttttaaaacaatcaaggtattctcctccacaggctgtctatgcaatgcaagtatagtacaattctagttcatgaccacgcataccacttttctccttctctgatatgtctgtgatctgtttctgactagatattcaggtaattttgcagttagagaggtgttctttttattggagtaaacatccacgttttaaaacaatcaaggtattcgccggcaattcgaccatcctccacaggctgtctatgcatcataaacatgatacgtatacaactcgagggggggcccggtaaaa

SEQ ID NO: 3696 - DNA, 1833 bp, Zea mays
  Clone ID: TF_ZmC456_3
ttctctctcttctcttcgattctctttctctctctccttcccccgccccctcgcctcccctctcccacccccaccaagcaccgccggtcactatccctccttggtcttctccctcctcagagcagggaggggaagcggaagagggaggcgagagcacgggaaacctgatctgatttgcttttggtcgccacaagagaagggagttggtgcagtttgtaggcgtgcctctgtgtctccgtgtgtgtggagatggaccccaagttccccacacccctagcgctaaacaaaacggagcccaccaccgcgacgaccaccaccacctcgaccgcgcagcatcatcagctggatcctaaggactaccagcagcagacggcgcagcaccaggagcagcagcagcaccaccatcacccccacctgcaaatccaaatccaccagccgccgccgccgccgcaggacgggggcggcggagtgaaggagcagcagcagctgctgcaggtggtggcgcagcccggggatcggaggcagcaggcgctcgcccccaagcggagctccaacaaggaccgccacaccaaggtcgacggcaggggccgccggatccggatgccggcgctctgcgccgcgcggatcttccagctcacgcgggagctcggccacaagtccgacggcgagactgtgcagtggctgctgcagcaggccgagccggccatcgtcgccgccaccggcacgggcaccataccggcgtccgcgctcgcctccgtcgcgccctcgctcccgtcgcctacctccgggctcgccaggccgcaccaccaccacccgcaccacatgtgggcgccgtccgccggcttctcctcgccctccttcctgaattccgcgggcgcgggcgacggcaccggtatcggcggcatcatgcagcggatgggggtccccgcgggcctggagctgccgggaggcggcgccgccggcggccacatcggctttgcgcccatgttcgctggacacgccgcggccatgccggggctcgagctcggcctctcgcaggacggtcacatcggcgtgctcgccgcgcagtcgatcagccagttctaccaccaggtgggtgccgctgccggcggcagtggccagatgcagcacccgcacgggcaccagcatcaccatcatcagcagcaggaggacggggaggacgaccgcgaggacggcgagtctgatgacgagtctgggcagtagtgtagtcgttcaaccttgcgttttctgggtcttccctcaagtggaggaggagagaaaagtgtatgcgtgcagccacggaatgcttctgctactcctggattcttgttggtcgatggatttttatgttttttttttctctcgtgtggtatccaaactcggcggaggcctctcttgctgtgaagacttgcgggctcaagatcatcctcacttcttcctacaatctcatggggtggatgatcgccacagccttctctccgacttccaggtgtataatagctgaaaacttgatggattggaccaatcacccttgagtgagtgccttatttgttatattgcaaagtgtgtagatattcaggtaattttgcagttagagaggtgttctttttattggagtaaacatccacgttttaaaacaatcaaggtattcgccggcaattcgaccatcctccacaggctgtctatgcatcataaacatgatacgtatacaattctagtccatgatcactcaaaaaaaaattttcctcccctaatacgtctggtctgtttctgacgagatttcttcttcttttgtgtgatgaaacatgcacgtcctagttttttgcttgaatc

SEQ ID NO: 3697 - DNA, 741 bp, Zea mays
  unsure (1)..(741): unsure at all n locations
  Clone ID: TF_LIB5026-027-Q1-XP1-H8
gccggccgggctgcagtcactctcccccgtcacctcaaaaatctatccaaccccaccggtccaccaccgccagccacctctccctcgctctcactcaggtcccccgcaacacgacgagaggcagcaggaccggaaggcgccatggccaccacccgcgacgtctccgccgcctccgcggccgccatgttccacgtgtaccagcccatgccgatgccatccacggcggcggcccccgcgaaggcgggcaagaaggagggcggcaaggaccggcacagcaaggtgaacgggcgcgggcggcgcgtgcggatgccgatcgtgtgcgcggcgcgcgtgttccagctgacccgcgagctggggctcaagtcggacgggcagaccatcgagtggctgctccgccaggccgagccctccatcgtggccgccacgggctccggcaccaccccggccgtcttcgtctcctcctccgcgccgtccacgtcctcctcctcccactcccactcccactaccagcaccagcagcagcagcaggccaccgtcgtcgtcctgggcaagcgcccgcgcgaggaaggcggcgagnccgcggcggcgtccgtgccggcgttctgggcggcggcgccgcggacgacggcggcagcggacgccagctggggcttctcgccgctggaggnccagcaggcggcggcggggtacgtgcccatggcacaggcgcagcagcagcagcagcaacaccaccacctcaac

SEQ ID NO: 3698 - DNA, 417 bp, Zea mays
  unsure (1)..(417): unsure at all n locations
  Clone ID: TF_5268663
cgcggcgcgggtgttccagctgacccgcgagctcggccacaagtccgacggcgagaccatcgagtggctgctgcagcaggcggagccggccatcctggcggctaccggcaccggcaccatcccggccaactactcctcgcttaacatctccatccgctccggcgccgccgcccccgccgcccgcgccgcgccgttcccggcgctcgcgctccacccgcaccaccaccaccaggcggcccccgcgcacgacatgtccgncatgatggctgggtaccatcaccaccttctcccgccgcagccggagccgcaggaggaccccagcgccggcgacgcctacatgcggaagcgctaccgggaggacctgttcaaggaggacgacgagcgccaggatccgagcgcgcccaaagcgcgcgagca

SEQ ID NO: 3699 - DNA, 1443 bp, Zea mays
  Clone ID: TF_ZmC1215_1
ccgggctagctccggcacacgaaggtggacgggcgcgggacgcgcatccggatgcctgcaatttggcggctcgggtgttccagatgaccgatattcctccagctccctgagcaggaaaaaaacatctttgtgtggctgcagcacagcgggtctaatcggctatggacgccaccggagatgccggcggaggtcgccgccccaacttccctttgcagcttctggagaagaaggaggaacagccttgctccacgtccccagcagctgctgtgggtgctggggctgctgggtcgggagagatgcagatgaagaaggtggcgccgccgaaacgcacatcgagcaaggaccggcacacgaaggtggacgggcgcgggcggcgcatccggatgccggcaatctgcgcagctcgggtgttccagctgacgagggagctggggcacaggacggacggcgagacaatcgagtggctgctgcagcaggcggagcccgcggtgatcgcggccacgggcaccggcaccatcccggccaacttcacctcgctcaacatttctctccgctcctcgggctcctccttctccatcccagcgcacctccgtgctgccggttcgcccggcccacgcttcagcggcgcgcggggagacccgtgggagcgcgtcgtaggcctcgggttcggcggcgccgagggtcctccatctgctacttcgtctccgctgctgctaagcttccactccggcagcgtcggccttgacgtgtcatcaccgtcgtcgtcgtctgctgccgccaactccgacctgtccaagaaacggcggtgggagcaagaaatgcagcagcagcagcagcagcaataccagcagcagatggccgggtacacgcagagccaaatgccaggaaccgtgtggatggtgccgagcagcaacgctcaggccgcagcagcggctggcggaggcggcagcagcagcaacgagtcgatctggacgttcccgccgcaaccaggaagcggcgacggcggcgcggcgcccgtgtaccgcggcgtgccgagtgggctacatttcatgaatttccccgcgccgatggcgctgatccccggtgggcagcagctcgggctcggccacgaaaatggcggcagcagcagcggaggcgagggccacatgggggtcctcgccgcgctcaacgcgtaccgggcgcatgccgtcacggtggctgcgccggcggcgcagaacggagcggaaggcggctctagtcagcagcagcagcgtggcggcggcgagcgacaagacagcatgagccccagcgacgacgactcgtaggtcttctcggaggcttgtgcatgcactggtccgctaaggcgtccctcctgtttttaatctgcgcttctcttgacttatcgtttgcgttttcttcggtttgcgttattatagccttctctggctccttcacattctatag

SEQ ID NO: 3700 - DNA, 584 bp, Zea mays
  Clone ID: TF_LIB5046-008-R1-K1-G3
agagatcaccacactgctcttagtgccaggacctagagaggggagcgtggagagggcatcagggggccttggagtcccatcagtaaagcacatgtttcctttctgtgattcctcaagccccatggacttaccgctttaccaacaactgcagctaagcccgtcttccccaaagacggaccaatccagcagcttctactgctacccatgctcccctcccttcgccgccgccgacgccagctttcccctcagctaccagatcggtagtgccgcggccgccgacgccacccctccacaagccgtgatcaactcgccggctacagagctgggcgcctgcgccagtggtgcagaaggatccggcgccagcctcgacagggcggctgccgcggcgaggaaagaccggcacagcaagatatgcaccgccggcgggatgagggaccgccggatgcggctctcccttgacgtcgcgcgcaaattcttcgcgctgcaggacatgcttggcttcgacaaggcaagcaagacggtacagtggctcctcaacacgtccaagtccgccatccaggagatcatggccgacgacgcgtctt

SEQ ID NO: 3701 - DNA, 922 bp, Zea mays
  Clone ID: TF_ZmC445848_1
aattcggcacgaggctgagcttcccttttcctccgtcccgtcacgcctgattgcctcgtttgtcagtcatcactagccgccacccaccaccaccaccgttgctggcggcagtcactccagtcagcccctcctccctctacgctccccaaaaatcgcgcctcccgagttcgtccgcccgatcaaccgccgccctcgccagtcgccacgccagatctgacgacgacggacctcaccgccgcgccgatcgcttgctctcgtcccgtcccgcacgcaccctcattcgcacacccaccaccactccgattacttcgtacgcgccctccgaattgcgcccgtccgggtgggaagccgacgccgcgggcggcaatgcggggcgtgccggccggggggacgtggtaggggtccgccgtcgccgccgccaccgccgcgatggaggtggaggccgtgggctgcgtcggcgcggggggcaagcgggcgcgggcgaaaggcgcgggcgcggagccggagcctaagcgccgcgcggtggcgatggccgtgccggcgcccgccgccgcgccgtgggcgcagcagcaccctgcctcgcggatctaccgcatctcccggggctccggcggcaaggaccgccacagcaaggtgtacacggacaagggcatccgggaccgccgcgtccgcctctccgtcgccaccgtcatccagttctacgacctgcaggaccgcctcggctacgaccagcccagcaaggccatcgagtggctcatcaggggcgccggcgacgccatcgacaagctcccctcgctcgacaccgccggaagcttacccgcgcacccggccttcgccaaggaccacgccccgcctgctggtgacaacgacgaccaccagcagcagcagcagctcacgaggtccggatgcaacagcacgtccg

SEQ ID NO: 3702 - DNA, 678 bp, Zea mays
  Clone ID: TF_ZmC8497_1
cattgggtacctcgaggccggccgggtgtaaaaccgtccgacgcgagccccacctccgcgctcgcacgcggaaggagagggacgagggagccaccgtcaccgagcgcggttacaagaaaatccaatctctcccccacgctcgtttcgactcgcgccatggaggcgcaggcgcaggacaacagggcggaggatggggacggcgcgcggcaacacgtagccggcggcgtcgcggcgacggggatggctatgggcgcgatccccatgcacgggttcatggtcccgaagccagagccggtggagttcttcggcgggatggccgtggtgcgaagcaagccgccgccgcggaaccgcgaccggcacaccaaggtggagggccgggggcggcggatccgcatgcccgcggcgtgcgcggccaggatcttccagctgacgcgggagctagggcacaagtccgacggcgagaccatccggtggctgctgcagcagtcggagcccgccatcatcgccgccaccggcaccggcacggtcccggcgatcgcgaccacggtcgacggcgtgctccgcatccccacgcagtcctcgtcgtcctccagcccctcgtccctcaccaccgtggtcgacggcgacgaggcgtccgccaagcgccgccggaagctgcagccgacgcgagcggccctc

SEQ ID NO: 3703 - DNA, 733 bp, Zea mays
  Clone ID: TF_ZmC212532_2
ctctcattctcgtctccccccatgctagctgctgcagctctcaagctagctggcagctagggtttacaccgatccggggtccggtcgccgccggccggcggaagcgggcaatcgagctccgcgacgtcgagatctgcttaattgctaggtggtcgccgcgccggcagccccggcacagagaaagtcaattgctctttgcaggggttgctgctcgttttaaaagagatcctttgcagtggatgatacaccgacacgcagctagccagcagggacaccgcgagatggcgggcgccgtcgggctaacaagacgatgataaggggcggcaaccaccagcaggcggcggacgtcgaggaggagctagcccggaacagcaggcacgccgccgccgtggcgacgtcgcggcaatggtcggcgcagacggagtcgcgcatcgtgcgcgtctcccgcgtcttcggcggcaaggaccgccacagcaaggtgaagaccgtcaagggcctgcgcgaccggcgggtgcgcctctccgtgccgacggcgatccagctctacgacctgcaggaccgcctcggcctcaaccagcctagcaaggtcgtcgactggctgctcaacgccgcgcgccacgagatcgacaagctgccgccgctgcagttcccgccgcaggacctcatggttggtcacctgacgccccacaacatgccgctgatggtgcacgacgagaagttcggacacctcgcc

SEQ ID NO: 3704 - DNA, 869 bp, Zea mays
  Clone ID: TF_ZmC819_2
cctcgaggccggcccgccgccagctgggacatcgtcccgtttgattctcagccgtagtaggagccatggtcgaagctatttgatctatctctgagctgagctgagctgggccggcaatttgatgatgcttgtgtgtgtgatcatgagtggataataagagatgataagcggcaacctcaccaatgaagacctgggggccgggcgcacgcgcaccaaggccgaggggccgacgaccgcggccgtggccggcgccgtcgtcgcaaagagtcccgtgctgccgagctcccggcaatggccgccgtcaacggagtccaggatcgtgcgcgtgtcgcgggtcttcggcggcaaggaccggcacagcaaggtgaggacggtcaaggggctgcgcgaccggcgcgtgcggctgtccgtgccgacggcgatacagctctacgagctccaggaccggctgggcctcagccagccgagcaaggtggtggactggctgctcgacgccgcgcagcacgagatcgacaagctgcctccgcttcagttcccaccgcaggcagcgcaggacctcgtcgcccatctgccgccgccatccatggtggcgcccttcgcagccgaccgggccgaggccgacggcgacaaacgccactgccacgccggcgtcaaagggctcatgggcctcaacaattccatccgcctcgtcaacgccaccatgccgctggctcacggcttgtactacacgcccggcgagtcttggaccgtaatgccgatgatgccgccgccctcatcacggctcacgactcgcctcatctctgctgtctctctgctccgctcagctcgttatgtattgctatgctggctctgtgggagagagtgttgat

SEQ ID NO: 3705 - DNA, 2236 bp, Zea mays
  Clone ID: TF_ZmC1447_2
atggcggcggcgggcgtttctccggcatttctccttcgtttgctctcccgatgttcagatctgagcgggttttgtgtcgggcggctcaagttccagccgcggtgtcgggtacctcggcaaggtcgaagtgatcgcagtcacttcgccctttcactgaccgacctgataggaaaacagcgccgctcgcgctgctccgactgctgtgccacccaccggggtaagactgacaacagccgagttcagcctcgggggcaacaggaagctgcgcctcgcccgaccttaggcctcggcctcgggaggaggtctccgcctcgcccgaccccaggaagctccgcctcgcccgaccttaggcctcggcctcgaaaggaggtctccgcctcgcccgaccccaaggctcggactcagcttcggcctcgggaggaatcgcgtcctcgcccgaccccggcctcggcctcaggagaagtctccgcctcgcccgaccttgggctcggaccgaccgcgccacaggggatacatcattaccctaccctagctaactcaggctacgagggaacaagatcggcgtcccatctggctcgccccggcgtcgcagcaccggcccgagtactccgttgtcccgttgtccgctcccactccactccggcccagctgcgtgctgctcccgtgctccggcaccggcaggcggataagcccagcaggcaagcatgcaggagactaggagaggaggagagctcagctgcagcactgcacgcgcgctcccctccccttgctggccaaatcgatcggtccccttcaggctccaggctccggagcttgctttacttcagatttgcgcgattccccttccaaaaagaaccaatcggtttgctactagatcggtgcgcgaggctagactttttctgggaattcaaccggcgaatgggcagggacggcggccgcgtgcgcatgagccgcgtattggcaactggggatgagcgcggcatgggcgaggtagcaggcgtggagcgcgccgcctgcaagcgcccgcgcggcgcgctcgacggcggcgggtcggcgtcggcggccgcgtggccggcgtgccgggtggcgcgcgccgcggccggcggcaaggaccgccacagtaaggtggtgacggcgcgggggctccgggaccgccgcgtccgcctctcggtgcccacggccatccagttctacgacatccaggaccgcctcggcgtcgaccagcccagcaaggccatcgagtggctcatccgcgccgccgccgccgccatcgacggcctcccgtcgctcgactgctccttcgtcttcccccacgccgccgcctctccgccgggcggcgctgccgacgacgccgagctcagcacctccgagaccagcaagagctccgttctctcgcttgccaacgccccggttgacaacaccgccgccaccgccgctcactctcagcaagccaatcacgcctacaacaacaacgccgccgccggtggtggcgcgttcgccgagctgatcctgcactgctccgccaacaacagcagcaagccaatgcagcagcacccgacgctcgcttactacgccacccagcccccgaacgctcactccgcgtcggccatgtccttcgagacgatgctgccccacttctccttccttcaggagcagtctcaccacgcaatcgccttcgaccggggcacacttcagtccaatgccgccgttgctgcgccgctgtggccgacgtctcagcatgcgtgcctgctgcagaggttcgccgcttctccagctgatgccaccggactgccgtcgttctttcttggaagcggtgctgctggtgcttctccggtggtgccggccaatgcagagccgaggcttcagctctgggacttcaagcaggaacggaagacctgatgcattccagaagcaaattcattccatcataaggctgcaacaccatctagtggagggtgttctggacaaagaaagcttgtaccttaaaacaggagcattcaagaagctggagtggttgtatgaagagcttttgaactgcttaagcattagtgtagctttggtgctttgtgactgatcagatatggaacagctagagtgatatagatgtagggtttttgaacaatagttggagtgatatgaaacattagtgatctagttgtgaatgatattataattgtaatacttttgtgaacatataattgtggtgcttttgtgtttaaaaaaaaaggaaagaaaa

SEQ ID NO: 3706 - DNA, 663 bp, Zea mays
  Clone ID: TF_ZM4320.C3.o16.fg
atggccaccacccgcgaggtctccagcagcgccgccgccatgttccacgtctaccagacgataccgatgccgacgccatcgacggcagcggccggcggcggcggcgccatggtgtcggtgtcggcccccgcgaagccgggcaagaaggagggcggcggcaaggaccggcacagcaaggtgaacgggcgcgggcggcgcgtgcgcatgccgatcgtgtgcgcggcgcgcgtgttccagctcacccgcgagctggggctcaagtccgacggccagaccattgagtggctgctccgccaggccgagccctccatcgtggccgccacgggctccggcaccaccccggccgtcttcgtctcctcctccgcgccgtccacgttctcctcctcctcccactaccaccaccagcagcaggccaccgtcgtcctcggcaagcgcccgcgcgaggaaggcgacgccgcggggtccgtgttctgggccgcgctgccggcggcgccgcgggccacggaggcctggggcttctcgccgctggaggcgcaggcggcggcggccgcggccgcggcggcgtacgtcccgatggcgcaggcgcaggcgcagcaccaccacctcaacctgctcgccgcgctctccggcgccgcgaggcgcgccgaggaggagacccggtga

SEQ ID NO: 3707 - DNA, 1192 bp, Zea mays
  Clone ID: TF_ZmC12025_1
gctgggggtgtggttttttttttacaaaaaaaaagaagccgcttttataaatggctccacaccggaggggccaaggactggcgcggccctatccctatccggctatccccatcggcttcctccccacaagtcgtgtccaccaccaacaaactcgtggggtgggtgccacgagacagtgcgtggccatggcctctcgcgacggcgccaccttccaagtgtaccgggccatgcccgcgccgacgccgatgtctctggcgtccgccgctccagccgcagccgccgccgacgccgcggcgccgaagaaggcgggcgcgggcgcgggaaaggaccggcacagcaaggtgaacgggcgcgggcggcgcgtgcggatgccgatcgtgtgcgcggcgcgcgtgttccagctgacccgcgagctggggctcaagtcggacgggcagaccatcgagtggctgctccggcaggccgagccctcgatcctggcggccacggggtccggcaccacccccgccgtcttctcctgctcctccgcaccgtccacctccgcggccagcgccggtgccggcgccggcgccggtgtctccctcccgctcctcgggaagcgcccgcgcgaggagcacgagccggcggtggcggtggcagtggcgccggcgccgttctgggccaccctgcaggcgcggcccgtggcggcggcgtgggggctctcgccggcgcaggaggcggcggcgcaggcgtacgcgtcggtggcggcgcagggacaccacctcaacctgctctccgtgctctccggcgccgcgaggcagtcggaggaggagtcccggtgactgcctgcatgccgccgccgccgcactgttgctacgtaatcgcatgcgtcgacgcgtggtggcatgccgcgcgcatgcgtctcgtttccgtgcatctccggggggtgcgttgcgcgtgttttccctgtggttttgcggtgtgagaggaacgcggcgagctggacaaggaggatccagagcgcgagatcggatcggggttagcggctgtagatagcattcgtcaggttcgtgtttgtgataatgagctcgccgtagcgcgcgcggtggttatgtggtgtggttatgtatgcatgcatgcatgccgaattgtcaactgatctgaatcctaacactaaataatgcattgcacgtcccggtgtgtgcaattccgc

SEQ ID NO: 3708 - DNA, 534 bp, Zea mays
  Clone ID: TF_ZmC386130_1
atcgtgcggtctgccgccgggcgcaaggaccgccacagcaaggtgtgcaccgcgcgcgggctgcgcgaccgccgtgtccgcctcgccgcgcacacggccatccggttctacgacgtgcaggaccggctaggctacgaccgccccagcaaagccgtcgactggctcatccgtaacgctaaggccgccatcgacgagctttcggccgaccgggaagaggggcagcctgccgcggaggcagcggatgccactactaccgagccggccgagcaggtgacctcgacgtcctacgggttcgccatcggtggtgtggccggctccttcatgccacattcggtcggtgccgatgacgtctccggctccggctccggctccggctccggcaacgtcaagtctttgttcccctcgtcgtcgacaacgagcactacccccacccaggacgagtacaggggctccccgccggaccttctgtcgcgcacgaccagcagcaaccagcctcaggagctttgcctcactctccagtctaccaataaccac

SEQ ID NO: 3709 - DNA, 584 bp, Zea mays
  unsure (1)..(584): unsure at all n locations
  Clone ID: TF_LIB3354-089-Q6-N6-C3
canacggacgccgcggcgatggtggtggaggccatgggcggcgccgggggcaagcggggcagggccaagggcgcgggcgcgggcgccgagccggagcccaagctacgcgcgatggcggtggccgtgccgtctcccgccgcctcgccgtgggcgcagcagcacccggcctcgcggatctgccgcgtttcccgggcctcctgcggcaaggaccgtcacagcaaggtgtacacggacaagggcattagggaccgcctcgtcacgatctctaccgtcgccaccgccatccagttctacgacctgcatgaccgtctcggctacgaccagcccatcaaggccatcgagtggctcatcagggccgctgccgaggccatcgacaagctctcctcgctcgacgcctccgtgggcttccccgcgcacctggccttcgccaaggaccactcctagcctgtcggtgacgacgacgaccaccaccaccagcagcagcatctcacgaggtccggatgcagcagtacgtccgagaccagcaagggctacgtactgtccctctcccgctccgagagccgggtcaaggcgcgggagcgcgc

SEQ ID NO: 3710 - DNA, 1334 bp, Zea mays
  Clone ID: TF_2051978
gccttggagtcccatcagtaaagcacatgtttcctttctgtgattcctcaagccccatggacttaccgctttaccaacaactgcagctaagcccgtcttccccaaagacggaccaatccagcagcttctactgctacccatgctcccctcccttcgccgccgccgacgccagctttcccctcagctaccagatcggtagtgccgcggccgccgacgccacccctccacaagccgtgatcaactcgccggacctgccggtgcaggcgctgatggaccacgcgccggcgccggctacagagctgggcgcctgcgccagtggtgcagaaggatccggcgccagcctcgacagggcggctgccgcggcgaggaaagaccggcacagcaagatatgcaccgccggcgggatgagggaccgccggatgcggctctcccttgacgtcgcgcgcaaattcttcgcgctgcaggacatgcttggcttcgacaaggcaagcaagacggtacagtggctcctcaacacgtccaagtccgccatccaggagatcatggccgacgacgcgtcttcggagtgcgtggaggacggctccagcagcctctccgtcgacggcaagcacaacccggcagagcagctgggaggaggaggagatcagaagcccaagggtaattgccgcggcgaggggaagaagccggccaaggcaagtaaagcggcggccaccccgaagccgccaagaaaatcggccaataacgcacaccaggtccccgacaaggagacgagggcgaaagcgagggagagggcgagggagcggaccaaggagaagcaccggatgcgctgggtaaagcttgcgtccgcaattgacgtggaggcggcggctgcctcggtgccgagcgacaggccgagctcgaacaatttgagccaccactcatcgttgtccatgaatatgccttgtgctgccgctgaattggaggagagggagaggtgttcatcagctctcagcaatagatcagcaggtaggatgcaagaaatcacaggggcgagcgacgtggtcctgggctttggcaacggaggatacggcgacggcggcggcaactactactgccaagagcaatgggaactcggtggagtcgtctttcagcagaactcacgcttctactgaacactacgggcgcactagacttcgtaattggctgtgtgacgatgaactaagtttggtcatcgcatgatgatgtattatagctagctagcatgcactgtggcgttgattcaataatggaattaatcggtgtcgtcgatttggtgatttccgaactgaaaaaaaaaaaaaaaaaaaaaaaaaaaa

SEQ ID NO: 3711 - DNA, 661 bp, Zea mays
  Clone ID: TF_ZmC585932_1
tccccgaagagtgaaaggcgtcttcgtctcgacttgcttcccctccgagagaccgacctacccatccaatccatacactttcctgcaaagggtaggggatagacagggattctaaggctccgctccacaccaagagtagcgaagatctctgatttgagagagggaagcatcgaatcagccgacaggaggaggtctcagtcaccaacccagcagcagccatgagtgccatgaagttttgccgtgaatgcaacaacatcttgtatcccaaggaggaccgggaccagaaggtgctcctcttcgcctgcaggaactgcgaccaccaggaggttgcagacaacaactgtgtctaccgcaacgtggtgcaccacagcgctggagagttcacccaggtgctccaggacgtcgccggcgacccaacacttccccgcaccaaggaagtccggtgcgccgtctgtggtcacggcgaagctgtcttcttccaggccaccgcgagaggtgaggatgggatgacgctcttcttcgtctgctgcaacccgagctgcggtcatcggtggagagaatgatgtgtccatcacccaaccgatgacggatttcaccgatgcacagtctgagagaagttgttttttctttcttcccaagagatattttccccagtagcatg

SEQ ID NO: 3712 - DNA, 662 bp, Zea mays
  Clone ID: TF_LIB5116-028-A1-PF1-D6
cattacaggaaataagagatctactggaccaggtaaatgcatgcgacccatatagagttgctgtgacagtggagtcggccttgtttgagaggatcgggcgttccactgggacccacaaggtgaaatacaggtcgatactgttcaacctaaaggcggacaacaaccctgacttccggcggagggtgctgctgggcgaggtgaggcccgggagcctggtggatatgccagcggacgagatggcgagcgacgctcggaagctggagaaccagcagatcaaggagaaggccctgtttgactgcgagcgcgcgtcggcgcccaaggcgtcgacggaccagttcaagtgcgggcggtgtgggcagcgcaagacgacctactaccagctgcagacgcggagtgccgacgagcccatgacgacgtttgtgacgtgcgtcaactgcaacaaccactggaagttctgctgagcgctgctgcggacttgtcggaccgctagcgcgtttttcctgttagtgatgccgtctcagtcttgacaggtaggttgggttggtcctgtttttcgtatgcttaggaggatactgttttcgtctgttgttttttctgtgtttgggaaccctgatttattcagattgtgtactagttgaccgcataaatgttgttggatgaag

SEQ ID NO: 3713 - DNA, 384 bp, Zea mays
  Clone ID: TF_ZmC176903_1
cgagacttgggcaagcgagtcatgacaggtgatatctcgcccgacaggtttgtcaacatgtcggatgaggagctcaagagcgaggatcaacgcaagatggaaatcgagctggagaaggagaacatgaagaaggcccaggtaccaatggccgagaagagcatcagtgacagtctggaatgcggcaagtgtaagaagaagcgtgtcagctacacccaggcgcagacacgaagtgccgatgaaccgatgacgacattttgcgagtgtatgaactgcggtaatcgttggaagttctcgtaaagtggcaacgagagaggagttttacggttgatagcgccacgtctgctccaaggggttgaaagacagcatttcaacgagctttttatt

SEQ ID NO: 3714 - DNA, 1013 bp, Zea mays
  Clone ID: TF_ZmC28241_1
gcaggtcggggcgcccaagatcccccctcccactcaacgacttgctgcaaagaggaatacgattcagcttagctcagctccaccaccaccaagaacaagatctcgacgaagcagccagacgacaggcaggtagcaccggggtcaacgcggcagacaaacaggctctcccgctcgtcagctagcagccatgagtaccatgaagttttgccgtgaatgcaacaacatcctgtaccccaaggaggaccgggagcagaaggtgctcctctacgcctgccggaactgcgaccaccaggaggtcgcggacaacaactgcgtgtaccggaacgtggtgcaccacagcgccggggagttcacccaggtgctccaggacgtggccggcgaccccacgctgccccgcaccaagtccgtgcgctgctcctcctgcggccacggcgaggccgtcttcttccaggccactgcgagaggggaggaagggatgacgctcttcttcgtctgctgcaacccgagctgcggcaaccgttggagagaataatggacggttcctctggcgcaacagccaggacgacatgattttttttgcaagattttcatccgacagacctgctgctcccccccatatgagcatgtcaactgattggattggattggattggattgtactactatgttcccagtgcgttcagacatttcaataacttgccggcagggtaaacttccctgtggcctgtgcttcattcatttgcatcaaagaaaggatgagatgaggaaaactttttccatgttcgaatgattccctctgcacctaaaggatgagatgaagaaaggatgagatgaggaaaattaccgtcaggtgaggtggagaaactgtcctcacttcacatgacacagggttatgcaagttctctctctatatttctgttttctttttaccaatttctgcagctcatggttatgcaagtacaaattcttgaacagccacgtgcttaattaaaaaaaaaaaaaaaaaaaaaaaa

SEQ ID NO: 3715 - DNA, 1220 bp, Zea mays
  Clone ID: TF_ZmC2003_1
atgggtatgagaatccaatcttatgatgaccagttacttcatttagctgctgacatagctcaaaggttgttgcccgtatttgacactcctaccccggccgggatcggttcagaccagacccaatacacgtttctttaccctgaacttttcgctactccatcgagggcagagccgccgccgtttcttcaatctcgcagcgccggcgcttcatcttccctcccttttttactcgcgatcggcacgcaggcggcggctgcggcgctcaggctcgggctctgcgactgcgtcagcggcttcccctccggcctctcgccagtcaccgcgcgccctcggccccggtcctctgcacaccggccggtgaccctgcgtgcttgcctttctcctcccgcctccggtggatcgtcaacggcgcccggccccggcggcagcgctgcgcgcgtctcgagggcagcgggagccagcagccgctgctccaccaaggcggaagcattttggaaccctgaactctgggctttaagaagacactactgctgcaaccatgagcaccatgaagttttgtcgcgagtgcaacaacattctgtaccccaaggaggacagggacaggcgcaccctgttctttgcatgtcgcaactgcgagcatcaggaggtctctgacaataactgtgtctatcggaacgaggtgcaccatactgctggggagcgaacacaggtcttgcaggatgtagcttctgatccaactcttcccagaaccaagactgtccgctgcaatctctgtgggcatggagaggctgttttcttccaggccgcagcaagaggggaggaggggatgaccctgttctttgtgtgctgcagccctgattgtggtcatcggtggagggaatgatgcgatgaaatcttcgctctaatagttgtttcatcagagcatgaaacttaacttgttttgtagttttcttggactatgtatttcgaatctgacctaagattaatgagagaatgtctttccaataaaaaattaaaaaaaaaaaaaaaaaaaaaaaaaaaaaaaaaaaaaaaaaaaaaaaaaaaaaaaaaaaaaaaaaaaaaaaaaaaaaaaaaaaaaaaaaaaaaaaaaaaaaaaaaaaaaagggggggggtcgttttaaaaggaaccaaattttatttacccggttgctatggaaagataaataatttttttttttggggggtcccttaaaaattaa

SEQ ID NO: 3716 - DNA, 623 bp, Zea mays
  Clone ID: TF_LIB4828-016-R1-N1-F12
ccggccgggggaccaagccctataaaccagggtttttgtaaggaaaatccccgtcgttctcgcgtctggagctcggcggcggagcagggcggcagggggagggcgatggaattctgcccggtgtgtgggattctgctgcagatcgatccgggcaccggaagccaccgcctgcgcctcttctgccccgtctgcccctacgtctgccccatcctgaacaagatcgtgaagaaggcgaggttggtcaaaaaggaggtggagcccatctccagcacggcggatgagatgaaatcggcccctaagaccgcagttacatgccaaagatgcaaccatggagaagcatacttcaagcagatgcagattcgatcagctgatgaaccgatgacaacaatatacaggtgttgcaaagaagaatgccagcatgaatggagagaggactgaccatagcattcgcactttgcttacacttcgctccctgtgcttcttcagttttgagtgttgggatgtcctgttgcacatgtaatgcttctaatcagcgtatacttaagtacaaatttttggaaatgtatgttctatactatggcatcgctttttggctacaaaaaaaaaaaaaaaaatttgcggcc

SEQ ID NO: 3717 - DNA, 820 bp, Zea mays
  Clone ID: TF_ZmC10090_1
cactccatagggcgattgggatcctcgaggccggccgggccattgggccaacatcgggcccattaaattgatatactcgagcacgcccgggacggcggcgctcggttccgtggcggggagtgttttccaggcggcggcgcggtagcgtgaaaccgggcgaccgagcaagcgacggccatggcgttctggcagacgcgcgattttctcttctgtggcatatgcggcaccctcctcaccttcgactccgtccgctccgcctcctgccctctatgcggcttcaagcgcgatgccaaagaaattgaagggaaagaaatacagtacacgatgaccgccgaggatattcgaagagggttaaagacacaaacggaggacgttgttgggcaaagaccagtgacaaataaagcctgtccaaaatgcgaccatccaaaagctgaattttacaacatacagatgcgttcagcagatgagggagagacgacgttctacatgtgtaaaggatgcggctgtaatttcaaagacgaatgaggagttatcctaccacttctacggatatatggcattggtgccgaagaaatttccagcgttgacagactagtactccctccgccctttttttatttatcatcgtctagttcaaaaatgaacggccgataaatattcgagaattgcaatctactccttgacattgttacattacatggatgcgcagatccatgcgttgtgcaaactttcttttgatggaacctgttttgtattttattcgagtgtgtagatgtctacttgcaacctttttacatctattccaaactataagacgttt

SEQ ID NO: 3718 - DNA, 774 bp, Zea mays
  Clone ID: TF_ZmC206_1
ccggccgggaaaccgacccatcatatcatcaccctgagagatccgtcccgccaatacggaccaagcccaataaaccagggtttttgtaaggaaaatccccgtcgttctcgcgtctggagctcggcggcggagcagggcggcagggggagggcgatggaattctgcccggtgtgtgggattctgctgcagatcgatccgggcaccggaagccaccgcctgcgcctcttctgccccgtctgcccctacgtctgccccatcctgaacaagatcgtgaagaaggcgaggttggtcaaaaaggaggtggagcccatctccagcacggcggatgagatgaaatcggcccctaagaccgcagttacatgccaaagatgcaaccatggagaagcatacttcaagcagatgcagattcgatcagctgatgaaccgatgacaacaatatacaggtgttgcaaagaagaatgccagcatgaatggagagaggactgaccatagcattcgcactttgcttacacttcgctccctgtgcttcttcagttttgagtgttgggatgtcctgttgcacatgtaatgcttctaatcagcgtatacttaagtacaaatttttggaaatgtatgttctatactatggcatcgctttttggctgcaaaagacattgcatgacacatcatctagagttatttgtgatgatgatctcaatcatcagtgagagctcacttaaaaaaattcattgagttaaaaaaaaaaaccaatgcttttttggaaaatttgcggtc

SEQ ID NO: 3719 - DNA, 584 bp, Zea mays
  Clone ID: TF_ZmC206_2
gctgacgtctggagctcggcggcggagaagggcggcagggggagggcgatggaattctgcccggtgtgtgggatgctgctgcagatcgatccgggcaccgcaagccaccgcctgcgcctcttctgctccgtctgcccctacgtctgccccatccagaacaagattgtgaagaaggcgaggttggtcaagaaggaggtggagcccatcttcagcacggcggacgagatgaagtcggcccctaagaccgcagttacatgccaaagatgcaatcatggagaagcatacttcaagcagatgcagattcgatcagctgatgaaccgatgacaacaatatacaggtgttgcaaagaggaatgccagcatgaatggagagaggactgatcttaacattcacgctttgcttacactacgctccctgtgcttcttcagtttttgagtgttgatatgtcctgttgcacatgtaatgcttcttttaatcagcgtgtacctatggcatcgctttttggttgctagagacatttcatgttgcgcttagtaggtcaatcttaacggaaagtttcattaaaaaaaaaaaaaaaggcggc

SEQ ID NO: 3720 - DNA, 1573 bp, Zea mays
  unsure (1)..(1573): unsure at all n locations
  Clone ID: TF_ZmC11532_1
ggcgattgggtttcctcgaggccggccgggctggcctggccggtctgcctcgtccgcttctctctcacccttcctccccctcctctcctgtgggtgctccctccctctccggctctccgcctctcccccgccccccaagcccaaatcaccgcgcctcgccccacagcaccggttgcgtgggaggagggaggaaggaaggaggggaggcggctgtcgggcgagatgagcgactcctactgccccgactgcaagaagcatacggaggtggcgttcgaccattcggcgggggacacggtgtgcaccgagtgcggcctcgtcctcgaggcgcactccgtcgacgagacctccgagtggcgtaccttcgccaacgagtccaacgacaacgaccccgtccgcgtcggcggcccctccaacccgctcctcaccgacggcggcctctccaccgtcatcgccaagcccaacggcgcccagggcgacttcctctcctcctccctcggcaggtggcagaaccgcggctccaaccccgaccgatccctcatcctcgccttccgcaccatcgccaacatggctgacaggctaggtcttgtggctactattaaggaccgagcaaatgaaatcttcaagaaaattgaagatctcaagtctattaggggaagaaatcaagatgccatattagccgcatgtctatatattgcttgtagacaagaagatcgccctagaactgtgaaagaaatatgttcggttgctaatggggccacgaagaaagaaattggcagagccaaagaatttatagtgaaacaactggaagttgagatggggcaatctatggagatgggaaccattcatgctggagattttctgaggcgtttctgttcaactcttggaatgaccaatcaagctgttaacgcagccaaggaggcagttcagcgctcagaggagcttgatataaggaggagcccaatctcaattgcagccgccgtcatttacatgataacccaactctcagaggacaagaagccacttaaagatatatccttggctactggtgtggcagaaggcaccatcagaaattcgtacaaggatctgtatccctacgcctcaaggctcatcccgaatacctacgccaaggaagaagacctgaagaatctctgcacaccttaggaagctttactttttttcccttctgttatataaatcggaattagatttgtcaaagaggagtgagtgaagttgttcctgttgtgaccgactgtactgagcaatgtgtcgtcgccggcgcgcttaactttgtggatggaccaatgagaacataagttgtcatcatcagatcgaatttcttttcagagcacctaccaaataaaaaaagccgggatacgtatactcactctttagaacaagatcgggaaggacaacgggaaggcgcacatcccccacgcgcccgacgaggactncaccctgctgcgaacccactaacacgactgctaagacagggggtgcgacgcgataggggtggtcaacgcgacggacggaaaaaaggcggagaaggaggggaaggcaaaactgacactgcacg

SEQ ID NO: 3721 - DNA, 907 bp, Zea mays
  unsure (1)..(907): unsure at all n locations
  Clone ID: TF_ZmC11532_3
cctcgagggccgtgccgacnngctaacagagcanntcccaggctccccggccgggagacatctatacccccacccacccaaccttcggcagtccccatcctctcctgtgggcgctccctctccccggcccccaaatcaccgcgcctccctcgccacgcctcacagggccggttgcgtaggagaaaggagaaaggaaggaggggaggcggtcgtcgggcgagatgagcgactccttctgccccgactgcaagaagcatacggaggtggcgttcgaccactcggcgggggacatggtgtgcaccgagtgcggcctcgtcctcgaggcgcactccgtcgacgagacctccgagtggcgcaccttcgcgaacgagtccaacgacaacgaccccgtccgtgtcggtggccccaccaacccgctcctcaccgatggcggcctctccaccgtcatcgccaagcccaacggtgcgcagggcgacttcctatcctcctccctcggcaggtggcagaaccgcggctccaaccccgaccgatccctcatcctcgccttccgcaccatcgccaacatggctgaccggctaggtcttgtggctactattaaggaccgagcaaatgaaatctacaagaaagttgaagatctcaaatctatcaggggaagaaatcaagatgccatattagctgcatgcctatatattgcttgtagacaagaagatcggcctagaactgtgaaagaaatatgttcagttgctaatggggccacaaagaaagaaattggcagagcaaaagaatttatagtgaaacaactgggaagttgagatggggcaatctatggagatgggaaccattcacgctgnaattttctgagaagtttctggtcaactcttgggatgaacaatcaagctggtagggc

SEQ ID NO: 3722 - DNA, 948 bp, Zea mays
  Clone ID: TF_ZmC11532_5
agaaattcttgacttcctagatactagaattcataaccatgcaacactcagttcgtctatttttcttgatttgtgttcgattgttgcagaaatatgttcagttgctaatggggccacaaagaaagaaattggcagagcaaaagaatttatagtgaaacaactggaagttgagatggggcaatctatggagatgggaaccattcacgcttcagattttctgagacgtttctgctcaactcttgggatgaacaatcaagctgttagcgcagccaaggatgcagttcagcgctcggaggagcttgatataaggaggagcccaatctcaattgcagccgccgtcatttacatgataacccaactctcagaggacaagaagccacttaaagatatatccttggctactggtgtggcagaaggcaccatcagaaattcgtacaaggatctgtatccctacgcctcaaggctcatcccgaatacctacgccaaggaagaagacctgaagaatctctgcacaccttaggaagctttactttttttcccttctgttatataaatcggaattagatttgtcaaagaggagtgagtgaagttgttcctgttgtgaccgactgtactgagcaatgtgtcgtcgccggcgcgcttaactttgtggatggaccaatgagaacataagttgtcatcatcagatcgaatttcttttcagagcacctgccacctgaagatttttttgggatagcaaaggtgtcgttttcgtatactccctttgggaaaggatgtagatagcaagcagtccttggaagtgcacaagattttatttaaaagaacaggattctgttccccatcttcaaaaaaaaaaaacatttatccgccaccgcggtggagtttggatggctgctccattgtgttttcccctgtgactgatatacaggtattgattctggagaatct

SEQ ID NO: 3723 - DNA, 1526 bp, Zea mays
  Clone ID: TF_ZmC11532_4
tcccacgcgtccgccctaatggtgtgtttggtttgtggagtcaccatatgcttcatgaggtgatgcatcataagttcttcccataaattttggtggactcaatccactcatcatgtatatactaattattagcttatgaggaataagatgatgatggatcaactcattctattccataaaccaaataaaaaagtgaggagtgagaagaagatgaaccacttcattcttcaaaccaaacacaccctaagtgattcatgttatgtatatgtatggtagccttttttctctttttgaagatagatgacatgtttaacacttccctaaatactcattgagtcattgaacatattgttgcttcctgtgttcgatagaacaataacttatagcttaattcagctaaattactgatatgtagtactccctccattaaaaaatggtaatcatattagaccagagaaaaagtcattcaaaatagattttgaccatcaatttctcttgtaatgtaaagtcgacggtctaaaaataaataccatcttataggcacttttaacacaaatctattgatgcagattatatgctctaaactttaatggaatttgattagttggtcaaaatttatgaagtttgactttttctctggccaaatatgattaccacttctgaacggagggagtaattatttgtttttgtctttactcttcaaggaccgagcaaatgaaatctacaagaaagttgaagatctcaaatctatcaggggaagaaatcaagatgccatattagctgcatgcctatatattgcttgtagacaagaagatcggcctagaactgtgaaagaaatatgttcagttgctaatggggccacaaagaaagaaattggcagagcaaaagaatttatagtgaaacaactggaagttgagatggggcaatctatggagatgggaaccattcacgctggaaattttctgagacgtttctgctcaactcttgggatgaacaatcaagctgttagggcagcccaggatgcagttaagcactcggaggagcttgatataaggaggagcccaatctcaattgcagccgctgtcatttatatgataacccaactctcagaggacaagaagccacttaaagatatatccttggctactggtgtggcagaaggcaccatcagaaattcgtacaaggatctgtatccttatgcctcaaggctcatcccgaatacctacgccaaggaagaagacctgaagaatctctgcacaccttaggaagcttactttttccccctttctgttactacataaatcggaattagatttgtcaaagaggagtgagtgaagttgttcctcgttgtgacagtaccgggcaaggtgtcgtccccgctgtgcttaactttatgatggaatttcttttcagagcacctaccacctgaagatttgtgggatacgtatactcacttctgaaagaatgtagatagcaagcagctggacaagcacaagattttaatttaaaacatgattttgttctcc

SEQ ID NO: 3724 - DNA, 1099 bp, Zea mays
  Clone ID: TF_ZmC246942_1
ccggccgggaaaaaaaagcgggtgtgggaggttgggcaggagacgtttttttttccaccgtcgccgccgcccctgcttgccgctgcgcgcccccgcctcccacgcaggtcgtctgctccgaagccggtggccgaagctcgcgtcgccctctccctcaccggattcatcgtccgagccctcgctagagctcgtgacctcgccgtcgccggagccctcactctcactggattcgtgtcctcgccggagctcgcgctaacctgctcgaccacacctcgccgcccgcggccatctcacacccactccgcgcgaccgcggtcctctcctcacctatcggtcgttcctgtcctcgcgaggaagacgacgcctcaagctatcctccctccctctcgatctgatccggagtggctcacgttttcctattcctcgccagcggcagaggcggcaaccgtcgatccgtgtcaatcctctattagattggtatgagctgatcacccctggttgtgtagttccttctgcaatggtttactgcactcactgtgctgattactgcccctccataaaggaccctgacaaaggatacatatgttgtggtacatgtgggaaggttcttgatcaggaggtatacactgatgagcctacttttgttaaggataacacaggacagagtcgcttagctggaagtattcttgcaagcattgagtctggatattcgatttctcatcaaagaaccttagacaaaggtagggatgagattaggcagattgtcaataacttacatgtcagcggtggagaaactgtcgttagcaaggcttatcgcttctatgagctagctgtcgaccgtaattttaccaggggccgtagaacaagccatgttgcagctgcttgcctttacattgcctgcaggcaaagtaagaaggcttatcttcttattgatttctctgattatctccaaataagtgtttacgtgctaggtgctgtttttctccagctctgccaagttttgctactcgcggatcatccagttgttcagaaacttgtagatcccagccttttcatccatcgctttaccaaatgtttgctggaaaaaagagataatgct

SEQ ID NO: 3725 - DNA, 1735 bp, Zea mays
  Clone ID: TF_ZmC9889_2
gacctcgccacagccatcgatcccgccccgtctccttcccccggcgacgaagatgacgaggacccctttctccccgcgggcttcgtctccgccttctcggctttctccctcgagcgccaccccgtcctcgcccgctccgcctccaccttctctggacacctcgccgagctcgagcgcgcgctcgctgtcgactccgccaccgcggcctccaacccggaccccgccggccccatggtctccgtcgacagcctccgcgcctacctccagatcgtcgacgtcgcctccatactcaggctcgacagggacatagcggatcacgctttcgagctcttcaaggattgctcgtccgcgacttgcctcaggaatcggagcgtcgaggcgctcgcgaccgccgcgctcgtgcaggctatccgcgaggcgcagcaaccacggacgctgcaggaaatctctactgctagcaatcttcctcaaaaggagataggaaaatacatcaaaatactcggcgaatctctgaaactgagtcaaccacttaacagcaactcaatagctgttcatatgcccagattttgcagcttgctccagctgaataaatctgctcaggaacttgcagctcatattggtgaggtggttgccaataagtgcttctgcacacggcggaatcccataagtatatctgctgctgctatctaccttgcatgtcagcttgaagacaaacgcaaaactcaggcagagatctgtaaggttacgggcctcacggaggtcacactacgcaaagtgtacaaagaactgttggagaattgggatgatttgctcccccctgactatacacctgccacaccaccagagaaagcttttcccatgaccaacatttactcagggcgctcagcgagtggcaaggatatgtatcaggataagatattcgagagtattaagcaaaaatgccctgagcctgcagagcctgaccacatggtcgtggtgaaagaagagggagacaagaaaacagctgctcttggccgtccgcctacaaaacttgaccatcctgagttaggcaaggtgttccggccaccaaatgcccctttctcaacatctcctaaatctgatcgtgacaaaacggaaactagcttacgtggattcaaccttaatgaggtatcatgtgcaatggactctgatagaacagacatcacagtgaaaccaacttttggtgatcgattgtcaaatgatcccaatgcgaatccatctcccaacaggcagcctttaccctggcagcttaagcaaggggcgcctgcaactgctccatcatattcaaggcttcgcgagcagcagtcgggcctggatcttgtagctgctctgaagggggttgggaaaaggagtcctggggatagtgatgtccgggataaagaagggaagtgaataattggtgctttgtagatggggaacgactattaagtgttaaatttgcaactatggtcggatcacgatccaaagttccagaggactcgcacacctaagtcttgcttgcacaacgttgttgctttgtagatgtatgtctgtagtagagttagtttagccacctctatggctcaatcactctgtatttcttttgcctcatgccggggctgtgaaatgtcatttcaggcgcattagcttctgttgtaaaattttactagtgtttatgaattatttatctgactaaagaggtgtttactttttaggaactaaaaaaaaaaaaaaaaaa

SEQ ID NO: 3726 - DNA, 1657 bp, Zea mays
  Clone ID: TF_ZmC11532_2
gggtacctcgaggccggccgggaacgttcggcagtccccatcctctcctgtgggcgctccctctccccggcccccaaatcaccgcgcctccctcgccacgcctcacagggccggttgcgtaggagaaaggagaaaggaaggaggggaggcggtcgtcgggcgagatgagcgactccttctgccccgactgcaagaagcatacggaggtggcgttcgaccactcggcgggggacatggtgtgcaccgagtgcggcctcgtcctcgaggcgcactccgtcgacgagacctccgagtggcgcaccttcgcgaacgagtccaacgacaacgaccccgtccgtgtcggtggccccaccaacccgctcctcaccgatggcggcctctccaccgtcatcgccaagcccaacggtgcgcagggcgacttcctatcctcctccctcggcaggtggcagaaccgcggctccaaccccgaccgatccctcatcctcgccttccgcaccatcgccaacatggctgaccggctaggtcttgtggctactattaagttctgcgttccacattcctaggttccaaacataccctaatggtgtgtttggtttgtggagtcaccatatgcttcatgaggaccgagcaaatgaaatctacaagaaagttgaagatctcaaatctatcaggggaagaaatcaagatgccatattagctgcatgcctatatattgcttgtagacaagaagatcggcctagaactgtgaaagaaatatgttcagttgctaatggggccacaaagaaagaaattggcagagcaaaagaatttatagtgaaacaactggaagttgagatggggcaatctatggagatgggaaccattcacgctggaaattttctgagacgtttctgctcaactcttgggatgaacaatcaagctgttagggcagcccaggatgcagttaagcactcggaggagcttgatataaggaggagccctatctcaattgcagccgctgtcatttatatgataacccaactctcagaggacaagaagccacttaaagatatatccttggctactggtgtagcagaaggcaccatcagaaattcgtacaaggatctgtatccttatgcctcaaggctcatcccgaatacctacgccaaggaagaagacctgaagaatctctgcacaccttaggaggcttacttttttccccctttctgttactacataattcggaattagatttgtcaaagaggagtgagtgaagttgttcctcgttgtgactgtaccgggcaaggtgtcgtccccgccgtgcttaactttatgatggaatttcttttcagagcacctaccacctgaagatttgtgggatacgtatactcacttcggaaagaatgtagatagcaagcagttggacaagcacaagattttaatttaaaacatgattttgttctccatcttctgaagaaaccatcacttgtccatcttcattcgaagtgccctccttgataccaagagaattgttagttgtctaaaattaggtaaaattatgatatgtttggactggcaaccccaatctagtcccattaactcctatgtattatgaattaataaggtgccgttccgttttcacggaacggagacttggaacaaaaaaaaaaaaacaagg

SEQ ID NO: 3727 - DNA, 2261 bp, Zea mays
  Clone ID: TF_ZmC9889_1
cattgggtacctcgaggccggccggggggtctctgcccatctccaacctcgagagcccaccaaacccaaagcccaggcctctccgtccccaatcccccatccggcttgccccccatgtcgtcgcagtgcccctactgccgcgcgtcggggccggcgcggtgcgcgacgacgcagccgccgctctcgcgcgccgtctccgagtgctccgcctgcgcccgaatcgtcctcgagcgccacctccacacgcaccccttcttccccctcctcccctcactccatccgctcccccttgtcacccccgacctcgccacagccatcgatcccgccccatctccttcccccggcgacgaagatgacgaggacccctttctccccgcgggcttcgtctccgccttctcggctttctccctcgagcgccaccccgtcctcgcccgctccgcctccaccttctccggacacctcgccgagctcgagcgcgcgctcgctgtcgactccgccaccgcggcctccaacccggaccccgccggccccatggtctccgtcgacagcctccgcgcctacctccagatcgtcgacgtcgcctccatactcaggctcgacagggacatagcggatcacgctttcgagctcttcaaggattgctcgtccgcgacttgcctcaggaatcggagcgtcgaggcgctcgcgaccgccgcgctcgtgcaggctatccgcgaggcgcagcaaccacggacgctgcaggaaatctctactgctagcaatcttcctcaaaaggagataggaaaatacatcaaaatactcggcgaatctctgaaactgagtcaaccacttaacagcaactcaatagctgttcatatgcccagattttgcagcttgctccagctgaataaatctgctcaggaacttgcagctcatattggtgaggtggttgttaataagtgcttctgcacacggcggaatcccataagtatatctgctgctgctatctaccttgcatgtcagcttgaagacaaacgcaaaactcaggcagagatctgtaaggttacgggcctcacggaggtcacactacgcaaagtgtacaaagaactgttggagaattgggatgatttgctcccccctgactatacgcctgccacaccaccagagaaagcttttcccatgaccaacatttactcagggcgctcagcgagtggcaaggatatgtatcaggataagatattcgagagtattaagcaaaaatgccctgagcctgcagagcctgaccacatggtcgtggtgaaagaagaggaagacaagaaaacagctgctcttggccgtccgcctacaaaacttgaccatcctgagttgggcaaggtgttccggccaccaaatgcccctttctcaacatctcctaaatctgatcgtgacaaaacggaaactagcttacgtggattcaaccttaatgaggtatcatgtgcaatggactctgatagaacagacatcacagtgaaaccaacttttggtgatcgattgtcaaatgatcccaatgcgaatccatctcccaacaggcagcctttaccctggcagcttaagcaaggggcgcctgcaactgctccatcatattcaaggcttcgcgagcagcagtcgggcctggatcttgtagctgctctgaagggggttgggaaaaggagtcctggggatagtgatgtccgggataaagaagggaagtgaatagttggtgccttgtagatggggaacgactcttaagtgttaaatttgcaactatggtcggatcacgatccaaaggcccagaggactcgcacacctaagtcttgtctgtagtagagttagtttagccacctctatggctctatcactctgtatttcttttgcctcaggccggggctgtgaaatgtcatttcaggcgcattagcttctgttgtaaaattttactagtgtttatgaattatttatctgactaaagaggtgtttactttttaggaactaatttttaatctttccattttattccattttaatccctacattgttaaacactgaaactaatactttattttagtttttgtatttggcacttatggactaaaatgaaataaaatagaaagactaaaaattagtctctaaaagttattccttccatttctttttagttgtcgctagatagttcaattttgcactatttagcgacaactaaaacgaaacggatggagtcaccatgtttcgtgcaatgaaatgcagttccttcaaaaaaaaaaaaaaaa

SEQ ID NO: 3728 - DNA, 641 bp, Zea mays
  unsure (1)..(641): unsure at all n locations
  Clone ID: TF_LIB3689-252-Q1-K6-A10
ngacatccctctctctctctctcggtgggggaccgcaccactctcgctcggtgtgtgggagagagaggaggggagggagctaggctggcatggccggccgcttgagctgcgcatgcctacaattcagtaccagtactagcaaagcaagctaggtaggagtaacacctccccaattgctgactggtactgagttagccatcccgtcgtcccggcagtcacttctacaagtacgcacgcagctacccagcagggcggctatactaatccctccctgcctctgccttccttccgaggaccgccgcggcgggccggggtgcgcgcacccgccatgcagcagcagcaccagggtggcggcggcggcggtggcggaggctcacagttcggggccccgccgccggacatgggccccttctcgccgacgccggctgctaccggtcccatgccgctgagcagcaggcctccgtcggcgcagccgcagcagcaaccgaggaccagctacgaagaattggcgcccatggtgcctggggccgccgctgccagtggcttcgacgacgagacgatgggtagtgggcggcggcggcggcgggtcgtcgggcgcgtccagcaaccggtggccgcgggaggagacgcaggcgctcatc

SEQ ID NO: 3729 - DNA, 434 bp, Zea mays
  Clone ID: TF_ZmC150952_1
caagaagcgccccgaggactccaaaacctgcccctactaccaccagctcgacgcgctctaccgcagcaaggcgctcgcgtcgtcgtcgtccgggcccggtgcagctccggcgctgccgccgccgccgccgccgccgcagcgcccagatcagcaggctgctgctgcggcgccgcccgtcaccgtcgtgctagccccggtgccactgtcccagacggggcctcacggcaacggaaacggcaacggcaatgggtgcgcgggcaggggcagctcggacaatggcggcggcggctccgggggcatgcagaagcagcaggcgagcaacggcggggttgctgccgccaggttctccgccgtggatggcgccggtggcaatggcgttgcgacgaacaagcgagaagaaggcatcgtcaggaaggaggaagcggtggcggcgg

SEQ ID NO: 3730 - DNA, 628 bp, Zea mays
  Clone ID: TF_ZmC434646_1
ggcgtacaaggtatttaatgattccttggaccagtgattaacagtagtatcatcatatcatatataggagtttacataataacagctagctagaagcagcagcagatgcatgcagggggtagctaataacaaaagggagggataaaagctagtagtactgatttagtagcaagaaaaagaaagaaagaacgaacgaacaaattaaacagatggggcccagctcgggctcgtatcgtcctttggggttggcgcatccatggcgccatgcatgcaatgcagttagctactcatcctcggggccatggttttccacctgggggtcctgaccatggccggccctccccttgccaatgccgtcctcctttccgggaaaatcctaagggccgccggcctgtccaccttaattattagggttattattattgcccccgccgccggaggcctgttccttgtccatcccaaaccccggggggccgtagcgcacgtgggggtacttgaccaccgggtccagaagttccgagctcgcctgctttgcctggcccaagcgggagtagaggcggtccagctcgtcaaagtaggggcacgttttggggtgcgccggccgttttttgccgctctccttggcctt

SEQ ID NO: 3731 - DNA, 550 bp, Zea mays
  unsure (1)..(550): unsure at all n locations
  Clone ID: TF_16923001
ttttttttnnnnnnnnnnnnnnnnnnnnncgtttttttttccttctcctgagcaagaatccaacaaacaagtagtgccacgcatcagaagaagatttatatgatcgatcgactagctagtgctagctagcagtagatcgatcgatcgatcgatcgacgcatggaggcttatgcatgatggaggtagctagctttttttaatttgtgcactacggatgatgagcgagtaggagtagggcgtgcgtgggttgtttggtccggggtgcgcgcgaagccctgcgcgtggaggcgcgcggagacggcctcccagagcgccttgttgcgcttggtggtgaggaaggagtgatcgaggtcggcgcgcacggcgaggaaggcggccgtctcggcgtgggaccactgcgggaggcgctcccgctcgaggctcgcgctggaggcggcggagacggagggcacctgcgggggcgggggcggcatgggaaagtgcggcggccacggggagaggagcgggtggtagggattggataaggagctgttgaggtggtggaagggat

SEQ ID NO: 3732 - DNA, 734 bp, Zea mays
  unsure (1)..(734): unsure at all n locations
  Clone ID: TF_ZmC228430_1
ctggagtagcttgcaggctgggttatcaccgacacgccaacaatgcaggaataagatgagacgtggacaagtactacaggcgcaccaaggacgcccgagccgggcgccagggagggaagtactacagcttcttatcgcacctcgaggcgctgcacgcctcggcgccgcctttgccacccccgccctcgggcatgaccacggtgcaagctggccctcatcagccgatggaaatggcatggacggcgggccctacggtgctgggccctgccgccgtcgccggcctgccggacctcagcttctcgtcgatgtccgagtccgactcagagtacgactcggacgacgacgacgaccactctggtgcgggggaggagggcctcagcgggggcgagtgcgacagggagatgatggccaccttcgagaggatgatgaagcagttcacggagaagcaagacgccatgcagcgcgtgttcctggagacgctggagcggtgcgaggcagagcgcacggcgcgcgaggaggcgtggcggcgccaggaggtcgcccgcatgaaccgcgagcgcgagcagctcgccagggagcgcgccgccgcggcctcccgcgacgccgcgctgatcgcgttcctccagcgtgtcggcggggggcagggcgagcccgcgcggctccctccgcacggcgccggcgtcgtgcccccgccgcctatgccggactgcgcccctccgtcgccncggcgccac

SEQ ID NO: 3733 - DNA, 2143 bp, Zea mays
  Clone ID: TF_ZmC22174_1
gccggccgggttcaaaaaagtgtttatctctatcggccgctcgggccggcacctcgtgtgtctgtttctccggcctgggctctgggctcgggcgtagtccagttgccaccaaccgagccagagagagaacaaagaacgggtgaaagaaatctcggaaaggttccagatttcctcgaggtggaggcctccttttcctcggccgaatcgctcgttcgctttctctctctctttcctcccatcgagcatgcattcttttctgctgctgcgaccgtaggatcggcgtccagcagcctcgccgcgtcggtatggttttcccttggcccacacatcctagctcttccgcattcttgaatttcgtggtcgaggattagggggtttctcgtgcgctggtccaatttcgcgctaatcgtcctgttcctgcctcggattactcgccttctcgtggtccccatctgttcttggcgttcgcacgcttgccgtgcggcgggcagggctgcagcagcagccggcagcgcgtgcatcttgcgaccccctttccaagaaccagctgcaagctttggccttttccgcctgccgtacccgaaatcccgcaagaaactccacccaagaaaaaagcggcgcccttttggctggctggctgccattcctcacgccccacgagtttggtgaggctttgaaacgagcacagttcacaagacagtgaggctgcggtgggtgtttcctcgtcggagatggagggaaatttgccgccgcaaaccatggtcccaggcggaggccccttcgatctggggcagccgttccacttcgccgtccaaccccaggcgctccaggtttaccaggatgtcttcgctgcccccgccgcgagccagatgccggagctcggcaatgtggtgaaggcctcgctgagcgacgaggaggagggcggcgacggccacctcgaccgcggcaaggcggcagccgcctcccagtggcaccgggtcaagtggaccagcggcatggtcaagctgctggtgtcggccgtgtcctacatcgacgaggacgtggacgcggaccacgggaccagcagcgggaggaggaagcacgccgtgctcaagaggatgggcaagtggaagctggtctcctcggccatgaccgagaggggtttcgctgtgtcgccgcagcagtgcgaggacaagttcaacgacctcaacaagaggtacaagaggctcactgagatcctcggccggggaagggcttgccagatcgtcgagaagccagagctccttgaacagttgagcctatctgggaagctcagggaggaggccaagaagcatctcaactccaagcatctgcactacgaggagatgtgctcctaccacaacaggaaccgctactgcctgcttgatgatcctgtccttcagaggtccctgcggatggcgcttagggctccagctgaacagggaaagcaatgcttgtttggctatgatgacgaggatgatcagatgttgctttctgatgatgatgatgattatgatgatgacgagttgaatgacgatctggaggccggtgctgaggatcatggtcctcacagagttcatgccaccgagaaactgaaacatgatcatgagggacattgtgggtctcatctgtcagaagttgcagccattgacatgaacagaatgaacttcgaaggatctggtggtccatcctctgagaagaatttaagttatatgcgtgttcaaatcgagaggcagcgtctgaaaataaaatctcagatgctgagaattgagcagaggcatttcaagtggctgaagttcagcaaggagaaggacagggagctgcagaaaatgaagctggagaatgaaaggatggcgctggaaaatgagcgattggagctggagctgaagcttaaggaaattgagataggcatcaaaccaaagaggatttagagattgcaggatgcaagtggtagagctagggaacttttagagtttctggtaaccattttatctattgtagtaccttacaaattaggatatgttacatagtttcatcttcgctaactgcatatcagttaagttaataactctgttggtttcaagcatttgcaataagtacagtttaccacctgaaaatggtgcttaatgttatcattgccttatcc

SEQ ID NO: 3734 - DNA, 396 bp, Zea mays
  Clone ID: TF_LIB3068-006-Q1-K1-A4
agagatcgtcgtccgcgctccgccgccgtcggagtcgcaggacacggcggggttcggtggcggcgcgccgtcgccgtcgaggtggcccaaggcggaggtgcacgcgctgatccagctgcgcacggagctggagacgcggtaccaggactccgggcccaagtgcccgctgtgggaggacatctcgtcggggatgcggcggctcgggtacaaccggagcgccaagcgctgcaaggagaagtgggagaacatcaacaagtacttcaagaaggtgaaggagagcaacaagaagcgccccgaggactccaagacctgcccctactaccaccagctcgacgcgctgtaccgcagcaaggcgctcgcgtcgtcgtcgtccgggcccggtgcagctccggcgct

SEQ ID NO: 3735 - DNA, 741 bp, Zea mays
  Clone ID: TF_ZmC226195_1
cctctgggagcaggtctccaggaagctggctgagaaggggtacaaccgcagcgccaagaagtgtaaggagaagttcgagaacgtgcacaagtactacaagcgcaccaaggagagccgagccggccggaacgacggcaagacgtatcgattcttcacgcagctggaggccctgcacggcaccggggcggctcccgcgtcggtggcggcgtcgcaggtgccccctgcgatctctggcggggtgtccggggcagcggggccgttagccgtgcgcttgcctgccgagccaccgcctgcggtgtcgggcggcgtggggatgccgatgacgaccgtgggctacccgagcttctcgacgtccaacacggaggactacacggacgaggacgactccgacgacgagggcacagaggagctggtgggtggcggcgggaacgagcgcgggaagaggaagagggtgtcagagggcggcgcctcggtcgccggcggaggcagcgggaagatgatgaggttcttcgagggcctgatgaagcaggtgatggagcggcaggaggcgatgcaacagaggttcttggaggccatcgagaagcgtgagcaggaccgcatgatccgcgaggaggcgtggcggcggcaggagatgacccgcctcgcgcgcgtagcaggagatcctggcgcaggagcccgccatggccgcctcacgcgacgcttgcgtcctctcctttatacagaagatcaccggacagacca

SEQ ID NO: 3736 - DNA, 1672 bp, Zea mays
  Clone ID: TF_ZmC1297_1
ctctcacaggtcacaggctcacagcacactgccactccgaaaccccaagcgccaccaccgaaaccccaagcgccaccaggaccaggcagcctcctccgtcctctcttctccccgcgccgccgcggccatgctcctctccgggcctccgccggtgcccaccccgccgctcctcctcccggagagcagtggcgaggacggcggccacgattcctcctcccgcgccgcggcagcggtgggatcggcgccaaagaggcgcgcagagacatgggtccgtgaggagaccctttgcctcatcgcgctgcgccgggaaatggacgcccacttcaacacctccaagtccaacaagcacctatgggaggccatctccgcccggatgcgggaccaagggttcgaccgctccccgaccatgtgcaccgacaagtggcgcaacctgctcaaggagttcaagaaggcgcgcagccactctcggaacagcggcggcggctctggctctggagggaacggcaacgccaagatggcgtactacaaggagatcgacgacctgctcaagcgccgcggaaaggctacgggaagcggcaccgccggctgcgttggcagtagtgccgggaagagccccaaatcaaattgcaagattgattcctacctgcagttcaccacagataacggctttgaggacgctaacattccctttggtcctgtggaagcaaatggtagaacgatactgagcattgatgatcgtttggaggatgacaggcatcagcttcccttgacggctgctgatgcagttgcaaccaatggtgtgaacccgtggaattggagagacacctctactgatggtggagataaccgtggcaattttggtgggagagtcattttagtgaagtggggtgattacactaaaaggattggaattgatggtactcctgaagcaattaaggaagccatcaaatcggcatttggactaagaacaaggcgcgctttctggcttgaagatgaagatgaggttgttcgaaccttggacagagacatgccagttggaacatacacacttaatcttgatgatgggatgacaatcaaactctgtgatgcaagccgcatgcagacgccagaagacaagacattttacactgaagaggactttcgagatttcctgtctcggcgtggctggacatttctcagggagtatggaggctatagaaacgttgatagccttgatgatctccggcctggtgtgatgtatcaggggctgcggtcgcttggtgactgattttgcaacatctactttggccagacatgtcgaagtggaattgctagcagtgccatttagtgtaaatttaagtaaggccatccagattccagatatatgagcggtcctctcgcatttgtggagcaaaacttgcctccacttatcttttcttcagttcacactcatgtcggagccgcctctgtgactagtatgcaggttcaggcttatgtaaaatgtagccgcgtgcaattggagtgtgcagctaatgatcctccagataactagcttgttctaccattccttgtaaaaatgtggaatgatcctccagctaatgtaaaatgtggcaagtgaagcaaatgtaccctgcaatattgtacttgtaaaaatgtgcaattggagcttgttctaccattccttgcagtaaaa

SEQ ID NO: 3737 - DNA, 2375 bp, Zea mays
  Clone ID: TF_ZmC100578_1
tctggccggcagccgcaccgccccgcagttgcacgccctcgccgcgccagtatccccgacgccccagcagcagttgccggcatcctgcgccgccccgccgttgcacgccttccccgcgccagtatccgcgccgccgccgttgagttcaataccactgctgacagggccgatgcagccagcgcccatatcatcggcggccccagccccggcaccggtggatcttacaagggcccacgcagctacccagcaggaaggcttcagcttctcttccatgtcggactcggagtccgacgacgagcccggggacgacgacatgacggcggagacaggcggaaaccaggaccgcctcggcaagcggaagcgcggcgacggcggcggcagcggcagcaacaagatgatgtctttcttcgaggggctcatgcagcaggtcgtcgacaggcaggaggaaatgcagcggccgttcctggagaccatggagaagcgggaggcggagcgcacggctcgggaggaggcgtggcgcaggcaggaggtcgcccgcctcaaccgcgagcaggagcagctcgctcaggagcgcgccgccgcggcctccagggacgccgccatcatcgccttcctccagcgcatcagcgggcagtccgtgcagccccctgctaccgccgttgttgtcccaatgccggcaccggtgtcagtccataccacgccgccgaaacaaccttctcgccagcagcagcaaccgccgccgccgtcgccccaggcgacaccgcagtcgaagccaatctcagccgcgccgctccagcagcaaccgccacagcagcaaccgaaggatacgtcgcagcaggacgccggcacgccgcgcagcttgcccccggcgtctagccagtcactcgagctggtgcccttcgccgccacggagcatcacgtcgattccgggctaggaggaggggatggaggtgcggcgtcgtcatcgcggtggcccaagacggaggtgcacgcgctcatccagctgcgcatggacctggacatgcgctaccaggagacaggtcccaagggtcctctctgggaggatatttcgtccgggatgcggcggctgggatacaaccggagctccaagcggtgcaaggagaagtgggagaacatcaacaagtactacaagaaggtgaaggagagcaacaagaagcggcccgaggactccaagacctgcccatacttccaccagctcgaggccatctacaacagaaagcacctcagcagcctcacaaccgcggccacatcgtccaccgccgccgccgccgccgctcctcgtcccgcctacccagatcagctgaacccgagcaggcaagagatagaggggaagaacatcaacgatgacaagaggaacaacggtggatcaggtggaggcacgcaggtgccgaccagcaatggcgagacagcgacgacgacgacgacgacgcccgtcgcgttcgacgccgacaccggcatgaagaagccagaagacatcgtcagggagttgaacgagcacccgcgtcgggagttcacgacggaggacgagacggacagcgacgacatgggcgacgagtacaccgacgacggcgaggaaggcgaagacgacggcaaaatgcagtacaggatacagttccagaggccgaacccgggcggcaccaacaccgcgccagcaccggcagcagcgacgacggctgcgccagcggtgccgacttcggctccgaccagcaccttcctcgccatggttcaataggggcgcgggcggcacccctctcaaaccgtacgtacgtatatgcgtccaaaccaaaaacctgcgcgcatcaccgtcacctcctcctttactttaccagtccaccaagcatgcaccatcagtccatcacactgttctcttgttcatcctgtaatcccccgtgccattccattatttattgatttgtttcgtgtataataagatccccaccgttgcggaggatgcagagtgaggctgcggtggtagagcaaaaaggaagagtccagtccctcagtaataacttatttataggtcatcgtcgatcgcgttaaacgagaactgtacatcgatgtaacagtcagtccatgatgtttttcctcccttttttttttagttactcccttcccgggacggcagtatacaagtttgtataagggtatacaagaattacagacagttcaagcaacctggagcttgcggaggtgagaaggtgtttttgccgttgggaatctacattttttttgtcgatcctttttcttttaacagtggatataattaaatcctgttacttgttacagtgtacattaatcgtgttgttattccagtactctgccctttgtggcaaatatacatgagcagttttacc

SEQ ID NO: 3738 - DNA, 1049 bp, Zea mays
  Clone ID: TF_ZmC1297_2
ctctcacaggtcacaggctcacagcacactgccactccgaaaccccaagcgccaccaggaccaggcagcctcctccgtcctatctcctccaagtccaacaagcacctatgggaggccatctccgcccggatgcgggaccaagggttcgaccgctccccgaccatgtgcaccgacaagtggcgcaacctgctcaaggagttcaagaaggcgcgcagccactctcggaacagcggcggcggctctggctctggagggaacggcaacgccaagatggcgtactacaaggagatcgacgacctgctcaagcgccgcggaaaggctacgggaagcggcaccgccggctgcgttggcagtagtgccgggaagagccccaaatcaaattgcaagattgattcctacctgcagttcaccacagataacggctttgaggacgctaacattccctttggtcctgtggaagcaaatggtagaacgatactgagcattgatgatcgtttggaggatgacaggcatcagcttcccttgacggctgctgatgcagttgcaaccaatggtgtgaacccgtggaattggagagacacctctactgatggtggagataaccgtggcaattttggtgggagagtcattttagtgaagtggggtgattacactaaaaggattggaattgatggtactcctgaagcaattaaggaagccatcaaatcggcatttggactaagaacaaggcgcgctttctggcttgaagatgaagatgaggttgttcgaaccttggacagagacatgccagttggaacatacacacttaatcttgatgatggtacttgtgaactctcgtcttagtcgtagtgtgaaattttactctatgaataactaggtctgtataggatgtagtgatgttgttatgccttgtctaagggacgaagggaaatgtggaaattagaaagaaactgacatggacaactagtgaataacggttcgtattatttcaaactccttttccgtctggatggtagagcgtatagactcataaaaatttgtgtgcgtgg

SEQ ID NO: 3739 - DNA, 500 bp, Zea mays
  unsure (1)..(500): unsure at all n locations
  Clone ID: TF_LIB4738-050-Q1-K1-A4
ctcgagnngccggccgggaaaaaaaaaaaaaaaaaaaaaaaaaaaaaaaaaaaaaaaaaaaaaaaaaaaaaaaaaaaaaaaaaaaaaaaaattggcgggcagaggcgggcagaggcgagaagcaagaaaaaaaacgaggggagcaaggaaatcgaggcaagaaagcaagggcagaggcgcaaagcctgcaatctgctgtcccccgtcgccgccgttgcctcgccgttgcaatcgaggcaagaaagttagggagtgctggcgttgggcaagtcgctctgggcctttggggaaacgggggctggaggggcggcaagataatggaggccggcggcccggaagcggggggaagggacaagagggtgccgcagtggggcgtgcaggaaacacgggagctgatcgtggcccgcagggagatggagcggaaggccgtcncggcgcgccgcaacgccaagacgatgtgggaggccgtcgcggcgcggctccgggagcgaggctaccga

SEQ ID NO: 3740 - DNA, 382 bp, Zea mays
  Clone ID: TF_uC-zmflteosinte110f02b1
cgcttatccgggtgcggacggggctggaggggcggttccaggagcccgggctcaagggcccgctgtgggaggaggtgagcgcgcgcatggcggtggcggtctacggtcgcagcgccgagcgctgcaaggagaagtgggagaacatcaacaagtacttgcgcaaggccaaggagagcggcaagaagcgaccggcgcacgccaggacgtgcccctacttcaacgagctggaccgactctactcccgcttgggccaggcaaagcaggcgagctgagtgctgttggacgcggtggtcaagtaccctcgacgtgcgctacggcccgtcgggggtaggtatggacagggcgcaggccttcggtggcgggggcacatataatgacacta

SEQ ID NO: 3741 - DNA, 750 bp, Zea mays
  Clone ID: TF_LIB4767-039-A1-K1-G7
cattgggtacctcgaggccggccgggaagactatcagaaggtgaaggagagcaacaagaagcggcccgaggactccaagacctgcccatacttccaccagctcgaggccatctacaacagaaagcacctccgcagtctcacaaccgcggcgggtcgtcgggcgcgtccagcaaccggtggccgcgggaggagacgcaggcgctcatcaggatccggtcggagatggacgcaaccttccgcgacgcgacgctcaaaggccccctctgggaggacgtctccaggaagcttgccgacctgggctacaagaggagcgccaagaagtgcaaggagaagtttgagaacgtgcacaagtactacaagcgcacaaaggaaggccgcgccggcaggcaggacggcaagagctaccgcttcttcgaggagctggaggcgttgcacgcagccgcgccgcagccgccaccacagcacttgccggcagccagcaccgccccgcagttgcacgccctcgccgcgccagtatccccgccgccccagcagcagttgccggcatccagcgccgccccgccgttgcacgccttccccgcgccagtatccgcgccgccgccgctcctcgtcccgcctacccagatcagctgaacccgagcaggcaagagatagaggggaagaacatcaacgatgacaagagggacaacggtggatcaggtggaggcacgcaggtgccgaccagcaatggcgagacagcgacgacgacga

SEQ ID NO: 3742 - DNA, 660 bp, Zea mays
  Clone ID: TF_LIB3689-215-Q6-K6-F4
gactagttctagatcgcggcggccgctcgcgatctagaactagcccacgcgtccgcggacgcgtgggcggcgcacagcaggtggagatgccgccgccattctcgccggctggcggcgccgggcagcggatctcgctggcggaggcgccgtcgcccatcagcagccggccgccggcatcgacgccggcgaagcagtacgacgagctcggcgcgtccggcgccggcgccgtgggcttcgacgccgagggcctggccgccgcagcagctggcgaggagggcgccagcggcggctcggcgggcaaccggtggccgcggcaggagacgctggagctgctcaagatccggtccgacatggacgccgccttccgggacgccaccctcaagggtcccctctgggagcaggtctccagtcccaccactacgctgccaagaacggaggcaccgggaacgggaacggcggcggcgcatcagagcacggctccagaggcatgcaaacgcaggcgagcaacggcagcgttggagccagcaggttcgtcggcgaaggcggcggcgcggcctcggcggcgaagaagccagaggacattatgaaggagatgatggagcagaggcaggcgccgcagcagcagcagcagcagacgcaggcggtgggtcagtggctata

SEQ ID NO: 3743 - DNA, 1309 bp, Zea mays
  Clone ID: TF_ZmC3461_1
gccgccacagcagaagccgccaatgccgcaacagcaaagcatggacattgtcatggtgccggccgagacgacgccgcacgccgacatcccggtgcacgaggggtccagtggcggcgcggcgtcctcccggtggcccaaggcggaggttcacgcgctgatacagctgcggagcaaccttgacacccggtaccaggaggttgggcccaaggggcccctctgggaggagatctccgccggcataaggcggatgggttacaaccggaacgcgaagcggtgcaaggaaaagtgggagaacatcaacaagtacttcaagaaggtgaaggagagcaacaacagccggatcgtctttcctgggcatggtccagtgatcgatccgtctgcgcgcacccaggcattatcccccggtgactctcatcctcctccacttctccatggcttcttttctttctctcgctcgcatgtgacatttgtgtctacccacctgtcgcctccatgcatgctcgtccatatctctagttctctacacctctaaaccaaaaatcacaagaactatctccctcagctcctccatgctccggcaattctccattcctcatatatgcacctagcaacacctcgatccatgtcgtgtcgtcgtcgctgctgcatgcctacccccctttttttgattcgttgctgtgttaattatagtggtcgcctctttagatgttacagtaaaaaaatattggcggtgatgcggttatttattgatttgttctggtaattaataagaaccctcaagctttggggtgttcacggagaggttgagttgatgcggtgaaaacagcacgtgaaagggtaatgagagatcgatcgcgcggttaaggagacaaggtgacaagaaaggcagatgacgcagtgggtgtttgcactgttactgcggtaaattttgtgcatgcggctactactctacagtgggctagtttgttgcaagggagctgcggaaaaaaatggaaaagaagagcttgctcgtcatgtgccatgaagaacagtcagtttgatgcatgcgggatttttatatttatccttgttttcccctctttttcatttttcaccatttcttttatgttctgcaacaagtaaactgtccattaagtattacctaagttttttctttctttctttctttctcaaactgctgttaccgaaatttacagtgtatacttgagaaatgttatatgttaaaattcttgctgttaattataaaaaatattgcaattgctttcaaaaaggattttataaaaaaaaaaaaaaaaggtggagtctccag

SEQ ID NO: 3744 - DNA, 425 bp, Zea mays
  Clone ID: TF_ZmC87468_1
attttgggaagctcgccgacctgggctacaagagaagcgccaagaagtgcaaggagaagttcgagaacgtgcacaagtactacaagcgcacaaaggaaggccgcaccggcaggcaggacggcaagagctaccgcttcttcgacgagctggaggccttgcacgcagccgcgccgcagccacagccgccgctacagaagcagcagcagcagttgccgccagcgagcaccaccgctccaccgttgcacgccttcgccgcgccagtatccgcgccgccgccgataagttcaatgccaccgtcgacggggccgatgcaaccagcgcccatatcgtcggcggcaccggcggtgcaggtccagacactcgtggagcttgccggggcccaccagcccctcaacctgctgcaaggcttcagcttctcttccatg

SEQ ID NO: 3745 - DNA, 649 bp, Zea mays
  unsure (1)..(649): unsure at all n locations
  Clone ID: TF_LIB4172-051-R1-L1-B3
aattcggcacgaggagcctccttcccttctccactcttatccctctctgagtggtaacacacctggcgacgtgcacgagtgcgcgtgtgcgggagcagtagctgtactgtaagcatgcagcagcagcagcacgggggaggcggcggagcaagcggtggaggcccagcgcagcagttctgcgcacagcaggtggagatgccgctgccattctcgccggtcggcggcgctgggcagcggatctcgctggcggaggcaccgtcgcccatcagcagcgccgggcgcggcgcccggcgccggctcagcagtatgacgagctcggcccgtccggcgccggcgcagtgggctttgacgccgagggcctggccgccgccgcagctggtgaggatggcgccagcggcggctcggcgggcaaccggtggccgcggcaggagacgctggagctgctcaagatccggtcggacatggacaccgccttccgggacgccaccctcaaggcccccctctgggagcaggtctccaggaagctggctgagaaagggtacaanccggagcgccaagaagtgcaaggagaagttcgagaacgtgcacaagtactacaagcgcacaaaggagagccgcgccggccggaacgacggcaagacgtaccgat

SEQ ID NO: 3746 - DNA, 2341 bp, Zea mays
  Clone ID: TF_ZmC1882_3
ccatactggtgactggaaaattgatgaatcaccagtggatggaaaaaaatttgaccgacaagcattggaggagctctccaaagaaggtgttactcttatgatgagtgactcaacaaatgttctttcccctggaagatcaatcagcgaatctgttgttgctggttcattgctgcgacatatttcggaagcaaaaggaagagtaattacgacacaatttgcttcaaacatacatcgaattgggagcatcaaagctgctgcagatttaactggtcgaaaaatggtgtttgttggaatgtcactcaggacataccttgaagctgctttcaaggatggaaaggcaccactggatccatcaaccttgcaatcaaggtagaggatatggatgcgtatgcccctaaagatcttttggttgtcactacaggttcacaaggagagccacgtgcagctctgaatcttgcatcttatgggggaagtcacgctcttaaactatcaaaagaggatgtccttctttattcagctaaggttattcctggaaatgagacacgggtaatgaagatgatgaatcgtctcactgatcttggcccaaaaattatcatgggtaaagattctggcctgcatacctctgggcatgcctaccgagaggagctggaggaagttcttcggattgttaaaccacaacatttcttgcctgttcatggagaactcctatttctcaaagaacatgaattacttggaagatcaactggcatacggcacacaactgtaataaaaaatggagagatgcttggtgtgtcacatctaagaaacagaagagttttgtccaatgggtttgtttcattagggaaggaggatcttcagctcatgtatagtgatggtgataaggcttttggtacatccactgatctctgcgttgatgagagactaagaattgcatctgatggcattatttttgtaagtatggagatcttccgacctcagaaggaacatgggttagcgcagtcaggtttgaaaggaaaatttaagattaccacaagatgtctatggcttgataatggaagattattggacgcactctacaaagcagctcatgctgcattgtcaagctgtcctgtgaattgtccacatagtcacatggagaggatggtagctgaaatcttgaggaaaatggtacggaagtatagtggaaagaggcctgacgtcattgctgttgctacagagaacaccacagcaggtttctcagaacacctcgacactaaagcatctggaaattttggaccgtcctcagctactagccacctgagcaggagtccagctacgagtcttgaaggcagttataaaacacacccagacaacccagaggtggatgctgaagaaatccttcccgagactgtgagaacaacacccgacgatgcaaccacaagctccaatggcgaagcattattctcttcagatttacatcagcctaaaacattggagcacttttgggagtcattcaaatcccctacagctgtcaaaattgcacggatcgtcaatggggggaacaaacaaaatttcggcaagattggcataatgggtcaggactcattaatccagtcagctcctgctccagttaaatcctcaaaaaagaacaagtggaaacctgaggaaatcaagagcttaatacagatgcgtggcgagatgaatgagagatttcagagtgtgaaaggaagaatggtcctgtgggaggagatttccgacaacatgttgaagcaaggaataagtcgtactccggcacagtgcaaatcgctttggacatcgttagttcagaaatacgaggaaagcaagaaggacgcggagagcatgaagacgtggccgtatttctcggccatggataggatcctatcgcagcaaggggaaatggcaaccaaaggatagagaaggctgtagcttagtggtagaagtttagaacatttgatatgttgtagcagagcccagtcagtgtagtgaggatatgtactgtgtacaggtacaacacctggcgatttattgggaccggattcccttgttctgagtaaggtcgacggtcggtagctcgagatcgagatggcgatttactgtgcatgtgcatcaatatacgtgcttgcggaccacgcgttagatcatcacggggtagccaggagcgctttatttttagcaacaggcaaacatgtgtggttttatttgccaaataacgtttgtaactcctataatgtaaaagcccacccggtaggcgaacggcgaacccctaaaagaccactgatgtatcatatgtttttaggagttatgtaatcgcccgcccggcaaaaacgtggtctttttttcc

SEQ ID NO: 3747 - DNA, 1931 bp, Zea mays
  unsure (1)..(1931): unsure at all n locations
  Clone ID: TF_21214403
ccacgcgtccgaaaggaagagtaattacgacacagtttgcctcaaacatacatcgaattgggagcatcaaagctgctgcagatttaactggtcgnnnnntggtatttgttggaatgtcactcaggacataccttgaagctgctttcaaggatggaaaggcaccactggatccatcaaccttgatcaaggtagaggatatggatgcgtatgcccctaaagatcttttggttgtcactacaggttcacaaggagagccacgtgcagctctgaatcttgcatcttatnnnnnaagtcacgctcnnnnnnnnnnnnnnnnnnnnnnnnnnnnnnnnnnnnnnnnnnttattcctggaaatgagacacgggtaatgaagatgatgaatcgtctcactgatcttggcccnnnnnttatcatgggtaaagattctggcctgcatacctctgggcatgcctaccgagaggagctggaggaagttcttcggattgttaaaccacaacatttcttgcctgttcatggagaactcctatttctcaaagaacatgaatcacttggaagatcaactggcatacggcacacaactgtaatnnnnnntggagaaatgcttggtgtatcgcatctaagaaacagaagagttttgtccaatgggtttgtttcattagggaaggaggatcttcagctcatgtatagtgatggtgataaagcttttggtacnnnnnnnnnnnnnnnnnnnnnnnnnnnnnnnnnnnnnnnnnnnnnnnnnnnnnnnnnnnnnnnnnnnnnnnnnnnnnnnnnnnnnnnnnnnnnnnnnttagcgcagtctggtttgaaaggaaaatttaagattacgacaagatgtctatggcttgataatggaagattgttagacgcactctacaaagcagctcatgctgcattgtcaagctgtcctgtgaattgtccacttagtcacatggagaggatggtagctgaaatcttgaggaaaatggtacggaagtatagtgggaagaggcctgacgtcattgcggttgctatggagaacaccacagcaagtatctcagaacacctcgatgctaaatcatctggaaattttggaccttcctcagctactagccatctgagcaggagtccagctatgactcttgaaggcagttannnnnnnnnnnnnnnnnnnnnnnnnntggatgctgaagaaacccttcctgaggccgcgagaacagcaccagatgatgcaaccacaagttccaatggtgaagcattcttctcttcagatttacatcagcctaaaacattggagcacttctgggagtcattcaaatctcctacagctgttaaaattgcacggattgtcaatnnnnnnaagaagcaaaatctcggcaagattggcataatgggtaaggactcatcaatccagtcagctccggctccagctaaatcttcnnnnnngaacaagtggaaacctgaggaaatcaagagcttaatacagatgcgtggcgagatgaatgagagatttcagagcgtgaaaggaagaatggtcctgtgggaggagatttccgacaacatgttgaagcaaggaataagtcgtactccggcacagtgcaaatcgctttggacatcgttagttcagaaatacgaggaaagcaagaaggacgcggagagcatgaagacgtggccgtatttctcggccatagataggatcctttcgcagcaaggggaaatggcaaccaaaggatagagaaggctgtagcttagtggtagaagtttagaacatttgatatgttgtagcagagcccagtcagtgtagtgaggatataagatgaaatgtactgtgtacaggtactgaggtacagcacctggcaatttattgggaccggattcccttgttctaagtaaggtcgacgatcggtagcacgagatctagatggcaatttat

SEQ ID NO: 3748 - DNA, 389 bp, Zea mays
  Clone ID: TF_ZmC151302_1
gggagaacatcaacaagtacttccgcaaggccaaggagagcggcaagaagcggccggcgcacgccaagacgtgcccctacttcgacgagctggaccggctctactcccggtcggccgacggcgggggaggcgaggccaggcagctggggagctcagagctgctggacgcggtgatcaagtaccccgacgtgcgctacgggccgccggtgttcggtggcggcaatgctaataatgaaggtggagaggacgacgacagcgacggggaggaggaggaggaggaggaggaggacggcattggcaaggggagggccggggatgatcaggacgacgaggtggacaacgatgatgagtagctagctaacagtacccccacccctcgctcgcatgca

SEQ ID NO: 3749 - DNA, 340 bp, Zea mays
  Clone ID: TF_ZmC170123_1
cggcgggtccacgccgtcgcggtggcccaaggaggaagtggaggcgctgatccagatgcggaacgagaagggcgagaagtaccacgacgcgggggccaaggggcccctttgggaggacatcgccgccgcgatgcgggggatagggtacagccggagcgccaagcggtgcaaggaaaagtgggagaacatcaacaagtactacaagaaggtgaaggagagcaacaagaggcgccccgaggactccaagacctgtccttacttccaccagctcgacgccatgtaccgcaacaaacaccgcagcggcacaggcggcagaacggcacccagaacgaacatggcc

SEQ ID NO: 3750 - DNA, 1693 bp, Zea mays
  Clone ID: TF_ZmC36384_1
aaagaggaagtcacgaaccagcaatgcatatcattttgccatcaacacaagagcagtacagcagaccatcgttgtgtggggtccagaacagaccggccaatctagcgttacgagactagggtagaaagttatctgccggacgagggatgaatgttaaacttctgtccattgctgacagagaaaccaattatctctcaagcatattagcattggtctgtagacctacttggcagtatgatacttacaaccacaattaaacataaaattagctttgcgctactaaacaactgaaaaaaagagccctatgaacctagtacagatgctgaaagaaattgaacaatcacatgtcataatgtcaacaaatgtaggagctacaaagaattgataaaataaggtgagaaaatgtccacttctgcagctaaaccctgatgaaacgaaaagcaagcttatcctgctatagatcttcctgcaggagtttgttcaacagagtggtcaggagtgcatcccttttttcagctcgtgcttcttctctcatccttcttcgctcctcccgttccatccacgagtgttccagcaacaaccgctcctgctccagcctctgcattgtcagccgccattgttgttcaaaaaccacccgctcctgggcgcgtctctcgatcatctcccgccaccggacatcaatgtgctgttgctgcaccaggaaatcctgcagcagttcatggatgctcgaaattcctgttcttgacttctcagacattctttgatgttgctgtttcttgtcatcagctttcctctttctgttgtgcatcggcttctcatcgtcactttcttcaccatcatcgtccttgtcgtcagactccccagatgaccggtcaccaccaggtcgcttcagtttcgttttgacagaaactccagattcagactcaaggagttgttgctgcatatttctagcacgctctgtgaagacaccatgcagctcatcaaagaagggacactgcctaccattttctggatcagaagtttctttccccttgtagcggttgacgaggttcttccacttgcacttgcactgctcggcggttcgtcggtagcctcgctcccggaggcgcgccgcgacggcctcccacatcgtcttggcgctgcggcgcgccgcgacggtctcccgctccatctccccgcgcgccatgattagctcccgcgtctcctgcacgccccactgcggtaccctctcgtcccttccccccgctcccgcgccgaccaccaggcaaagatgaacccactatgtgtccaaacaataaacaatcggccagtctctgtaagtaggaactgggttttcttgagcataaacgtagatacattataatgccaagcttgaagccggcctccatcatctcgccgcccctccagcccccgtctccccagaggcccagagcgacttgcccaacgccagcactccctaactttcttgcctcgattgcaacggcgaggcagcggcggcgacgggggacagcagattgcaggctctgcgcctctgcccttgctttcttgcctcgatttccttgctcccctcgtttttcttcttgcttctcgccgctgcctgcctctgcctgccattacttttctgcccattcacacagctcggtctcagagaaaggggcctgccgcattcacactagctcccggcacggccggc

SEQ ID NO: 3751 - DNA, 137 bp, Zea mays
  Clone ID: TF_700082065H1
cgcgcactgcttcaagtgcacgcatcccagctgcctggtgaagaagaaggttgagcgctcgcgcgatgggcacgtcacggagatcatctacaagggcacgcgcaaccacccgatgcccacgcagagccgccggccag

SEQ ID NO: 3752 - DNA, 1093 bp, Zea mays
  Clone ID: TF_700572485_FLI
gcttttgctcctgtatcagcgcacagtgatgcatctctcctggagtctcaagaagcacttgatgtctcctcaacactgtctaatgaagaggacgagagggcaacacatggcactgtttctatagagtgtgatggtgatgaagctgagactgtatctaaaagaaggaagctggaactagatgctttagaagctactcttactgctactacctccaccaccagtaccatcgacatggggcctgcagcctcaagagctgtccgggagcctagggttgttgttcagaccacaagtgaggtagacattcttgacgacggttatcggtggcgcaagtatgggcagaaggttgttaagggcaatccaaatccaagtgcgcaagcatgtggaaagagcatcgcacgatctgaaatcagtcatcacaacgtatgagggaaagcacaaccatgaagttccagcagccagaaatagtgggcaaggcagttccagcgctccatctgcatcacaagctggtggttctcaccgtaggcaagaacctgcacaggccagctttgctcacttcggtacggcttctttcagctcgttcggtctcccaccgagtggtcagttgggaccaacaactggcaatttcggcttcgggatggttcccccaggcatgacgatcccagtgccctctctaggatcgcttgcccctgtaaagatggttggaaattcatcagctatgcaggggtacccagggcttatggtgccgggagaaccaaaggtagagcctgtctcgcaaccactcatccaaatggcaaatgcatctccaccagcttaccaacagatattgagcaggcctcctttcggtcaccagatgtaaataataggaaagagaaaggggataatagatttgcttcagcttgtatacatgatagctacgctgcaacatggctttagtgttcatggatcgtccaattttttatttctattttatttttctgcccacgcatgtctttgaagcaaagaatgctgaggatgataccctgtcgtgcctgttgtaatcacgtaaaggatacctttcgtctttttgagactcgaaattggaaaacgatcaatc

SEQ ID NO: 3753 - DNA, 568 bp, Zea mays
  Clone ID: TF_ZmC1372_1
agtcaaagttgcactaactacatggaaatggatcgaagggagaaagtacctgattttctggatgttcttgatgaacttctggccgtacttcttccactcgtacccgtcctcgggcaccaccatcagctggctgccgttgccggcctctgcctccgccgccgccgtctcctcgtcgtcgtcctcctccctcctttggtttctctcttctcctccgctcactctgcatgcatcactacagttgtggctagaaacgttagctacgcataaatcgtcgtcgtcgagaacctaacctatctgttgggtgcttaattactttataatccgcttcgtctacagtgatgcagaactagtagtatatagcagcgtaaactaggcggttcatacttagatctatttatttgctccaagcagccagggatgatatttgagacgtatacataggaaagtgagtctatatatagttcatatatagtattaggccacgcatacatatatcatgaacttgaacgacatctgtttgtggacgacaatatatatacatctccatgttgctgcatgagaatttgac

SEQ ID NO: 3754 - DNA, 1681 bp, Zea mays
  Clone ID: TF_ZmC746_7
tcgagccggccgggaagcgtagtcttagcgggcagctctgatcgatttccgtcccgcttcgtgtcactcagtccctcgctcccggcctccctctcgggtcgaccacacctcaccgccgcgtacctcgctccagtccagtcctacctggacggcctgccaacacaaccaagagggcatttctcaccatcgtcccatggcgtcgacggagatggagatgggcgtcgtaggcggcggcgtcaatagcagtggaggaggcagctgcggcgggctggtggtgacggagctgagccacatcaaggagctggtgaggcagctggaggtgcacctcggtggctccccggacctgtgcaagcacctggcctcgcagatcttctccctcaccgagcgctccatcggcctcatcacctcctcctccagctccagcggcctcgacggcgcccgccggaagcgctccgggggcgagggcggcctcgcctcgccgctctcggccacgcccaccagcggggtgaccgacgggccgttcaagaacaccaagaagaggtgaacctcgccatccatcgctaatgctttgtcgttgattgctcaaggcaagccaaggcaatggacagacacaaccggtcgaacgaactgtgtctgactctttcgctgattactgctctttgaacccggccggctcgcaccacggggctggaacagcggaggcagagggtgagctcggccggcggcgagaacccggtcgacgacggccgtagctggaggaagtacggccagaaggagattctcggagccaagcacccaaggttagcacatctatctcactcaaacacgtattgttgatttggattggaaccgcgctctgtctgacgacctccgtcgtgccaaacctcgcaggggctactaccgctgctcgcaccgctactcgcaggggtgccaggcgacgaagcaggtgcagcgcaccgacgaggacccgacgctgtacgacgtcatctaccacggcgaacacacctgcgccccccacaggccggcggcggcggagcacaacccggacgcgcgcggccacctgcagaccctgagcgccggcctcacggtgaagaccgagggactgccggacccgccgcggggccggggcgccgccacgcccttgtacctctccgcctcctccacgccgccgtccacgtcggagaactggggcgtgtcgcccgcgacctcgggctccacccacgtcgcctccttccggccgttcgaggccgccgagtggcgggggcaggccgagcaccaggaagtggtgtccgcgctcgtggccgccatcgcgccgccgcccgccgtcgacagcctcgacgacctgctcatcgacatagatctagacgacatcgcgagcttcttcgcgtgacccgcgcgttgtagcagccgatgtggcgtagtatgtgaccgagccctctggctctgcttcctgaaactggaacagaacagaggagggaagagcaccaaagctctgcttcctggggtccatgcagatgcaggatgcaggcgtaaaaacctaggagatgaacaagagtagagactgcatttttttacccctctttttttgttaatctttttcctctttcagaggactgagggtagtgtttgtattgtattattgatttttaatgccaatgggaaaaataagatccttcgtgcc

SEQ ID NO: 3755 - DNA, 257 bp, Zea mays
  Clone ID: TF_18383748
gggcagccctggcgctgctgcagcggtagtagccgcgcgggtagggggaccccttgatgggcttctgcccgtacttgcgccacgagtagtcgtcggcggggatgtccgacgacgcgggcgcgtgggggtggggcggctgcgaccccgccgcggccgcgggcacgcgcaccgtgcgccttgacagcatcccctgccgggcgcgcttcttcttggaggagcagtggcaccgctcggcggggtgggggtggtgcgcctgg

SEQ ID NO: 3756 - DNA, 767 bp, Zea mays
  Clone ID: TF_ZmC746_4
cgggatcaaaaaaaaaaaaaaaaaaaaaaaaacaaacgcgaacaacgcccataaaggggcagcttctgatccgagctcccgtcccgcttcgtggtcacttccagtcctctcgtctcccgggctcccggcccttctcgggtcgaccacacctcaccgccgcgtacctcgctccagtccagtcctacctggacggcctgccaacacaaccaagagggcatttctcagttctcaccatcgtcccatggcgtcgacggagatggagatgggcgtcgtaggcggcggcgtcaatagcagtggaggaggcagctgcggcgggctggtggtgacggagctgagccacatcaaggagctggtgaggcagctggaggtgcacctcggcgggtccccggacctgtgcaagcacctggcctcgcagatcttctccctcaccgagcgctccatcggcctcatcacctcctccaacctcgacggcgcccggcggcggaagcgacccgcgggcgacgccggcctcgcctcgccgctctcggcgacgcccaccagcgacgtcaccgacgggcctttccagaccaccaagaagaagaggaaggtgatggaacagcggaggcagagggtgagctctgccggcggcgagaacccggtcgaggacggccatagctggaggaagtacggccagaaggagatcctcggagccaagcacccaaggtgctactacccatgcgcatctcgctcctcgcaggggtgcccggcgacgaagcaggtgcagcgca

SEQ ID NO: 3757 - DNA, 861 bp, Zea mays
  unsure (1)..(861): unsure at all n locations
  Clone ID: TF_LIB4746-103-R1-K1-B6
cattgggtacctcgaggccggccaggacctgtagccgtcatccacgcgcaaggggaggggtagagtcatgcgctgcggacagtctcacctcacctgtgacctgtcccccttcttgcagatcctacttccggtgcacgcacaggcacacgcagagctgtcaggcaagcaagcatgtgcagcgcacggacggcgacccgctgctcttcgacgtcgtgtaccacggcagccacacgtgcgcccaggcccagggcgccgccgcgcgccccgtcaaccagccggctcagcagcaaacggacacggagcagacgacctccccggggttccaggcagggcccgccgtgctgccgttctcgctccgtccggcctccaacaagccgccgggcgccgacgacgccggcgacggcgcgacgagcagccgtttcatcgcgaccggctgtactgtcaccgcgtctcctttcgtgtccccggcgacttcagagtgccgaatagttagcggcggcggcggcggctacgcggtggaaaggtgggcgggtgggcgncgncgtgaccatgggccggcgtccggaacgtgtctgacgttgagctcgccgccacgaccaactcgcttatggctatgggagagatggatttcatgttcccgctggacgccgccaatttcttggagctggagaacccggccagctattgctaaatgacacaaacgtgcttgtccctactggtttagcgcggaaacatattattgataggtaaagacgacaaagctaaacgaacaagcgtaattagctctctcgcttagtgcttggcatgtaagtctgcaaggccacgcggagccaatagntatgtaaattttagctctctaaa

SEQ ID NO: 3758 - DNA, 590 bp, Zea mays
  Clone ID: TF_ZmC12542_1
accgcgacgacccccgctacgtcatcaccacctacgacggcgtccacaaccacgcaagccccgcagccgctgccatcagccagtacggcggcggtggattctatagcccgccgcacagcggctcgccgtcggccgcctcctactcgggctccttcgtcctctgacttctccgggccttgacccagagtgatctacctgctttatcccagtcgtaggatgagaagagtgttcagacttcagagacatcagttcagcagccggctaaattcggacctgattgtagaatttttacacttgtgcagtacaagttatactatttaagctagaagcgaagcgtactctacttacacctcaattattggttacctcttgtgacgactgacgaggcatcataatcgtcactaggataattgatcacgcatgtttttcgcttaattagtttctgtgtatacatatgaagtttgccgtatagctgataggctgctgatttaacttgacttctctttgttcggtattagaccccaagatcaacatttacgccgaacagatgcattgtaacagtgaaggaatattttatggttttttcagat

SEQ ID NO: 3759 - DNA, 381 bp, Zea mays
  Clone ID: TF_jC-zmshLIB3569P036h02b1
gctacgcgtgcgtgttttcgaggggagaatttttacgaaccgttaaacaacacgaggaagagtctgggacgggaacatctggagcaaacggcgagcaccgccgatggcgagaacccggacgacgaccgccgtcgctggaggaagtacgtggcagaaagaaattctaggagccaatcacctaaggggctactaccgctgttcacaccgatactcgcaggggtgccacgcgacgaaccaggtgccccgcaccgacaaggaccagacgctgtactacattatctaccactgtgaacacaccagggccccccacaggccggcgggggggtaacacaacccagactcgcgcaggcacctgcgaaccctgaacgccgggccgacggg

SEQ ID NO: 3760 - DNA, 978 bp, Zea mays
  unsure (1)..(978): unsure at all n locations
  Clone ID: TF_ZmC7978_155
aactaaattccttaggtttagttgatggcttttatggggttacaaagtgtcgaaaaaaaatgtgttttcaacaatggacacatcatattcctctcgtttacgacctgttccaggtggactagacggttcaaggtgtggttcaggactagacggttcaaggtgtggttcattggagaatccatggttgtgctttgagatgtacatgacaaacaatgtgttgggatcattgttgttcggctgcaaaatctttgttgcgctgcatcctgtcgactttctccaaatgcatgtgcagtaagaccttgggaatatgtagccaaatatattcttttctccaaactttttccactacgacctgttccaggtggactagacgattcaaggtgtggttcattggagaatgcatggttgtgcgtatagatgtacatgacaaacaatgtgttgggatcattgctgttcggctgcaaaatctttgttgcgctgcatcctgtcgactttctccaaatgcatgtgcagtaagacctataaaggtggcgatcaactttaagagttggtccacaactcgggacatatcatcagagtggggctgaagcagcccgatatacgcagtgaagcaattcagcggtccaacagccacaggcaaggttgggaacagtcgtaactcttacccgatctcctttttcttgggaatatgtagccaaatatattcttttctcncaaacttttcccacttgctgccatnncatccaagagatttgggtatgggtcaacagtttcttagcaccatnnntgcttnnccttgtcaggataaattcccttcccattaaccanntttgtgnnngctgataaatggttcttncccatntgaacttcnncnaaccaannatncaagctttaaagggcacctgacnnanactttaaannatttgaannacagacaagnngnaataggcatttatnntgatcaacagctntttgcag

SEQ ID NO: 3761 - DNA, 515 bp, Zea mays
  unsure (1)..(515): unsure at all n locations
  Clone ID: TF_ZmC735051_1
attgggtacctcgaggccggccgggaaatncgtaagctcggaattcgtagtagtagtatcgagcaaaagacgtggcgccgccgtggcgctgatagatgcggccatggacagtaacggcgagtgctcggcccccaccctcagcgccgcgcttctgcccctcttcggcccaccgccggagccgctgccggagagtctcgaggacaagctgaggcgggtgagcgaggagaaccggaggctggccgccgcgctggacgccatactcgccgaccgctccaccccgcgagcgctgtccacgtcgtcgccggccgggggcactgcggtggccgccgcggagccgccgcggcccaaggtccggacggatgtgtgcgcgcgccgagccgtatgacgccgacaccaaccaccttagggactgctaccagtggcgcaagtacggccagaaggtgacgcgggacaacccgcatccgagatcctacttccgctgggcgtacgcgccctcctgccccgtcaagaagaag

SEQ ID NO: 3762 - DNA, 345 bp, Zea mays
  Clone ID: TF_LIB3245-169-P1-N1-B3
ctataacacttgaggctacaacaccaggtttaacgcctggttgtggggctgtaaaagagcaaaagattattgctcatgctggaaagatgagtgatggatacagatggcgtacgtatggacagtaaattcctaacggaaaccaaaccccatgagttattacctttgcacccacggtggatgccctgtccttaaacaatttaataaagcaccagatgatgataacaatatttttgtaacttattaaagcaaacacaatcaccactaacctttcataatcattatcatacctatttctttaattagtacaatcatatacaaccatctttcaacccaacaacataattt

SEQ ID NO: 3763 - DNA, 802 bp, Zea mays
  unsure (1)..(802): unsure at all n locations
  Clone ID: TF_LIB4705-005-R1-M1-A11
ctcagcaactgtacctttatatatcctgtagaaataacatttacgaagaacaggaaggaagccgtgtatctacaaaccatgtctcatttacaggtttttaatcgagtatatacacttgggcaggtgaaagttgtcatctactatagttctccaggggaacgactgttggcatttacaaccaatggccttaatgacaacataatatacgccacgcagccagcagggtgcgctggcttttggaagggcacaaacagaagagctcgcccttgctacaaccagtgactgcttgctcactgctactggaaatgagtgagagaacagaaatgatttaccctgctacgcactctaaaattttacgttatttcatcttcctcttttaggtgcatagaagaagctgaggatgtgtttcgtaagtctgccattctgcgactactggatgctgaactctggaccctgtgtggtacgctggtggaacatgacccattggcattggcagcggcatggctactgttcctggctgctggaacatcatggctgtgcttcccttcgtacgttgttatgatggcatttgggtcttggggatgatctttcaatatgcttcttcacatcgcacccttgatacgtgcatttgtagtaactcctcgggtgggggattcccctttaccactttctgtccatacttgcgccatcgataaccatcatccagaagatcaacctcactatttgtttgcacaattatcctttgagctggagtgggcacatngtcttctgtttgcatttgtagccaggacatccattgcca

SEQ ID NO: 3764 - DNA, 1015 bp, Zea mays
  Clone ID: TF_ZmC1093_1
ggacaaagttggctcgtcctcaggtataggttttgtatttttcgggcgacaccatgcctccggatccacttctgcccatacttcctccatttatatccatcgaagtgcggtgcttgtgtcacaattgaacctgtgtgttgtgcattcttcctaagagaagggggtaactattttaagcccaagtaaatgacacacaagtaaacatatatatataaacttcttttgctacacaccttctcttatttccaatttctttagcttcctcccccagcatgtggctctccacgccgctattcttaccacgttttcttctatatttgataagattggcctgcttcttactgttatcaccaggttcgagaaaggagaggaccttacctgaggaactggatatatcttgaaagatttgctgaacaagcttctcctgcctactacagggatcaagtgttggtacgataaggtcatataggcccttcatgagagccctttggtgttcaatctcgttgagcaccacttggcagccactacgagtggaagattcaaggatgttcatttgatgttctctaaaatgtatctcgctataaactatatataatagctggactttggagctggaggtgctaggtttatgcagctttaggcatctatttatacaagcaagctagtagcagcagcacacacagtatgatatgagcatggtggagggaatggatcgtttttcaaattttctcactggagaagactagggaggagcaatgtccctgtccaacggtggtatgtggtacaactaaaggatgggtggcagtgtctacatcactcgcatgacgttcatggaaggaaacatgcatatagctaggggcaataattcttgaggctgttatagggaggagcaggcaacgttgctgtacatacacaggccctaggacagggacatgcttcattgacctctaatggtaaatgataccgagtcgtttcgaaattcctgcaaaataaactagtcaatctcatcttacac

SEQ ID NO: 3765 - DNA, 890 bp, Zea mays
  Clone ID: TF_ZmC35722_1
gcccgttctctgttggccaagcttctgctcctgaacttaacatgatctacaagacccgcggcataatcttacagagtagatatatcgtatattaaatacaaactaaactaggccattattcacagctcgatccatcaacatgccctggctccactccaccctacctaccgtctcctactctcctccaacacacagcaggtcgaccagtcgtcgtccggccgtcagtactcagcagcatacatgccgccggtgatggagccgaacacaatgtcttccagatcgaacgtgtcgtcgtaccccaagtgcgccacgcccgagaggccgccgccgccgaaccagtgctgctgctgctgctgcagctggaggccagacgtcacgtcgccctggtccgggccgggcgtggcggtccgcaccgcctcggccgtggcagcggagctccccgccggggtgaggctgctaagcacctcctccagctccagctcctgctcccgctcgccgccgccgccgccgccctccagctgcctcgggggctccgcaggcagcacggcgcccttgtgtccggcctgccggttgctggcgttggccgccgcgaagctgcgggaccccgggtggaggtcgtcgtggctgcggtggccgggtcccggcaggtgtgcgcgccgatgtaggtgaccgtgtaggcgtccgggtcgtcgtcgcggcgctgcacctgccgctgcgccgcgcactgctggtcgtgcttgtgcgtgcaccggaagtaggccctgcgccgacgccgagcatcatcgacggaaatcagtacttctggttgggcatattcggttctactatgatggatcgtcgatcgatcgatctcgatcaatgaaccccggccggcctcgaggtacccaatg

SEQ ID NO: 3766 - DNA, 723 bp, Zea mays
  Clone ID: TF_ZmC45695_1
cattgggtacctcgaggccggccggtatctcctccgccactttcctcctcttccaagaacccaaccactccacgtcgtcgtcgtttgctgccgctgcgcaatggaggaggagcgctgcttcaacaactgggatctggacgccgtcgtccgcctgggctgccgccgccgcctctccccgccacggcagcccgacccgtttgcttcgcttctccctccgaccctgccgtcgccgtcgccgtcgccgccgcagaaggagaagcccgtggtgccagcgctggctaaaggaccagagccagagccatacgccgggtggcgctttcctaacctcggtgctggcggcgggcaagacggcgacgagctcatgagggccatgttagcagtccagccttccctgcctcagcctctgccaacgacaacgccaacgccaacgccaacgcttcccccggcagcaggagagcatcgacagtcgactgttacagccgtggacgtgccgctaccccaggtgcgccccgctccggccgccagagcgcagccgagcgggcggcaggtgcccggttccgtgccaagatccaagagaaggaagaaccaggtgaagaaggtggtctgccacgttccggcggacggctcgtcgtcggacatgtgggcgtggcgcaagtacggccagaagcccatcaagggctccccctacccaaggggatactaccggtgcagcagctcccaggg

SEQ ID NO: 3767 - DNA, 676 bp, Zea mays
  unsure (1)..(676): unsure at all n locations
  Clone ID: TF_ZmC883338_1
cctcgaggccggccgggccgggcaccaccacaacccacaccccgcacggtcgatctatcttgttatatgcgtgcatggaggggagcagcagccagctgctggagacctgccttcctgctagcctctacgcggttactcctcctccatgcgcccatcctcatccccttcttgccccgctgccgaaccagcagcacatgcttctgcagatgccgtttgtcaaggagcaggctgcgaataatcatggcctgatgctctcttcggaccaccaccaccacagcggcctcctgtacccgctgcttcttcccggcatccctttctgcccctccgtcgccgccgcctgcgagaagactaccaccaccggctccggggcgctcgatgccggcgaggcgggcaccagctcggcggcggcgaaagccaccggcgagatcgctagtaccgccgccaccgcatgcaacagcccaagttcctgcaattggtggaagggcccggcggcggcagcagcgggggagaaaggaggacggatgaaggtgaggaggaagatgagggaaccgaggntctgcttccagacaaggagcgacgtggatgtgctggacgacggctacaagtggagaaagtacggccagaaaggtgtcaagaacagcctccatccaaggagctactaccggtgcacccacag

SEQ ID NO: 3768 - DNA, 208 bp, Zea mays
  Clone ID: TF_15499682
cacgggcgtcagatcgagagcggggggagcagctcaaaaaagaagaacgaagaagctaatcctaggctctagactagacatgcccgttgttgccggcgggcaccggggacgcggccgccagggggctgggcgcgggcgcgggcgcggccggcgtgtggcggtgctcgccctcgtacgtcaccaccagcatggccgggtcctcgtgccg

SEQ ID NO: 3769 - DNA, 772 bp, Zea mays
  unsure (1)..(772): unsure at all n locations
  Clone ID: TF_LIB4738-091-Q1-K1-G2
cacacggtcacacacaccacaacccagccacccaccacctcccccaattgcctcttctcttctcccagcagcagccgcgacgcagtcctactcctgcggtgcctccagtttcgcagcaccgttgccacacatcgccaactaacgccatcgatcacccggcggcctcccagagtcttgccctgccatatccgaacctgctcctacagctagccagcaacacaaacagaataggtcggtcggtcgatcgatcgatggccagcgttatcgacggcaatggaggcagccggctggtggtgacggagctgggccacctcaaggagctggcgatgcagctggaggggcacctcggcggctcctcgccggacctctgcaagcacctcgcctcgcagatctcctccatcaccgaccgctccatcagcctgctcatcaccgccacctcatcaagcnccccacggcggcgcctctgacgcgccgcccttcatcaaggctactaccaagaaaaggaagaggatggacaagaagagngcatgaggtgagggtgggctcggccggaggcggcggcggtgaccatccggccgacgacggctacagctggaggaagtacggccagaaggagatccttggagccaagcacccaaggtgcccacttgacacatgctgtgctatcagaacattttttccccctccttcatcttttccacactccacagcccaatctcatctgcacgtgttcttatcgcaatttcgcaagtggaatcgaaatcattttgct

SEQ ID NO: 3770 - DNA, 315 bp, Zea mays
  Clone ID: TF_LIB3069-004-Q1-K1-F1
tcgcagacgcgtgggtagacacatggactgacttgtgatcgaacccgctgggattggtaaacgagatcgggagtttattgcagtggaacaaactgtgatggcacaagatgtccaagaccaaagtgatcaggagcgcacacattgacacaaaggtgcgagcagggagaaccatcccacggaggatctacatgttcacagatccaggatccccgggcaggaaacatgttgcgagagcatcacatgagccgaaagcagagatcacaacatctgaaggaaaacatatccatgaaattcctgtttccaggaatgcaagcc

SEQ ID NO: 3771 - DNA, 560 bp, Zea mays
  unsure (1)..(560): unsure at all n locations
  Clone ID: TF_LIB4172-007-Q1-L1-B12
aattcggcacgaggggggatctaccgatgcagcagctccaggggtgcgcggcgcggaagcaggtggagcgcagccgcgcggaccccaacactttcatcctcaccttcaccggggagcacaaccacgcggcgccgacccaccgcaactcgctcgccggcaccacccgccacaagttcccgtcgtcggcggcgcctcagccgccgccgccgtccgtcgtggtgggcggtgacgcgcaggaccggcagccgagcccgagcccgacgtccacgtcgaccgcggggctctcgcccacgacgccgctgcgcacgccgtccatggaggaggaggaggaggaggaggaggaggaggagganggangacnagctgctggnggaggacatggagatggntggcgaggacgagctcctgttcctcagcaccgacgccgacgccggggcaccgacgtcctcgctcttcgacgtcgtcggcgagcccttcctaagccctccctgggtgacagccggcagcagcgccggcgagccagccacaggggcagccggcgctgggagctgacttcttct

SEQ ID NO: 3772 - DNA, 338 bp, Zea mays
  Clone ID: TF_LIB3595-027-Q1-N6-D7
atgggctgggcgcgggcgcgggcgcgcccggcgttgtggcggtgctcgccctcgtacgtcaccaccagcatggccgggtctgtcggaggggcagctccacgtgcttcctcgccgggcaccccccacggggctgcacttgtagtaaccccgagggtagggggatcccttgatgggcttctggccggacttcctggacaagtactcccccggggggatgtacaaaaaaatagactctgatcgtcaaaactgtccacaaacctctaaacccggattgttcttctctacaattacaggcattcggtgtggcccttattggccgcgaagagtgctctcctcca

SEQ ID NO: 3773 - DNA, 594 bp, Zea mays
  unsure (1)..(594): unsure at all n locations
  Clone ID: TF_LIB4758-139-A1-K1-E9
ttgggtacctcgaggccggccagtgcaagattaggaagacgctgcccaagtggagcagccaggtgagggtgagcgccgtgcaggacgtgagccccctcgacgacggcctcagctggagaaagtacggccagaaggacatcctcggcgccaagtacccaaggtcagcgcgccgccgccacacaatcgaacgcacgatctttttcagaattcagacgggcctgcgcgcgcgcacgagcggagctgttagcctctgctaaccaggacgagatagcagatggggtttagaggaagaagaagaggataggggagaagcgagngccctgtctctggccctgtttggcacagcttattttcagcttcttcacaaatttaagcagaagttctaccaaacagctagcttctgcagcagcttatcagttcagctgcttctcataatacactaaaagcagccaacaagcagaagctgttttcaccagcttatcagataagctgctttttcaacaagcagcagctgtgccaaacagggcctctattcaaagtttagtaaattgttcagaatattcatgactccaaaaaaaaaaaaaaaaagcggcc

SEQ ID NO: 3774 - DNA, 545 bp, Zea mays
  unsure (1)..(545): unsure at all n locations
  Clone ID: TF_LIB4746-019-R1-K1-E5
gtaccctcgnggtccggccggggcaagcatgtcgagagggcctcgaacgatctcaagtccgtgatcacgacgtacgaggggaagcacaaccacgaggttccagctgccaggaacagcggcaacgggcatccgagctctggctccacaccagcaccaccacaggggagcggcggccttcaccggaggctggagccgccacaggtcagcatccctcggttgagcgctgctgctgccgccgccgccgccgccgctgcctacggctcgctctcgcttcgtttcccaccacagctcagcgcagctcccgggggtttctccttcggaatgctccgtcccactggcatggcaccgtctctgggcggcttcttgccagcgcagatgccaggccgtgggttgccgatgcagggctgcgcgggcctggtgctgccgagaggcgaggcgaaggtggtgagcccagagcagcagtccggattgccggggggaacgggaatgccgcggcaacctaccagcagcaagagcagcagcttatggccaggtgggctcagggt

SEQ ID NO: 3775 - DNA, 1285 bp, Zea mays
  Clone ID: TF_ZmC746_6
cattgggtacctcgaggacggccggaaatcctcccagcaaacccccccgcctgggcaccgcattgtcccaacccccgcccaccctctagctcgggcgcagcccccctctcgcgggtcatcgccgcaccaccgacagccatccgtcagcgcttcagattcccaatcccgctaccagagcgcccacagcctgcaagtcacgagcaccgccatcactcgtgccggatctaggtcgtccaggtaggactggactggagcgaggtacgcggcggtgaggtgtggtgacggagctgagccacatcaaggagctggtgaggcagctggaggtgcacctcggcggtccccagacctgtgcaagcacctggcctcgcagatcttctccctcaccgagcgctccatcggcctcatcacctcctccaacctcgacggcgcccgacggcggaagcggcccgcgggtgacgccggcctcgcctcgccgctctcggcgacgcccaccagcgacgtcaccgacaggcctttccagagcaccaagaagaagaggaaggtgatggaacagcggaggcagagggtgagctctgccggcggcgagaacccggtcgaggacggccatagctggaggaagtacggccagaaggagatcctcggagccaagcacccaaggttggcaggcacacgcatctcgctcagacagccagagcagcagcggcggggctgggaggacgcgcccacgccctttctcttctcctccacgccggcgtgccttgtgccggagcgcagccccttctccgcaccgtccacgtccgagaactggggcgtgtccccggcgacctcggactccaaccacgtcgtctctttcccgcctttcgaggtcgccgccgccgctgccgcgcagttcgagttcgaggaagtcatgtcagcgatcgacagagccgacggcgagtttctcgaggacctcgacatctatgtctcaagcttcttagcgtgatctgctggatgtaatgtaaccgatgaacgctagggaatgggaatctgaggcagctgttaccatgagttgctctctgccgtttgtccaggggcagagcagggaagaacacatgttcttcctcggcccgtcccgttgtaaaccttagggtgtgagaatattgaatgtcccatctctctctctctttttcttcggtcgagggtttgcaaggaaaacaatttcgtaatagtgctgtcagttcagctaaacatgtgagtttctcgtgaatttaaacatttttccaaaaaaaaaaaaaaaaaagcggcc

SEQ ID NO: 3776 - DNA, 465 bp, Zea mays
  Clone ID: TF_17969955
attccgtgctgtcgcggagagcgtggcggccgacgcgtaggggggtactgggcgaagagcggcgccggacgtggtggccggcgaagagcgcgcccgcgtcgcggctgacggccgggccggagaggagcatggcggccgcggctgaggtggtcttggccatcgcggcggcctgcggcggcagctggtggctgtgggtgccctcgtacgtggtgatcagcaccgccttgtcctccgcgcaccgttgcacctgcacagtacacgcattatttatgcttatttcttgcatgcatgcatgcatctcgaccgaccatgcatggcgtgtctagaagccaaacacgtatatatagcagcacattattattaaaattgaagtcgttaaaggcaaaaacacgtagcgagttaagtttgagcaatactcctatatatttttagatggattgatagtccgtctggtgagatgtcata

SEQ ID NO: 3777 - DNA, 375 bp, Zea mays
  Clone ID: TF_ZmC165426_2
caaacgcccgcaccggcccaggccccacacgggcgccgggaccccagcatcccaagagagtgagtcgcccaccgctagctgctcgcctgcctgcctgcgcaacagacaaatggaccagctccaccggttgggggtggggcgatgcttagcttgttctaaacaaattatcgcgccctgatattattgcttgtcgcgttcgcgtgcgcaatgctttgctcggcgcaggcaacggaggacgtcctcgccgcacagcgacgggtaccagtggaggaagtacggccagaagaggatcactaagtcgccgtttccgaggtccatatataatatccctcttcctacttattagcatatatagtacttctttgctaccttagc

SEQ ID NO: 3778 - DNA, 545 bp, Zea mays
  Clone ID: TF_ZmC1208722_1
gggtaacccatgccccagagcttactatcgctgcacaatggccacaggatgccctgtcagaaaacaggtatatatatatatatatatgtacttaatgtgattaataattgattaaattaatattccatgtgtatatttatttaatagattgaacatatgaaaatggtttttatttatttttttaagctagaacatgatgtgcatgccaagtgctaagtaaaacaccagccttaaataaataatccagaattgttattagagtatctattcaagtacgactgacgatggtactaatagctggtccatcgtcaaggaataatgctacatgctgtatgtactttagtatagctaaataagcaaatgatcgcatggcgtatatatgttatatatatgccatgggcgtcgtttgataaaccctctggacgcaagtacatttgaatatacttttgcaagcaactatgacgacattaattatcctatgatagagatcacatttgagttcatgtgaacatatgtgggggctagctagcattgcaggctgcacg

SEQ ID NO: 3779 - DNA, 349 bp, Zea mays
  Clone ID: TF_LIB3245-375-P1-N1-D4
gcggttactaccggtgcagcagcgccaagggtggcgcgcgcgcggaagctcgtgtagcgcgccgccgacgacccggccgtgctcgtcgtcacctacgagggcgaccaccgccacgacggcgacggcgacggcgacggcggcgttggcgctggcgctgcccgctcccgcgcggcgtgaagatcgtttgcttcccgccgtagcagtcagtgtagcagcggtagtcaagtcaatcgatactagtagtagacctcttgtttcattgggggggcggattaatggtagatcgagctttgctcctgtaaaaggaattaaagtgcatttaaacttaatatcgtcatgaactttctcg

SEQ ID NO: 3780 - DNA, 384 bp, Zea mays
  Clone ID: TF_LIB3245-060-P1-KI-G10
gaatttgctcagaggcgcggcatcggaggaggctgcctgcagcagttcggccaggaagcgccgcaagcagccagcagagcggcagggcggcctggctcctcctcctccttctcctgctgcgacgggatccaagaggatgaggtaattactactatgcagcatagctccttttgagctagttaccagcttaagtatacaacgtataatcatctactactgaatctgcaggatgagccgtggagagcgggggacacgagcggagaagaaagaaacaatggaggacggcttcatctggaggaagtacggccagaaggacatccacggcagcaactaccccaggtctgtctgtctgaactctgaaccaacatccgaatcaaccaagac

SEQ ID NO: 3781 - DNA, 1978 bp, Zea mays
  Clone ID: TF_ZmC300_51
tcgggttctctctcccgccccttctctcttcgtgatgctcctctgcttgccttgccctggtgtggtggtgtctagtcaagtacgcttccgaattaaaagcgctctggcctgcaacctgctgtctgctccgtcctcccacggccggccgcctgcccgcgtcttcttcgccacccctcttctccggtcccgcacctgcatttcttgaccccttcctccaccgcagccaaacaatgtctccggcgccgagttcgcatcactcgcagatcaattcgagcaggaaggagaagcggatgaggaaggtggacaccttcgcgccgcacaacgatggccaccaatggaggaagtacggcgagaaaaagatcaacaacaccaacttccccaggtccggccggattctacatgttttgtttgtttttactttaccgtggggtgacaaatctatcctcgccagcgaagaacccggcttttattagccagcctcctttgacttgaatgtttggtaacttcctcttattctccgcatcaactatcggcgggccaaatcccagcaaatgttctttttcactcgctcacaggttcttgtcccgctgcaggtattactacagatgcacgtacaaggacaacatgagctgcccggccacgaagcaggtgcagcagaaggaccacagcgacccgccattgtacgcggtcacctactacagcgaccactcgtgcaacagcgccttcctcccgctctccccctccgagttccagctgcggacaccgtccgggaaggccgtctccatctgcttcgactcctcgtccggggcggcggcggccgtggcgtcggtcgccaccaatgctagcggcggctcgccctcttccagcgccgcggcggcgcggcgaggcacgccgccggatatcagttacccgtccgacctgcggcggtctgacacttacccgtggggcgccggcgccgtggagcagaagctggcgtcctgcgccaccgagtgccacgacgccttctcggccggcgccgtgccggaggaggtggtagatgcaggcagatttgggtctatcaggttcttccattttttgtaaattcatcggtggaaggcaactgattttacttcgacaaactaaggccctgttccaatctcgcgagataaactttagcagatatattttagctacttttagccatttataatctaaacatgagagctaatggtggtaattgaaactaaactttagcacttcaattcatatagctaaagtttagcaggaagctaaagtttattccgtgagattgaaacggggtctaagccccatctggatctcaaattctcaacggatttcaaggacctgacaaaaagaatcccagaataccacaagtgcagcacagtagcagtgccctctgcacgtttatagcacatagcagtatgatttcaaggccacaggtgggatctatttggcgtactcgtttccgctgaggtgctcagctcacagcagaaataatacaggcaacgaaagcaagtcccaaggaaggagtgtaggacgcggtagatcctccactactgcggcttctcgtagctgttctggtccctgaactccccgatcttgctcctgatcatgtgcgccacgtgaggctgcacgaacatgttggtagggtcgagcatgtgcacgatgaacctctccgacggcggcatcgacgcgttcaggttgacgatgaactgtgccataggtacgtcgcaggagatgaacagccccttgatcgcgttaaccatcttgcctgtgctctggacagggacaactgccgttgcttggcaccgacgacgacgctcgtcgtggtcccgcgtccctcccggccgcaggattcagtcctctcgcttcggatcggatcctccactcttcgctcgccggcggcgccgcagctcctctatctatcggcctcacctttcctcgcttctccttcagccctctttgcggccccggccgg

SEQ ID NO: 3782 - DNA, 945 bp, Zea mays
  Clone ID: TF_ZmC13091_1
tccatgcgtccgaagaactcgtcgtcatgggcgaccttaaccgccgtgccctacgacgacggctacgagtggaggaaatacggcgagaagaagatcaacgggacgctcttcaccaggagttacttcaggtgcacctacaaggacgacgccggctgcctcgccaccaagcacgtccagcagatggacagcgacgacaacagcagcccgcccatgttccacgtcacttaccacaacgaccacacctgcagcagcgccaaagctgcagccaaagccaacacaggaggcagcagcagcaacaacaacagccacctcgctgcattgctggcagactgctgcgacggcagcggctgcaacaagggactgacgaccaccaccaccaatgggcatgctgctgctgatgctgccgccatgaacatgaacatgaagcaagaaccgtcgctgctgccgccgccgcctcctctggccgaacctccttccgcctgctttccttatgaccaaatgccacagcagtgccatcagctgctatttcctgtaagcatggagcagcagttccccggcaatggcgaagaaatcccgtcggctgctggttcgtgcatctccggcgagaccagctgggatgggtattattattctggggacatggcggcagctgaagacgaccgtttccacgatctcgagcgtttcctcctgggcgatagcttcatggactaccagtactagctagctcgatcgatctgaaacagaattatgttaacagggggtttatgaaagtagaagaatggttttggtcttctttttttttttttttggattcttagggcagcagtgccaataataaagtgttctgtaggggaaaaaaataggcgtgcatgagatgtaaaaacaaacgatcgttttattgttatataaaaatgtccggcactttccaaaaaaaaaaaaaaaaaa

SEQ ID NO: 3783 - DNA, 703 bp, Zea mays
  unsure (1)..(703): unsure at all n locations
  Clone ID: TF_ZmC65166_2
gtaccaagattgccgatatacctccggatgaatactcgtggagnaagtatgggcagaagccaattaagggttcccctcatcctaggggttactacaaatgcagtagcgtgaggggctgcccagccaggaagcatgtggaacggtgcgtagatgattcggcgatgctcatcgtgacatatgagggcgagcacaaccacaccagaatgccaacaactcagtcagcacaggtgtagagaactcatcatcatcgccgcacctccttccgcaagtgctaccagcacggggtcaggtcaacaatgatttgtgcggagacattttcagctgtcgttgagatgtttggccctgctgctactatccacatgatttgtagcgagaatggagtgggtggtgagcacaagattttcttctctcttatggaggttatcccaatgatgacgaggaagaacaagccattagatagataggacagctgagctgttggtcgggattagtgtgaagaggtggaaaggaaagataaaagttggcgggaatgagacagttgtgtaaacttagtagaatggggaagtagagatagtgctgttcttcttggactactctgattccgttcctcactcactcacctgtatcaagatagcgtcaaaactgaaaagaagtgcacagaggccgccttttgctgttatagcaattcattcgttcattgtcc

SEQ ID NO: 3784 - DNA, 738 bp, Zea mays
  Clone ID: TF_LIB4758-016-R1-K1-D2
ccggccggggtaagtgttgctaattaataacctttaattgcagctaagcagagagtgttcagctcgtttaatttcttctgtaaacataatgacatgcgtatgtatgtctcttcaggtgagcgcgatgcaggaggagatggagaagatgaaggaggagaaccggatgctccggcgagtcgtcgaccggaccatgcgtgactacgacgaactgaagaagaaagtagaagcctgctatcagcagcaacaggcagatgagcctaaggagcccgaggtgttcctttccctcggcgccaccgccgccgggactggcggcggattcgcggagccgaagcgcaaggagcggcaaacagtgcgtcggccatctgcggggagcgatgacaccgacgacgacaccaaggaggaccgtcttgggctgtccctgagcctggcagcatcgtcgtacgaggaagagaagctgggagccgggccagccggccacgacttggaagaagcctccgtggccggcgccgaccgcaaggcgaagggctacgcgctgctggagagtagcaagctcgaggcaccggcaccgccggccgccgccggagaccttgccgcggccgggatcacgagccagagcgtcaacccggccaaccgcaaaactagggtttccgtgcgcgtccgatgccaaggccccactatgaacgacgggggccagtggagaaagtatgggcagaaagtcgccaagggcaacccttgccc

SEQ ID NO: 3785 - DNA, 828 bp, Zea mays
  Clone ID: TF_LIB4759-112-A1-K1-D5
cctcgaggccggccggggaacaaatgataattcactctcgcactagtcccaactcccatccatatcccatcatccagcatccaagcaggacgagaagaggcccggtcgatcgaatcaaagatggcttgcgtggcggaccgtcaggccgcggtgagggaggtggcgcaggtgtacgagctcatcaaactccagcagcccctcctcctcctccattcctccacgtcgcagctggcgcagagcctcctcggcaaggcgctgcgagccctcaacgtcgccctctccgtcatgaaccagcagcagcctccccctcctcctcctcctcctcctcctgcagtggcaccagtgagcgttgtcgtcgtcaaagctgagcctcacctgtcgccgcccagcccggcgtctgccgattccgaagccacggcaccgccggccagaagaggcgccaaaagaacaagacgatcagcggcgccaatgggagagaagaagaagaactcgtcgtcatgggcgaccttaaccgccgtgccctacgacgatggctacgagtggaggaaatacggcgagaagaagatcaacgggacgctcttcaccaggagttacttcaggtgcacctacaaggacgacgccggctgcctcgccaccaagcacgtccagcagatggacagcgacgacaacaacagcccgcccatgttccacgtcacttaccacaacgaccacacatgcagcagcgccaaagctgcagccaaagccaacacaggcagccgcagcagcagtaacaacaacagccacctcgctgctgctgctgctggcgctgctgccatgaacatgaacatg

SEQ ID NO: 3786 - DNA, 1283 bp, Zea mays
  Clone ID: TF_ZmC1183_1
ctcctgagtcctgatctccgatcgctcgccacctcacgaccggactcccctgctccagctctcacctatcctcgaagcagcaatggctgaagccgtggagagcggcgggcgggcgctcctggtctcggagttgggccgcgtgcaggacctggtgagccagctcgagctgcagctgcgcgcgcccgcggacgcggactccgtcgacctctgccgctgcctcgtgcaacagatcgtcgcgctcaccgaccgctccatcggcatgctccactcgtcaccggacctcgccccctcgccgctgaccgccacggggagcccgataagcagtgacgccgcctccgaccaccaccccttccgccccgccggcgccagccccaagaagcgcaaggccacggcgcgctggaccagccagcaggtgcgcgtcagcgccgacgacggccacagctggcgcaagtacggccagaaggacatcctcggcgccaggcacccgcgggcctactaccgctgcacgcaccgcaactcgcagaactgcctggccaccaagcaggtgcagcgcgccgacgaccaccccgcgctcttcgacgtcgtctaccacggcgagcacacctgcaggcccgccgccgccggcggcgggtccaagagggcgcagcagcacaacccgcacgcgcaggccgcgctgcagggcctcgccgcgcggctcacggtggccaccaccaccacggacaacgccgccgggctcccgccgatgacgcccgagagctgccccgtgcggggcgcctcgtccccgtggtccctcgcgtcgcccgtcggctccgacttcaacggctgcctgcaccagggcatctcgccttgcccggtgcccgggtacagggactggacctcggacgtggacctccaggaggtggtgtcatcggcgttcgccgccgtctcgtcggttgcgccccttccggtgcctgacgacgaattcatgcctctcgaatgcgtcgaatacgtattcgaccagaacttcgacattgacaccgcaatgccaagcctctactatccatgagaagagcaactgatcggcagcactgtccacttctccaagacaggagggaggagcagagctgcagcagaggagcctattcctgagaactgtgcagtagcagaagccagcaaagcttttaggatacattttaatgtctcattatcttttctttctttctttctttccctttcatgggttgggttttgttgatttcactcagcaagagaaaagttaatttttactaaaaaaaaaaaaaaaa

SEQ ID NO: 3787 - DNA, 2339 bp, Zea mays
  Clone ID: TF_ZmC4944_1
ctgccttcttgcccccgcggggggggctggccgctgctctcttcctccctcctcctcggtccactccaaccccaggcctgccgcggccacagacgggccgcgccgccgccgcagcttccgattccgcttccgccggccgttctgccgcgcgcgcgcctgtggcgcttgagcgggcggatttgttcggcccgttctttggccgccgccgttgcgctgcgccgtgttggcttccaggtgcgcaatccggtcccgtgctctgttcgtgagctgaggatttgggtagtccgccaccctggatcctgatgggccgttcctgtgcagttcccatccaggcgtcttgagattccccggccggagatctgcttaattcgtacctctctctggttctgaggcccctccgaggtggaggaggagctcgtgggtcgacgaaagaacaatcgtttctttgcccactcctgcggctgcttctccgtcccaggctttccagccatggaggaggtggaggtggccaacatggccgcggtggagagctgccaccgggtgctggctctgctctcgcagcagcaggacccagccctgctcaagagcgtagcttcagagacggctgaagcctgcgccaagttcaggaaggtagcggccctcctcggcagtgccagtggcggaggtggctgtggccatgctagaggcaggttctccagacgagtccggcctctggggctcgtcaaccagaagagccccttggggatcgccaccggcagcggcaacccgctggagatgatgcccagcacagctgctgctgctgggtctccatctccacctcagtcgactagctatgcgcaaatgcgcgctcggcttagcagtgcgccagagtcctcacgagggctggatttggcctgctccagcagcaggtgtagccctcatccatttggagcccccaagctggtccagccactgtctgtgcagttccagattgggagtgttgcgcataggtacccgttccaccagcagcagtcgaggcagaagctgcaggccgagatgttcaggaggagcaacagtgggatcagcctcaagttcgatagccctagccccagcggtggtgctgctggcaccatgtcgtctgcgagatcattcatgtcgtcgttgagtatagacaggagcatggcgagcttggatgggaagcggccgttccatttggtaggcaccccggtggcgagcgacccagcagatgcgcaccgtgcgcccaaacggcgatgcacgggtagaggggaggatggaagaggcaagtgtgccaccactggcagatgccattgctcaaagagaaggaaactgcggattaagaggtcgattagagtgccagccattagcaacaaaatcgctgatatccctcctgatgagtactcgtggcgcaagtacgggcagaagccaattacggctcgagcacacccgaggggttactacaaatgcagcagcgtcaggggctgcccagcaaggaagcacgtcgagcgatgtgtagacgacccggcgatgctaatcgtgacatacgaaggcgagcacagccacacccagctgccagcacagcctgcccagacctagaagatcagtaaatcgtcgctccattctggaagcgcggggagcatgcctttgcacctagatggtcatgtagaatctcaggccttcgattttcgattgcagcagcagcaatgaccatggagagaatcttatgagctgcttggcccccctcctgagtcactctgttacagatgcaagagtggggactgctgccaagttgttcatctttcttgtgagctgtggcatgtatgtataattgaaagatggtgcaggaaggaaggaaaatgcagcgtccgacagcgaccggtgagctttgccggtgagcctgaagggttgaaagcaaagactgacaagaggaagtgaacaaccgcgcattgttgtgagggtggattaggatgggaagatttggcttttagcgtgcacaagttcacttgccatggactagcctctgtatgttgcttttgctttttctgaaatatcgcatcacctcttttgttgacaaaataaaaaagggtggggttgcatcccagtatcaaaggagggagctccgtactgaccccgctgcaagttaggaccatctgggttttccaggtgtaagcattccagaagggaaggtgcaaagctgttgttggtgtgatttgccacccccagtactgttgctcttgtgtaaagcattctgtgtaattaatgatttgtgccatctgcaatcttgaggatgaatggatgctctaactgaaacataaaaaaaagaaaaaagattatttattttg

SEQ ID NO: 3788 - DNA, 1258 bp, Zea mays
  Clone ID: TF_ZmC740_2
ccgggaggtggaatggtaaaggggtctaccccaccatttccacctataaagccggtccgcggcatcccttccgacctcgaccggccgggaacctcccttcccgacccaattctcctcaatcaaagaaagtccccacgcagagcaagccaagatctgcgccgcggcgaagcaaatcagcaaagcaaagcaccggctggctcccatggccgtggacctgatggggtgctacgccccgcgccgcgccaacgaccagctcgccatccaggaggcggcggcggcggggctccgcagcctggagctcctcgtgtcgtcgctgtccacgcaggccgccgcgccgcacagggccgcggctcaccagctgcagaagccgccttcgcagccgccgatcggcgagatcgccgaccaggccgtctccaggttccgcaaggtcatctccatcctggaccgcaccggccacgcccgcttccgccgcgggcccgtcgtcgagcccgccaccggtgcctgctccggccgtcgccgctcccgctccggcccccgctctccacgtggtggctcccgtcgccgtggcgcagccccagagcctgaccctggacttcaccaagccgaacctggccgtgtcgggcggcgccacgtccgtcacctccacgtccttcttctcctcggtcacggccggcgagggcagcgtgtccaagggccgcagcctggtgtcctccggcaagccgccgctgtccgggcacaagcggaagccctgcgccggcgcgcactccgaggccaccaccaacggcagccgctgccactgctccaagagaaggaaaaaccgcgtgaagaggaccatcagagtgccggcgatcagcgccaagatcgcggacatcccgccggacgagtactcgtggaggaagtacggccagaagcccatcaagggatccccctacccacggggctactacaagtgcagcaccgtgcgggggtgcccggcgaggaagcacgtggagcgcgccaccgacgacccggccatgctggtggtgacgtacgagggcgagcaccgccacacgccgggcgcgcccgcgcccgcgcccagccccctaagcgactcactcttctgcagcaagccaacacattgttgtcgacagctattatcaatggcgtagtccctgctacctgctctattgttcttgcatcttgagcggaccactggattctaaggcaccctgaaatctgtctacgagatctctaagattatgagatgacctatgacccc

SEQ ID NO: 3789 - DNA, 320 bp, Zea mays
  unsure (1)..(320): unsure at all n locations
  Clone ID: TF_LIB4315-021-R1-N1-F6
gttttgggttttcttactaataccaacaactgccgcccctggtcttgtgcttcggccccttttgatcgtcctcccccttgtcgctgacgatcaccccggcggtgtccgcttggctgcgctccacctgcttcctcgctgggcacccccccgggtgagcggggctagtatccccntnnctcnncccatcccttgatgtncttctgcccatacttgcgccaccccctcgaactccgactgtggctgcccctccccgctggcccctctgggccggcccccgcactcccccagccgcgctgacccaacccgcttcctccccgatc

SEQ ID NO: 3790 - DNA, 866 bp, Zea mays
  Clone ID: TF_ZmC581509_2
aatactacaaccctctatataaccctggttgtaacttggaaaactctttcagcctcccctccctcacaagctctccagattccgctcccgcccgcgcaactagccagcctccaactccatggagaattatcacatgctcttcggacggccgtccacgcagccgtcctctgccgccacctccaactcctacaacttcatgctgccccctgccggcagcaccagcggcgccggcggcctgcgcgaccacgatagaggcggcggccagcacagcgggcatgccggcggcgtaccgtcgtcctcttccttcttcgcggagccatccaacacctcctccaaggacagtggcgcagcagctagcagccctcctccagccgcaggtatcggccgcggggaagaacccgcggcggggacgccaccagcagcagccgaggtggacggcaggctgcaggcgggcaagaggaagggggagaagaaggagcgccggcctcggttcgccttccagacgcgcagccaggtggacatcctcgacgacggctaccggtggcggaagtacggccagaaggccgtcaagaacaacaagttcccaagaagctactacagatgcactcaccaagggtgcaacgtgaagaagcaggtgcagcggctgtcaagggacgaggggcgtggtggtgaccacatacgagggcacccacacacaccccattgagaagtctaatgacaacttcgagcacatactcacccagatgcagatctactccggcatgggatcaaccttcagcagtagtagccacaacatgtttcactgaaaccgtcccaaatcacttcaagcatcggcggaccatgcaaactaataaattaagcaggaa

SEQ ID NO: 3791 - DNA, 823 bp, Zea mays
  unsure (1)..(823): unsure at all n locations
  Clone ID: TF_ZmC1382_3
ccggccggngatattcaggcaggcgcattgactggtacgcatacaactacaagcaaggcggctagctacagcggctagtgcgcgcgtggtgcaggcgcagctagctagtgcatgcaatggcgacttcgctgggactgaaccctgaagatctcttcacttcgtactcgtcttcctactactcctcgccgccgttcatgtccgactacgcggcgagcttcacgccggcgggcggggactccacggccttctcctcggagctcgacaaccttcaccacttcgactactcaccggcgccgatcgtcactgctgccggagccggggctgggggcggcgatcgcaacgagaagatgatgtggtgtcagggtggtggtgacgagagaagactcagaagcaacggaaggatcgggttcagaacgaggtcagaggtggagatcttggacgacggattcaagtggaggaagtacgggaagaaggccgtcaagaacagcccaaatccaaggaactactaccgctgctcgtcggagggctgcggcgtgaagaagcgggtggagagggaccgcgacgacccccgctacgtcatcaccacctacgacggcgtccacaaccacgccagccccgcagccgctgctatcatcgtcccgtacggcaacggcggcggcaatagcggcttctacagcccgccgcacagcggctccccgtcggccacctcctactcgggctccctagtcttctgacttttccgggccttgacccatagttacctttacaccccagtcgtcggatgagaagaatcttcagcggncggctaaacagtctcaactgc

SEQ ID NO: 3792 - DNA, 989 bp, Zea mays
  Clone ID: TF_ZmC300_25
cattgggtacctcgaggccggccgggaatctttgcaccgtaccccgtctcggttccgggccggaggtctcgattattatggacttctctcccgtcccttgtctctcttcgtgatgtgttgttatttagtaagctgttaagctaaaagccagggccgctcctctgctgttaagctaacgcgcgctggcctgctcccaccgccgcccgccccccgtcttcttcctcacccctctccgccagtccccttcctcactgcatttcttggttttctccctccaccggaaccaagcgatgtctccggcgccgagttcgcatcattcgcaaaccaattcgaggaaggagaagcggatgcggaaggtggacaccttcgcgccgcacaacgatggtcaccaatggaggaagtacggcgagaagaagatcaacaacaccaacttccccaggtattactacagatgcacgtacaaggacaacatgagctgcccggccacgaagcaggtgcagcagaaggaccacagcgacccgccattgtacgcggtcacctactacagcgaccactcctgcaacagcgccttcctcccgctctccccctccgagttccagctgcggacaccgtccgggaaggccgtctccatctgcttcgactcctcgtccgggccggcggcgcaagagccggcggccgtggcgtccgtcgccaccaatgctagcggcggctcgccctcttccagcgccgcggcggtgcggcgaggcacgccgccggatatcagttacccgcccgacctgcggcggtctgacacgtacccgtggagcgccggcgccgtggagcagaagctggcgtcctgcgccaccgagtgccacgacgccttctcggccggcgccgtgccggaggaggtggtagatgcaggcagatttgggtctatcaggttcttccattttttgtaaattcatcggtggaaggcaactgattttactttgacaactaatatgatacag

SEQ ID NO: 3793 - DNA, 2195 bp, Zea mays
  Clone ID: TF_ZmC11799_1
cgctccggttggcaattcggcacggcgaggctaggcacaccagtgacaaagagtatactcgcccgatcccgccgcgcgccgcagctagagcctagagctaggaggtcgatctgatcgcatcggccggggtctgccgccctgcccatggccggcgccgccggggacaggtcggaggaggacgtcggcaccgactggccgttcggtggcgtcgacgccttcacggagtactcatcctttttcgcggagcccggctggccgggcggcctagccggggagctcatcccggtgctggatctgcccgaggcagcagcaccgctgcccgcccaactgtccacggaggagccatcggaggagcctgcgcccgccaggtcgggggacgccggcgcgtcgtcgagctcgagcggggacggtgccgcgccggggaacggcgacggcgacgacgatcggaaggcggcgccggccgccgaggcagcgggtaggaaaccggcggcgaagaaggggcagaagcgggcgcggcagccgcggttcgcgttcatgaccaagaccgagctcgatcacctcgacgacggctatagatggaggaagtatggccagaaagctgtcaagaacagccctttcccaaggagttactacaggtgcaccaacagcaaatgcacagtgaagaagcgcgtggagaggtcctccgacgacccctccgtggtcatcaccacctacgagggccagcactgccacagcatcggtccattccagcgcggcggcggcgggggcgcagccgcggcgcggtaccacagcgcggcggccgtcgcgctggcggagcaaatgtattcgtcgtcgacgacgtcgtcgttcatcccagcagcgcggcagcagctcttcagcttgccgccgttgcacccgcagagctccccgccgtcctcggagacgacgccgccggtcgttagctcggtgactactacttcttttcagcgtgctaacgacggcgacgagctgtggcggacaggctacggctcgggggtgcccgtggcgcagtcgccgtcaacgccaccatcagtgcctccgccggccatttcggttcagaaggcggggctgctggacgacatggtgccccatggtgtaaggcatggcaccccatgatcgatggtggcaaaatatggtaattaaagaaactgagctaaatatgatactgacttgctgctttctatttggtgtgtacgacgtagtagggagtacgttgtataggagcaataataatggcacttcatgcatgctgccacacatatacgtatatatatgatcgtattcatgtctctgctggtacgtacacatgtggactcagtggcttaggatctttttcaacgacatatttcaattagtgcactacaaatactagatcgagtagttggcagactagagcacatttgtacatgtgtacagatctagcatatgcatatatatgcatgcatacatgtgatactcccaattaagtttagatttcttagggaatagttgtatgcgagttatttcatgtaccttattattattattatatcttctttatattgcatttccagctgccctggttagctttgacaaacagtcccccctctccacatgctcatgcatggctgaaagctactatagctactagctagggaatgctgaatgcaaaaatgcagcacatacataaatgtaacgccggccctatattcctttcaacgactagttggttttcgttggaatcctctaaaaaatcgttataaacaccaatcggaaaggaaagacgtacttgtgttttgcgttcatacttgtgcacatgtatatataggaccatttcctatcttatccttcagcgtatagagtgacttgacttgacttgacctggagtctgatcgatctaattcaggttctcacgttttttttcagacatatacctgtcggccgtaccagcaagaggcggataaagtgatcaaccagagctatagctagggttttctcctgctggattcatcagtagttagatttatctattactctaccagacactgcatgcatatatatactcagcttatctgttcagatttgcttatattcagtgtcactctccaacaatctccattgcacctacatgtggatgtgtagcagtacttgtatttcttgtcaaaaatcagagaggtatatctagaagcttcgcatgc

SEQ ID NO: 3794 - DNA, 1065 bp, Zea mays
  Clone ID: TF_ZmC5807_25
caataggtgccacaccatcgatctttcttcagcctggcttgaaggaactgcaccagcagctaaccttctatttggttggggcttgggatgattatgatgccctttataaacaacttcagtaatctgaccatcaagcgaacgctctaatagctttttaacttcacaattaggatgagtgcacttgtaataacttctaggattttcacttcccttgacatgcttctgtccatatttgcgccaattatagccatcctctgctgatttttcagctacattttcagtttgtgtctcctgggcagcattttcagagctatttatcaggtgcatctctgatgtaccaacttcagcaggcatgttgtcagatggacaaactattgaaacaggttggtttggagcacttgaaacatttgctgtgtgactcgattcccgtgagcatagaggtttattttcagtcatcaaattgctagatggtgaggcatgatttgagccatgattttgcataggaatgtcatgatgattttgattgttgactgcagtagccgacgattgagaattgagatgaggcttgaattcaaactcccgagagcctccatcttcttggccactatcagctgaattatccctaggcgaaggcagtatgtccggatgagtgctcttgttcatgtttgcagccatgctcagagtaccggttgtgggagacggttcaaccttgaagttgttgaggaggacgggggactcgaggagagctccggggctaaacccggtggggatggtgaggcacggctcccgcgatatcggcagccgcgcgggggacatggccttgtacctcgcgccggcgccggcgagcgcagacacacgtcgatccgccaggaccggcttctccggcgagcacccagcgccggcgggaaggtcgccggagctagggtttggcgaatcggccattggcgcgggccgcggggggaggtgagtgaaggagacgagacaaggagcgacgagcagctaggtggtggttttggagcctagaggggatggtgggaagggcagtttggggaaagtggccccgaa

SEQ ID NO: 3795 - DNA, 2210 bp, Zea mays
  Clone ID: TF_ZmC1508_1
tcggcgggacggtcactgtacagtcaaaagctccccattcctcttccccttctcacccggcactcgaactctgcggccctgcaaaccctagctttcgctccatggccgacggcgatccggagccggcgccagcgccggcaccggcactggctaacgagaagctccatgtccgggcggcggcctacgtggatgagacgcgcccgccgccaccgctggagccctccgggggtccggacgaggagaagcgcccgcccgaagaggtagaagcggaggtggagatgcacccgccgcgggaaccaaccggggagccgcccgttgatcgcccgggggtggaggtggtggcggacatgaaggcgaacgaagtggagaaggaaaggggggatcgggcaaaggagaagcgggagaaggataaagggaaggggaaggaggagaaagagaaggtggacgaagaggcgaaggggaaagtgactgcggtgatgaaggtggatgggacggagaaggaggtcaagccgacccggcggccagctggggccagcgcggagacgcccatcctagcggtgccggtggtggccgtgccttgcttcatcgcgcctccagggtttgcgggccagtttgcaatgactcatcaagcagctttggcaagtgttacagcacaggcacaaatgcacttgcagtcaccaactccatctgcatgttcggaagtgccatcaagtccattttatatgacaccaagatctctagtgccattgcagcattcaccatcagtaactgaaggaaatatttgtacaccaattgctgacaagtcattttcatctgattcaaaatcacaccatgttgtaaatatggtagctgatggcttcaactggaggaaatatggtcagaagcaggtgaagagtagtgataattccaggagctactatagatgcacaaactctggttgtctcgctaaaaagaaggttgagcatttccctgatggccgcgttgtggaaatcatttacagaggagcccataatcatgaaccaccacagaagaccagatttgcaaaggaaagagtgactcctattagtgttccctctggaggcgaaaccttgaggcttgtgaacacagaaattgtagaatctagcacgcctacctgtgaattggaacggagtgccatctcagaaacttctgagcagcatctcttttgctcaagtgactgcgaaggggatgctggtaacaaatctgaagatgaacatcctagcgcggaagccctgccaaagcgaagaacacttgaggctacagcaccaaatttaacgccggttcgcagaactgttagagagcaaaagattattgtgcaggctggaaagatgagtgatggatacagatggcgtaagtatggacagaaaattgtgaagggaaatccaaaccccaggagttattaccgctgcacgcacggtggatgccctgtccgtaagcatgtggagaaggcgccagatgatgttaacaatattgttgtaacgtatgaaggcaaacacaaccacgacgaacctttcagaagcagcagcataccagtttctgtaatcagtccatcagcgacagccactgagcaacccaacacatcaagtacgtcagatgagagacctccaaccattacccagaaggacgccaacagtgagtctgataaggagacaaccttgaaatttggaggcgagaaggcactcgaatctgcgcaaacgctgctcagcatcaaaactaactccgatgacatgaagaactctgtcctgaaggaaacttctgctgcagttccagtccaaaacaattgagcatgctgagatagggtgattctattgacatctcttaggctgtcatatttattggttgagtgatatgctattatgttaacttgtatgacgtgaggcttggtgttcggtattccgtgtggagcatttgaggaagcattaggtttcaggaagccacgactggttgtttctgcctgtatagattcccattccctagtgtgtacaggtactgtattttatctgaggccagataacatgtgtggggtggttcttgagaacctgtgtgtgctgtattgttctagctcgatctattgcaatagctgatacgagattgtcatttatttatcggtataacacaacaaaaaaaacgtttgcaaaaaaaaaaaaaaaaaaaaaaaaaaaaaaaaagtactctgcgttgttaccactgct

SEQ ID NO: 3796 - DNA, 1139 bp, Zea mays
  Clone ID: TF_ZmC154114_1
gaatttgctcggaggcgcaccaacggaggcacctgcccgcagaagttcgcccaggaagtgtgcggcaaccgagctggtggccaaggggagggagtcggctgccgttctcaaggccatgctcggccagcttcctgcggcggcgacgccccatgatggtctccgggatctggccgagcaggtcctccgctgctgcgaccgagctctggcggccttgctcagaggcgcggcaacggaggaggctgcctgcagcagttcggccaggaagcgccgcaagcagccagcagagcggcagggcggcctggctcctcctcctccttctcctgctgcgacgggatccaagaggatgaggatgagccgtggagagcgggggacacgagcggagaagaaagaaacaatggaggacggcttcatctggaggaagtacggccagaaggacatccacggcagcaactaccccaggctctacttccgctgcacctacaaggacgaccgcggctgcgaggcccggaggcaggtgcagcggtcggacaccgacccctgcgcggcctacctcatcacctacttcggcgagcacacctgctgctgccgcgacgacgccgtcgaggcgccagcgccattcgtcatcgacttcggcttgagcgccgctgcctgtgacgacggcctgcagctgccgcaatacggttcgccttggccgtcttgcgacgacgacggcccgggcccggtggaattgcaaacgccgccgccgcgcacatcagctgatctgtgcagttcaccgccggaggaggagttgcgggctggcgcgtgcgacgtggctgagttcgtcgccgagcagtcaacgacggtgacagcagagctcatgggtaggatgacctcgccggagtgggacgggtgcttggactgggagttgggcgaaggcgacagctcactcgacgttgacggtttcgacagatactacttcgattacagtgatctgctttagagcctgtacaatctattaatctaattaaataaggagtttttttgagcggtctctagaagagacagattcttcgtcaagagttcgagagttcgtctccactcaatttctatatatatatatattatattttgactgtaaaaaaaaaaaaaaaaaagtccac

SEQ ID NO: 3797 - DNA, 984 bp, Zea mays
  unsure (1)..(984): unsure at all n locations
  Clone ID: TF_ZmC96043_1
cgcgcagctacttcaagtgcacgcatcccaactgcctggtgaagaagaaggttgagcgctcgcacgaggggcacgtcacggagatcatctacaagggcacgcacaaccacccgaagcccacgcagagccgccggccaggcgcaggcgcgcacccgttgggcggcggtgcgcaggcggacgcagccgacaacctgcaggggtcacaggcaaacgcggcggaagccaaccagccgtggcgtgcgggtgtccaggatggcgtggacgcgacgtcgcccccgtcggttcccggtgagctctgtgactcggcggcgtcgatgcaggtcgactgcgcggcccggtttgggtcccccgagggcgcggacgtgacgtctgccgtgtctgacgaggtggacggggacgacagggtgactctgactcatggcggtgccaacgcggcggagggcgacgaactggaatctaaacgaaggaagctggagtcatacgccattgacatgagcactgcgtcgagagctgttcgcgagcctcgagtggtgatccaaacgacgagcgaggtggacatgctggatgacggctaccgctggcgcaagtacgggcagaaggtcgtcaagggcaacccgaatccaaggagcttctacaagtgcacgcaacctntctgtatggtgcggcctcttttttccgcgcgctttttacgctcttatgctcttctttccttttttccgtccctcggcctcctttttttttttttttccttggcttcttccccttttttttttttctcctctttccctcttttcccccccccgctttttcccttctttcccccctttttccgtcccttttccctcccctttccccttttcttcccttttcctccctccccgtttcgccttttctctcgtttccctcccttttccttcctttcctcccctttctctcccgttttccttccccttttcctccccgttcctttccgtttctttcttt

SEQ ID NO: 3798 - DNA, 920 bp, Zea mays
  Clone ID: TF_ZmC208922_1
tttttttttaggggatcaaagagcatgcaattgccattgatgtgtatgaatgatgaatcaaacagctggtatgacaactgtaagagtgacttggagttgtaaacaaaataaagaaaagtaaaggcagcaatctttaatggaattgtgaaaccagcagcttagctagatttaagtactggaacgaagaatctgaactcctggttgtcttcgtctctactccggcggcgtcatgtcgtcaataccatgcgtgtcacacatcacagcatctgtgcttgtcgacagcaatggcttcctcgggggacaaggcttgcccggcttcaggtggttgtgctcaccactatacacgatctcagcaacctggccatctggcgtcgtctccaccttcctcttcacagggcagctagggtgagtgcacttgtagtagctccgcgggaactcgctgcctttcactttcttttgcccgtatttcctccagctgtacccgtcaagtgacaggcgactgcgctcaccattccgcctcgcagcttgccacgctgttgcatggtcacgatacgtgtgatgttttgcatactcttccacctcctcagacatggtatccgacccggcatctatcgctgctgctatctgtgctggaaggttagccggtagcgatgccaaccgagtggcttttggcctgattagctcactctcctgtgggaaggtgattgttggggaacaagtggcgttgaagtcgtgcagaaactttgggaagggccagaagctggagaaaggccttgaggcaacaggcttcagaacagcaaccttctcatgaggctgcatcttccctgaaccttagtcctccactctgttgcagctgtatatactggtggaagcaatgcaattgcaaaggcaacaagccaacaaggatgtgagcagaagac

SEQ ID NO: 3799 - DNA, 696 bp, Zea mays
  unsure (1)..(696): unsure at all n locations
  Clone ID: TF_LIB4980-002-R1-M1-H1
ggccctaggggccttttttttttttttttttggtctttgcctctttggcatgcacagattaaacaagaggcctcatctgaatggatttcatctaaacagacacggagaaacagaagcagtgaaacgcactcaagttgtcactactgtacatcttgttttcaatgaaaagaatggcggcgtcgctcaagcacgacgctggcagaggctccgaatccgatccgtcggacgggctctcaagcctccgcgttcgcggcggtgagcacggaggggtccagcggctgcgcgtggttgtggtcgttctcgtaggtgacgatcagcatggcggcgtcgctgcggcaccgctccacgtgcttcctcgccgggcagtccttcttgctgctgcacctgtagtatccccttgggtgaggagagcctttgatgggtttctgcccatacttcctccaagagtagttgtccgctggtatgtcggcgttcttgtcgctgatcgccggcaccctcaccaccctcttctccctcggnttcctgcacagatctccaccatccattggccagccatccaaacgccacgtacaacatgtcgcgttgcaaacttgcgagcaggaggaggatgcagagatggcggcagcggcactcactttttcttcgggcagtggcacctcacgccgctgctgtcctccgctctcttgncacacgcct

SEQ ID NO: 3800 - DNA, 543 bp, Zea mays
  Clone ID: TF_ZmC425883_1
ccccttttcgagttttttttttttttttttttttttttttaagggaacaaatggcagtgtagctttatttgatacaacactacacatgaccgcctacaccgatggacgatggaccctctatcacatcggattacatgatgagtacactacgcatgcatgactagctagggttcatcgaccacacgctctgtcattcattcggcaagattgaagaccgttatcaccaacaacatctaccccggccgctggacgacagaacagatacggttcatcaaaaggagctgaagcaatcggtgtggtcgccggaggaagcgtcgtcgctgcagggagagtgcgtgtggcggccctcgtacgtggtcatcaccatgcggcagtccgtcgacagccgctccacccgtttcttcacgcggcagttgctgtgggtgcaccggaaatagctccttggatggaggctgttcttgacaaccttctggccgtacttcctccacttgtagccatcatccagtacatccacgtcgcttctggtctggaagcaaaacctcg

SEQ ID NO: 3801 - DNA, 930 bp, Zea mays
  unsure (1)..(930): unsure at all n locations
  Clone ID: TF_ZmC58440_3
cccacgcgtccgatttgtccattccccctccaccattcctccccgctttctccaccatcagggcgaaaattttatgcgagctttggaaagcgcgagctagtttatccggccgggcgtggtcaccgaggcagtagcggcgagagaggggaggatctgatcgatgtcgtcgggcgaggacgggtactgcagctcggattcgccgcgggcggaatcccccgaccagccgcaggcagctgcggacgcggagtcgcctcgcgccggagccgggccgaacaagcgcgacctccacgcctcgtcgccggcagctaagcgcagccggagatcggtggagaagcgggttgtgtcggtgccgctggccgagtgcggggaggggccgccgccgtctgactcgtgggcgtggcgcaagtatgggcagaagcccatcaagggctccccctacccacgtgggtactaccgctgcagcagctccaaggggtgccccgcgaggaagcaggtggagcgcagccgcgccgaccctgccgtgctgctcgtcacctacaccttcgaccacaaccacgaggcgccgcggcccaagagcagctgctgccaccagcaaggcaggccgccggcgccgaagcctgatgagcccgtggccgagcaggaggatgagctgggtccggagcatgagccggaagacgagcaggagccggagcagaaggtcgtcccaggtctggccgggccggaaacggcgccggcaaccgcaacgttggcgccggtggcagaggaggacgaaagcttcnacttggggtgggtcgaccagtacccgacgtggcaccgttcggcgctgtacgcgccgctgctgccgccggaggagtgggagcgggagctgcanggggaagaccccctgttcgcgggcctcggcgagctgcccgagtgcgccgtcntgttcgg

SEQ ID NO: 3802 - DNA, 363 bp, Zea mays
  Clone ID: TF_LIB3245-348-P1-K1-A1
cggacgcgtgggcggacgcgtgggcaaggactcaaaacttctgcacccacttttgataaacctgctgacgatggatacaactggcggaagtatggccagaaggcagttaagggtggcgagtatccaaggagttactacaaatgtacccacacgagttgtccagttaagaaaaaagtggagcgctcagcagaaggacacatcactcaaataatttatagaggtcagcacaaccaccagcgtccaccaaaaaggaggtccaaagatggtggtggtccactaaatgaagcagatgttcttcatgagaatgaagacatttcaactagatcagaacctggctctcaagacactctgaaaacatgaaag

SEQ ID NO: 3803 - DNA, 712 bp, Zea mays
  Clone ID: TF_LIB4738-064-Q1-K1-A4
cattattaggttcgtattggtcgcaccttgactgtgcttctgatatatactacaacaggaacagatccaagaagaaggccgagaagaggcagccccgcgttgccttcctcaccaagagcgaggtggatcaccttgaggacggctaccggtggcgcaagtacggccagaaggcggtcaagaacagtccttacccaaggagctactaccggtgcacggcgcccaagtgcggcgtgaagaagcgcgtggagcggtcgtaccaggacccgtcgacggtggtcaccacgtacgagggacagcacacgcaccacagccccgccagcttccgcgccggcggcgcgcacctcttcatgcccaacgcgcacgcgctgccgccgcagcacctgatgctgccgtccagcttccgcccggcggacctgatgggcatggtgcaccccgtcagcatgggcgcaaaccttagcatgttcctgccaactatgcctcctcatatgccatcgccggcgtctcgtgctcatcctcttcagcagcagcagcaccagttcactgactacgcgctcttgcaagaccttttcccttccacaatgcccaacaacccataactaactgctacacaattagctagcctagctagaatcgacatgagagatgctgtccaagtactctgcgccatatgtgatcacctgatggccttgcgctttgggcttggtctatgggg

SEQ ID NO: 3804 - DNA, 1497 bp, Zea mays
  Clone ID: TF_ZmC11951_1
ctgaaaagctcaatcctctccgccctttccacactaaactcccagcagactcccccactccccatgtcttctggagtaagaagtggcggcggaggagatcaccatggcgtccaccaccagcatggccacggccacctcgccggagccgacgacggcgccgagtacgcgttctacagcaacgacatggagagcttcttcttcaatcagccggcgtcggcggacgtcaataatggaggcagcagaactggcgccgacgagctcaccatgccgccgtactccagcgtcacggactacctacaggggttcatggacatggacccctctgggctagctcggcacctcgacgcgccgtgcctgctggcggaggacgccccgctcaagcatgagctgtccgtcgatgtgagctacgacagccagggcaccagcggcgcgcccggagatggggcggcggcgatgcacacgccgaactcgtcggtgtctctctcgtcgagcgaccgggagggggagggccagcttcgtcggtgcaggaagggcaggccgaaggcggaggatgatgcggagggggatgagaaagatcaagaagacggggagaattccaccaaagcgaacagatccaagaagaaggccgagaagaggcagccccgcgttgccttcctcaccaagagcgaggtggatcaccttgaggacggctaccggtggcgcaagtacggccagaaggcggtcaagaacagtccttacccaaggagctactaccggtgcacggcgcccaagtgcggcgtgaagaagcgcgtggagcggtcgtaccaggacccgtcgacggtggtcaccacgtacgagggacagcacacgcaccacagccccgccagcttccgcgccggcggcgcgcacctcttcatgcccaacgcgcacgcgctgccgccgcagcacctgatgctgccgtccagcttccgcccggcggacctgatgggcatggtgcaccccgtcagcatgggcgcaaaccttagcatgttcctgccaactatgcctcctcatatgccatcgccggcgtctcgtgctcatcctcttcagcagcagcagcaccagttcactgactacgcgctcttgcaagaccttttcccttccacaatgcccaacaacccataactaactgctacacaattagctagcctagctagaatcgacatgagagatgctgtccaagtactctgcgccatatgtgatcacctgatggccttgcgctttgggcttggtctaatggggagggaactgcagttattattgattgattaatctgctagctttcatcttaaacattggtttacagttcttacccttccatttgtcaactctccgctgcgcggattgcatgggaggtactagagatggaaccgagtactttttatagctatcactataacggcaactaatttatgtacggcgcctctagacttcttgtacgtgtacatatcatgtgttcctcattgaatcatttgggag

SEQ ID NO: 3805 - DNA, 1145 bp, Zea mays
  Clone ID: TF_ZmC581509_1
cctcgaggtacctcgccggccggcgcaacttttaagcgagcatggagaattatcacatgctgtttgggacgacggcgacgcatgcgcagccctcttcagctgccggaaccccaagctcctacaacttcattgccaccagcaccagcagcgctagcggcttgcggcgcgaccacgaccgaggccagcacagcgggcacgtgcacgccgccggcggatcctcgtcgccgtcctccttcttcgtcgcggagcggctgtcccacaacgacgactccagcaaggacggtggtggcggtccaggtccagccgcagctggcagtggagagaaggaggccgaggcggacgacaggccggcggcggccaggaggaagggggagaagaaggagcgccgcccgcggttcgccttccagacgcgcagccaggtcgacatcctcgacgacggctaccgctggaggaagtacggccagaaggccgtcaagaacaacaacttcccacgaagctactacagatgcacacaccaagggtgcaacgtgaagaagcaggtgcagcggctgtcaagggacgagggcgtggtggtgaccacatacgagggcacccatacacaccccatcgagaagtctaatgacaacttcgagcacattctcacccagatgcagatctactccggcatgggatcaaccttcagcaggagtagccacgacatgtttcactgaatgaaccttccaaaaccacttcaattaagcgtccgatcgagcaccatgcaaaccaagctagaaaattgatccatagattttattaatttgtacattgagtcttagatgtttaagagataaataaagcgtattgtgtaaaaaaaaaaaaaaaaaagctcgttagttcgtacatttcgtctgtgtgttctttgagtcctagatgcgtgagtggtcagctagcggcatttgatagctctctcccggtggttcttctcccccactgggtcttcttctcgcctttgtcctcttgttgttgttggccatgggtagtggccggccttggctccgccccgatttttacaccgccacgtttttagatggcgcttctttggagatggcgtttccacccctcatgtgataccacccctcattatattggcgggataaaaaaaaaaa

SEQ ID NO: 3806 - DNA, 919 bp, Zea mays
  Clone ID: TF_ZmC458678_1
tgtcattagtagtatatgtatattattattatgttgtctgtttgacctcttagtacgatggatttgcctgtgtatgtatatattaacataccataataatgaccaaattaagctagcttcgggttagaattagaactgcgagagaaactggagctgcttgaggatggggctgtgcgcttttatgagcttctcgcaggggtgtgtatggaccacctcgtaagtagtgaccacgatgctcgtatccttgcttagccgctgcacctgattagtcccattgcacgtgtgatgggtgcaccgatagtagctcctggggtgttcgctgttcctgaccaggtggatattgtacttagttgattggtagccgtctggaaggatgtcgtttacgcgagccgtctggaatgcgaaccgcggcctgctcggcttcttcttcctccccgccgccgcgccgcccttctccttgctgctgctactccctgcgttctccgcgctctggtcgtccaggggcgccggcggttgctgcagtagtagtcccggcaagaggggacccatcaagctggcatgctgctgaagcagcgccgaccagtccaccgtagccgcccccagctggagaggaagcagctgcaggtcgttattattgcacgccgatgacggttgctgctgaagcgctgtggcgagggtattgcgctggtcatccgattccgatggtggcggtaataagctcggctgcggcgacggcacggtgaagtaggggaagctggggaacgtgtgcgacggcgactcgtcgtctccttgcagctgctgctggttctccatcgatgatctcgttctatgggcgcctgctagctgttccttctagctagctctagtgggccgacgacatgcagtgtcacgttcccggccggcctcgaggtacccaatg

SEQ ID NO: 3807 - DNA, 1652 bp, Zea mays
  Clone ID: TF_ZmC35521_1
gccgagacagccccggcccgctcaccctcgccgccgcgctcttccccgacgcgccctccccggccttccacggctccttcacccagctcctcgtcggcgccgtaggctccccggccgtaccctcgtcgccctccccgttcgctgtcccgccgaggctcagccctgccacgctcttgggctcccccggcttcttctctcccacggcaagttttgagatgtcccatcaacaagccttagcacaagtaacagcacaagcagtccattctcagtacaatatgatcaatcatgcagattacactatccctttttcgtcgacgacaacacctgctttggtcatagcacagcatgccaatttttctggcaatttgacatcagcacaggagaaaccagctctgccgtcacatacaggtaatagcaacattgaatcaaatgaggtttcacaaggactcaaaacttctgcacccacttttgataaacctgctgacgatggatacaactggcggaagtatggccagaaggcagttaagggtggcgagtatccaaggagttactacaaatgtacccacacgagttgtgcagttaagaaaaaagtggagcgctcagcagaaggacacatcacccaaataatttatagaggtcagcacaaccaccagcgcccaccaaaaaggaggtccaaagatggtggtggtccactaaatgaagcagatgatcttcatgagaatgaagacatttcaactagatcagaacctggctctcaagaacactctggaaaacatgaagggtcaaatgatggcatatcagggccttctgtgtcaagaaggggaggaggagatgagcaattgtcaggctcaagtgatagtgatgaggaacaagatgatgaacaaagggctggcgacgaagaccctggctatgcaaatgcaaacaaaagacatgtgccaactccagctcaaaggataattgtgcaaacaaacagcgaagttgatcttctggatgatggctatcggtggcgcaagtatggacagaaagtggtaaaagggaatccccacccgaggagctactatagatgcacgtaccaaggatgtgatgtgaagaagcatatcgaaagatcatcccaagacccaaaggccgtcataacgacatacgaagggaagcacagccatgatgttccagcagccaggaacagtagccatgctgctgccaatgcaaattgttcatcttccaccagtgtaccacacagggtccagagttcagcgtccagtagtcgcagagtggcagacttacaaagcaccttttcagcttcttctatgctcaggataaataaagccgaaattacagatggctgatttgccgttggccagtgtggctgagctctcacctccagttttccaggtctactactaccatgggttagttgaagccattgagcagcatgtaatgttaaagaattgttcctttttatgatgtaccacctatgttctcgaatatttgttgtccattagttcatttttaaactaaaccgcgacaaataaaaaagaacggagtgagtataattctcagctaggaattaaacctagctaggcgggtggaaggtgtggcgtgggtctgctattgtaccgtacaagtttgataatttttatttttgaactcctccc

SEQ ID NO: 3808 - DNA, 767 bp, Zea mays
  Clone ID: TF_LIB5116-018-A1-PF1-F9
aactcctctacctttcttttcctttcttcttcctcctccttcgtcttcctctcctctcctctcctctgcgcttcctttcttgctctgggactgggcaacaatgtcccccgtgccaagcccgcatcaatcacaacttctaggccatgaatcaaggtcagttttctgcttctttttatctttcttttctatatatgtgtgcggtcagttcaatccgagtaacctctcttgatttgtttcttctgaaatgaaacaaacaaaacttgcaggaaagagaagcgcatgaggaaggtggatacctttgcgccgcacaacgacggccaccaatggaggaagtacggcgagaagaagattaacaactgcaactttcccaggttcgcagcccacctttggtctcatcctcatcctcatttggtgatctgcatctgcataggttcccaaaaaaccattagtagtatctagcatccgtcttttcgtggcatatcacaaatctttcagccccctctctctgatagggagggcttttcattcttcacatccaaatctaccatagggatgcatagtgtaacaaacttaccaagatatgaagaagccatttactcacagattcgtcttcttctttctatcctgccacaggtactactacagatgcacctacaaagacaacatgaattgcccggccaccaagcagattcagcagaaagatcacagcgaccccccattgtaccaagtcacatactacaacgagcattcatgcaacagcgccttcc

SEQ ID NO: 3809 - DNA, 1582 bp, Zea mays
  unsure (1)..(1582): unsure at all n locations
  Clone ID: TF_ZmC1136_3
cattgggtacctcgaggccggccgggactcccttcagccactcctctatcggtgacgcacgcaccccccatctctgatctgatctctccccctggatctcgacctccgcctggctgctccgctctgcctctgcgtcgcttgccatggcgtcctcgacggggagcttggagcacggcgggttcacgttcacgccgccgcccttcatcacctccttcacggagctgctctctggggcagcagcggacatggtaggagccgcgggcgccgatcatcaggagcggtcgccgagggggctgttccaccgcggcgccaccaggggcggcggcgtaggcgtgcccaagttcaagtccgcgcagccgcccagcctgcccatctcgccgccgccgatgtcgccctcctcctacttctccatcccgcccgggctcagccccgccgagctgctggactcgcccgtcctgctccactcttcctcgaacttcttcgcgtcgcccaccaccggcgccatcccggcgcagaggttcgactggaagcaggccgccgacctgatcgcgtctcagtctcagcaagacgacangccgggctgcggtcggcagcgccttcaacgacttctccttccacgcgcccaccatgcccgcgcagaccacgtccttcccttccttcaagcaacagcaagtcgaagcgacgaccaaagccgccgtcccgtcgagcaacagggcgagcggcggcgggaacggcaacactaagctggaggacgggtacaactggcgcaagtacgggcagaagcaggtgaaggggagcgagaacccgcgcagctactacaagtgcacgtaccacagctgctccatgaagaagaaggtggagagggccctggccgacggccgcatcacgcagatcgtgtacaagggcgcgcacaaccaccccaagccgctgtccacgcgccgcaactcatccggcggcggtgcggcggaggagctgcaggccggcaacagcagcctctcggccgtagcggcggccggctgtactggaccggagcactccggcgccaccgccgagaactcgtctgtcaccttcggcgacgacgaggcagagaacgggtcgcagcggagcgacggcgacgagcccgacgccaagcgctgcaggaggacggcgagaacgagggcagctctgcaggcggcggcggcaagccggtccgcgagccccggctggtggtccagacgatgagcgacatcgacatcctggacgacgggttccggtggcgcaagtacgggcagaaggtggtgaaggggaacccgaacccgcggagctactacaagtgcaccacggcggggtgcccggtgcggaagcacgtggagcgcgcgtcccacgacacgcgcgccgtgatcaccacgtacgagggcaagcacaaccacgacgtgcccgtgggccgcggcgccgccagccgagctgctgctgcggcggcggcgggttccggggccttgatggccaccggcggcggccagctcgggtatcagcagcagcagcagcagcagccatacaccctggagatgctgagcagcggatcgtacggcggcggggcggctac

SEQ ID NO: 3810 - DNA, 674 bp, Zea mays
  Clone ID: TF_ZmC740_4
cgggcggcgccacgtccgtcacctccacgtcttattctctcgggtcacggccggcgagggcagcgtgtccaagggccgcagcctggtgtcctccggcaagccgccgctgtccggccacaagcggaagccatgcgccggcgcgcactccgaggccaccaccaacggcagccgctgccactgctccaagagaaggaaaaaccgcgtgaagaggaccatcagagtgccggcgatcagcgccaagatcgcggacatcccgccggacgagtactcgtggaggaagtacggccagaagcccatcaagggctccccctacccacggtaagtcttctgtaaaataaaatctcctcctacggacctgtcggcatcgctcgcccgctcggcgctcggctcttctttaccgtcgtctccgactatccgcgccgacgaatctgactcttctctcgccgccatctggtttccaatccaggggctactacaagtgcagcaccgtgcgcgggtgcccggcgaggaagcacgtggagcgcgccaccgacgacccggccatgctggtggtgacgtacgagggcgagcaccgccacacgccgggcgcgcccgcgcccgcgcccagccccctgccggccgctccaaaggatcctacctgtagcgacgcgtgcatagctcttcaatactgtcac

SEQ ID NO: 3811 - DNA, 842 bp, Zea mays
  unsure (1)..(842): unsure at all n locations
  Clone ID: TF_LIB5100-006-A1-PF1-G10
gattccgcgcacttgccgcggacccggctagctggtggacgtacgcacgggaggagctgatgagatcgacgccgacgccgacgccggctctcttgcttgttgcaggtcagcggcggggaagggcaagggcaagggcgagaagcggcagcggcagccgcggatcgcgttcatgaccaagagcgaggtcgaccacctcgaggacggctaccggtggcgcaagtacggccagaaggccgtcaagaacagcccataccccaggtacgtggtacatgcacagcacgtatatacagctatacctactggctactgcacgtatatacagcacctctcttctancttactccatgacgcacgctacggtagacattgctgcatgagctaatggtgatggcgtgcaggagctactaccggtgcacgacgcagaggtgccccgtgaagaagcgggtggagcggtcgcaccaggacccggcggtggtgatcaccacgtacgaaggcaagcacacgcaccccatcccgtccacgctccgtggcagcagcacccacctcctcgccgcgcagctgcaccaccaccaccaccacaacatcgtcggcggcgtcatcgacatgctgggtctctgcctgcctccgcgcaaccacgccgccgtgccgccggcggcgacaggcctcgcgccgtccccctgctgcatgagcggtccggtgggcacggtggcaggcgcgacgacgacgacggngcccaccaccaccaccgtcaccacgaccactacctcgtcgcctcctcctcctccctcgnntcagaagatgcagcactttatggcgcaggacgacttcgggcttctacagga

SEQ ID NO: 3812 - DNA, 1026 bp, Zea mays
  Clone ID: TF_21211742
ggtccggaattcccgggtcgacccacgcgtccggtaaccatttaagacttgatgcagacattgtactgaattcgctggtactctttttcaggaagttggaattagatgctttaggagctattgctattgctactacctccaccaccagtaccattgacatgggccctgcatcctcaagagctgtccgggagcctagggttgttgttcagaccacaagtgaggtagacattcttgatgacggttatcggtggcgtaagtatggacagaaggttgttaagggcaatccaaatccaaggtcacactttcactaccatttcttacactaaatgactaaactgtatccctccatcccctgaagctagtaacattgattcacttgcatgcaggagctactacaagtgtacacaccctggctgttcagtgcgcaagcatgtggaaagagcatcacatgatctgaaatcagtcatcacaacatatgagggaaagcacaaccatgaagttccagcagccagaagtagtgggcaaggcagttctggttctggcagcggtccatctgcaccacaagctggtggttctcaccgtaggcaagaacctgcacaagccagcttcgctcactttggtacatctcctttcagctccttcggtctcgcaccgagcggacagttgggaccaacaactggtaatttccgcttcggcatggttccgccaggcgcgacgatcccaatgccctctctaggatcacttgcccctacaaaaatgattggaaatccatcagctatgcaggggtacccagggcttatgatgccaggagagccaaaggtagagcctttctcgcgaccacacttcccaacgtcaattgcacctccgccagcttaccaacagatactgagcaggcctccttttggtcatcagatgtaaataataggaaggggatagatttgcttcggcttgtatacatgatagctacgctgcaacatggctttgttctagttttgttgatggatcgtccgatttttaaaaaaaaaa

SEQ ID NO: 3813 - DNA, 903 bp, Zea mays
  Clone ID: TF_ZmC35521_2
gtccggaattcccgggtcgacccacgcgtccgcgcaagtatggacagaaagtggtaaaagggaatccctacccgaggagctactatagatgcacgtaccaaggatgcgatgtgaagaagcatatcgaaagatcatcccaagacccaaaggccgtcataacgacttacgaagggaagcacagccatgatgttccagcagtcaggaacggtagccatgctgctgccaacgccaatgggtcatcttccaccagcttaccagtaccacacagggtccacagttcagcatccagtagtcgcagagcggcagaattacaaagcgcatcctcagcttcttctatgctactaaaagaggaaaacgaaataacataggagttttggagtgtgtagccagggtaaattatatctgttctctgatccatttcctcctaggtgtgctgcttcacgctctgcgccgcagcaaaaattgggcactgcaagcccccaccattggttttagtcaagagcgagctctttcgtttgtgcccttccaaaagctgcacaccctgtttggctgcgcggtgtatgttatgttgtcattaccatttacgcccattggttgtaaatgccatcagtcgttcccccggagaactatatggatgacagcattcatcggcccaagtgtatatactcgatttaaaaaccttttttttaactgagatatggtttgttgtaaataaacggcttccttcctggtctttgtaaagtgttatttcgacaggatatataaagctatagtagctgatggctgatttgccgttggcctctgaggctgtgagctcacctccagttttccaggtctactactaccatgggttagttgaagccattgagcagcatgtaatgttagaattgttcctttttatcc

SEQ ID NO: 3814 - DNA, 768 bp, Zea mays
  unsure (1)..(768): unsure at all n locations
  Clone ID: TF_LIB4756-017-Q1-K1-G2
ccggccgggctccctctaatccagataacctgggggtaataagaatgactacaattagcatttcctcgcatctttctagctacctctctctctctctctcgtagtctcgtgtgcggtttgtatctagctaggtataacaacagcccacccagtgtgggtttctagatcggcggctggtctagctagccagggactaggaccgatccatggcgtcgtttggcagcgacgaccacgtgccggcggccatggcggtgaacgatctggtcgaggcgcgcgacggcgtggcgaggctcaggatcttgctgctgcagctggacgagcagcgcgcggcgtgggcgcagctggagatcgacgccgtgctggccaagctgtccagcgcgatatcggcgttggatgcaagcgaagtaggccggagccgggccgccgggccggacggtgcgaggccacagcgacagcagtcggggaggtcgggcgggaacaagaggaaacaaggttccagcagaagatcacagcgcccctctgacaagaagatcactgctacgctggaagacgggcacgagtggcggaagtatgggcagaaagagatccaagactcatcctatccaaggagctactacaggtgcacgcacaaggcggaccagggctgcaacgccaagaggcaggtccagcgctgcgagacggacgcgtncacgtacgtcgtcacctactacggcgagcacacgtgccgggacctctcgtcgatcccgctcatccaccaggcccgcgccg

SEQ ID NO: 3815 - DNA, 895 bp, Zea mays
  Clone ID: TF_ZmC65166_1
ttttttttttttttttttttttgcggtacaagttccatgatatactcaagtgccttgttgataaataacgaaccgatgataatttttttttttttttttgaacatggcaagtgcgctttggcgggcaggtgccattgttcaaagagaagtaagaagttgcgggtgaagaggtcgattaaggttcctgccgttagtaacaagatcgctgatatacctccggatgagtactcgtggaggaagtatgggcagaagccgatcaagggttcccctcatcctaggggctactacaaatgcagcagtgtgaggggctgtccagctaggaagcacgtggaacggtgtgtggatgattcggcgatgctcatcgtgacatacgagggcgagcacaaccacaccggaatgccagctcagtcagcagcagcagcagcacaggtgtagccgtgtagtcgtagagaactcatcatcagttcatcactgcacccccgcctccccctccttgaggacgaagtggcaccaccaacatggcctctgttggtcaccaggtcgtcgagatgtctggtcctgcttgcgcccacaagatctgtagcgagaatggagtgtgggtgtacacaagactttctaatccatttggggggcagctggctgttgctcaggattatttattgtggtcttgttgagaggtggaagggagaaggtaaaagtttggcgggaacgggatagccgtgtaaactacttgttcatagcacaatcgtcagcggcaactgccttcatttcatttctctactacggttctgaaatctatttctgttgtttagcataggaattcttttttttgaaacgaaccaggcaggagagctgtcgattatatttataaagaagaagtggtccggatcgaact

SEQ ID NO: 3816 - DNA, 873 bp, Zea mays
  unsure (1)..(873): unsure at all n locations
  Clone ID: TF_ZmC30082_20
ttgggtacctcgaggccggccgggaaccgttcgccacctaaccctagcgcgcgccactctccctggcagccgccgccaggaagcctccactccttctccctcttctctcctccccttgctcttctctggccgacgccacttgcgtgtgcaggcaggcaggccctggcgtccgcgcatcctcttctggccaggagctcccccacgcagccgctgctctctccacgtcctctattccttcccatccccgatctcccccaatccgagcagaccggttgtcgcttgctcatggcgtcaggctggttgcttcctcaaagcgagcggcgcatcaactatttatctacgtcctggataatcgaattgctttgccgtggaagcaggagaaggaagaatgcaaaacacgtagtgagttcagttgtgacacaagcaccaaactttgatgggtatcagtggagaaagtacgggcagaagtggatctccaaagcaaagcattctaggctgcaattgagtacattcattctttatcaagggcacagtctgctcgttctctcaatggtgctggcctttgtcctgctagtagatcacttagcacccaggccgccactacgtcaagcacaccacagttgaaagcacaccccatgtcaagcagccaggccaccactacgttaagcaaaacagaagacgagaagaactgatgtagccatgttcatgcttccactgttgaaatgcatattcagcatagcttactcagntcctatctgttgttcaatggtgatttaaaagagagctggtagttgtgagctatctgtaaatgatctagttgggatgatattataatgngatgctttgtgaaaatataatggggggcctttggtt

SEQ ID NO: 3817 - DNA, 767 bp, Zea mays
  Clone ID: TF_ZmC58440_2
ggggagggatcattgaaagccgcagcgcccatgtcccaggcccgtctgttcgccaccatttgtccattccccctccatcattcctccccgctttctccaccatcagggcgaaaattttatgcgagctttggaaagcgcgagctagtttatccggccgggcgtggtcaccgaggcagtagcggcgagagaggggaggatctgatcgatgtcgtcgggcgaggacgggtactgcagctcggattcgccgcgggcggaatcccccgaccagccgcaggcagctgcggcggcggacgcggacgcggacgcggagtcgcctcgcgccggagccgggccgaacaagcgcgacctccacgcctcgtcgccggcagctaagcgcagccggagatcggtggagaagcgggttgtgtcggtgccgctggccgagtgcggggaggggccgccgccgtctgactcgtgggcgtggcgcaagtatgggcagaagcccatcaagggctccccctacccacgtgggtactaccgctgcagcagctccaaggtgccccgcgaggaagcaggtggagcgcagccgcgccgaccctgccgtgctgctcgtcacctacaccttcgaccacaaccacgccgcggccgctgctgccaccagcaacaggcgcccgccatgggtgcgctgggtctggtacgggcggggttcatctgctgcggcggtggctggcaagggagtctagacaaactagacatgagctgcaaagatagatgggtgattaatttgg

SEQ ID NO: 3818 - DNA, 2187 bp, Zea mays
  Clone ID: TF_ZmC332_1
cgggttgtaaaaccaaccagcctaccacccgaggccgagtgcgtcgctttcctcctccaggcctccaccctcgagacgagacgggagggggagcgagcacaaagcggaataaagaaaaggccgggaaaagcgagggcactgcgcctccgctgcggcctgcggcgccagcgccagccaacccctccctcctaccagtaccagtatttgtttgtttatttatatgtatatataaaaccgtcgctcactccaccactgaccactctaccgagccgagcgccgggcggcctttggactcgtaccactccgcaggcggaacggaacacgggcgagggcgtctccaccctcccgagctcgtcgtcaccgtcaccgcaccaccgaggcgcggcgcggcgggcttcgctcggcgagggaggcgcgccgtccatggaggcgatggaggaggccaacaggacggcagtggagagctgccaccgggtgctggctctcctctccaacccgcacggccagctcgtccccagcagggagctcgtggccaccaccggggaggccgtagccaggttcggctccctggcggccaagctctccagctccaacggcaatggcctgcagggccacgctagggtcaggaagaccaagaagcccctgcccatcttctacagcaacctcttcctcgagagcagctctgcggtggccgccgccgccactgtggccaagacgggaggggatggaggaggccaacaggacggcagtggagagctgccaccgggtgctggcgctcctctccaacccgcacggccagctcgtccccagcccgagcccgatccctggcctccagctgttcccgaggtaccaccagtttgagggctcgtcgtctcaggatcctggggccgatccctacccagttgcccaagaggttgctgctagagaagccgactgccggtatggaggggtcgacgtcgcagtcccctccgatcgtccagatggtccagccggtgtccgttgcgccccccggagggacgcccagcccggcactgccccccggtcgccttcatttcaaccagcagcagcaaagctaccagaggtttcagctcatgcagcagatgaagatccagagcgagatgatgaagaggagcaatcttggtgatcagggtggtagcttaagtggcggcggcggcggcggtcgtaagggactgaatctcaagtttgacagctctaattgcacggcgtcatcgtctcgctcgttcctttcgtctctgagcatggaaggaagtcttgcgagcttggatggaagccgggccagcaggccgttccagctagttagtggctctcagacagctagcacaccggagctgggcctggtgcaaaggagaaggtgcgctgggaaggaggatgggactggtcagtgcgcaaccgggagccggtgccattgttcaaagaaaaggaagctaaggataaggaggtccatcaaagtccctgcaataagcaacaaggttgcagacatcccagctgatgagttctcgtggaggaagtatgggcagaagccaatcaagggatccccacatcctaggggttactacaagtgtagcagtgtgagaggctgccccgcgaggaagcacgtcgagaggtgcgtggacgacccctcgatgctgatcgttacctatgaaggtgaccacaaccacaaccgagttctagcccagccagcctgatctctcaggctatcaattcaagatcgcttctacagtcaccctccctccctccctagagaagggatgacaacgacgacaatagcaataacaagagcctagtgcctgtacatatgttctgcttctaacagttggaggagagagtcagttagctagctctttcagaagaatcaatggtgacaggggggaaacttgtcatgtcgatggagaaagggggaggggttcctcatcaaatactctagttttgtagttttggtttctcttttgtgttcgtcctgtgctagggcccatcttgtggttgcagtgtgacattgagccgcagttgtatgtctggtaatggtgttaggggattggatcgagaagaagggcacaaggcaggaaaagtgcctgtaaaagtggctacacctaggaacagaatgtacaatcgtcttcagtccagtggtacaatcttgttgacgcaaaaaaaaaaaaaaaaaaagcggcc

SEQ ID NO: 3819 - DNA, 437 bp, Zea mays
  Clone ID: TF_LIB3332-030-P1-K1-A2
cgacgcgtccgcccacgcgtccgcccacgcgttcgtgaagatgagactgaatctaaaagaaggaagttggaattagatgctgaaggagctatcgctattgctactacctccaccaccagtaccattgacatgggccctgcatcctcaagagctgtacgggagcctacggttgttgttcagaccacaagtgaggctgacattcttgatgacggttatcggtggcgtaagtatggacagaaggttgttaagggcaatccaaatccaaggagctactacaagtgtacacaccctggctgttcagtgcgcaagcatgtggaaagagcatcacatgatctgaaatcagtcatcacaacatatgagggaaagcacaaccatgaagttccagcagccagaaatagtgggcaaggcagttctggttctggcagcggtccatctgc

SEQ ID NO: 3820 - DNA, 1337 bp, Zea mays
  Clone ID: TF_ZmC1136_5
gcgttcggctccggttccctcctccccctcctctcccacctcagcgtcttcctccaccgtgccggccagcccagacgtacacgacggatacgacgtaacagccttctccccactcccccgaccggtctcgtcgcagcggagcaccgcggggttgattccgtacgctcgccgatgaccacctcgtcctccgggagcatcgaagcaccggcgaactcgaggcccggctcgttcgcgttcgcgagcacgagcacgagcacgagcacgagcttcacggacatgctgggaggatccacggacgcggccggtggggcgtcgaggtacaaggccatgaccccgccgtccctgcccctgtcgccgtcgtccttcttcagtaacaaccccggcggcctcaaccccgccgacttcctcgactcgccggccctcttcagctccagtatcttcacctcgccgacgacgaacgcattcgcctcgcagcagttcagctggttggcgacgtcgggcgcggagcaaagcggcaaggacgagaggaggccgtcgtcgtacccggacttctcgttccagacagcgccgacgaccgaagaggccgtgcggacgacgacaaccttccagccaccgattccagcggcctcactgggtgaagaggcgtatagaagtcagcagcagcagccatgggcctaccagcagcagcaacctggcatggacgccggatccagtcagcaggctgctccctacggcgagccgttccaggctgcctcgtcggacgccgccacgatggcgccgcacgtgccggcgagcggcgggtacagccaccaagcgcagcagtcgcaaaggcagtcgtcggacgacgggtacaactggcgcaagtacgggcagaagcagatgaaggggagcgagaacccgcgcagctactacaagtgcacggacgcgtgggcccgggctgccccaccaagaagaaggtggagcagtcgccggacggccaggtcacggagatcgtgtacaagggcacgcacaaccacccgaagccgcagagtacgcgccggggcgccagctcggcgccggcgtcgtacgtggtgcagagcgccagcgacgcggtgatgcccgagcattcctggggcgcgctgtccggaacacccgtggtgacgccggagaactcgtccgggtccttcggcggcgacggcgacgaggtcaacggcatgagctcgcggctgggcggtagcttcggcgccgacgatctcgacgacgatgaacccgacttcaagagatggtgagtcactcaactttttgaaccaaaagcagaaggctttactctacatgaatgtcaatgacgtgtgttacgc

SEQ ID NO: 3821 - DNA, 828 bp, Zea mays
  unsure (1)..(828): unsure at all n locations
  Clone ID: TF_ZmC1372_2
atcaacgtcggttgcgccggcgcaaggcgtcaagtcaaccgccaccggcagcaccagccacccgctgccgctgccgctgccttccggtgcgcagcgaaagcgatcggtgctgcagcaggccagcagccagcaggggcagaaggtaatgcgggcgtgagcgtgacgcgacgggacgccacgccgccgcccgccggccggcctttcttgtcagctgccatgccacccccgacgctagctagctggcccgccaggtcgtcagcgcgaccgggccccgccgaagtactgggtgcacagctcgtatctgttggagtcggaggcgccgccgccctgcatctggccgtggccgccgggaggagccgccagcggcgggggcccgtgctggtgcgcgccgtcgtagacgatgcggaggtcgccgccggggtcgcgcgggtgccactccaccttcttcttggcgccgcacagcctgtgccggcaccggaagtagctcctcattttctggatgttcttgatgaacttctggccgtacttcttccactcgtacccgtcctcgggcatcaccagctgtctgccgttgccggcctccaccgccgccgctgccgcctcgtcgtcgtcctcctcctcccttttgtttgtctctcctctcncgaaaaaatatccccccccccacaatgatgcaaaaaatcagtcttgctactgtatatatcccagctggctgatcgtagtgctaggccacacagatatcatgaacttgaacatccgttatggtacccccatgttgatcgcggcgggttgtgagcttgaacccccgcgccccccccggcctccgta

SEQ ID NO: 3822 - DNA, 1229 bp, Zea mays
  Clone ID: TF_ZmC554_5
cggccgctcgaggcggcgggcgactcggaactcggaaatagttctccatcccaagcttctcttctcccttctcttctcctctcgcgcgcgttgcctcgaaccggaaggaacagcgtccattccattacagtagagcttggtgtttgagagacgatcaatccgtcgtcgaccaatggatccatgggtcagcagccagccttcgctgagccttgacctgcacgtcggcctcccgccgatggggcacccgcacagccaccaccaggcggcgccgatggtcgcgctggccaagcccaagatcctcgtcgaggagaacttcatgcagctcaagaaggaccctgaggttgcggttcttgagtcggagctacagcgggtcagcgaggagaaccggcggctgggcgagatgctcagggaggtggcctccaagtacgagaccctgcagggccagttcaccgacatggtcacggccggcgcccacgccggcggcaataaccactacaacaaccagccgtcctccgcgtcggagggcgggtcggtgtcgccgtcgaggaagcgcaagagcgaggagagcaacggcacgccaccgccgtcgcaccagcagcagcagcagcactacgccggcggcctcgcgtacgcggcggcgccggaccaggcggagtgcacgtccggcgagccgtgcaagcgcatccggggaggagcgcaaacccgtcatctccaagcgctacgtccacgccgacccctctgacctcagcctcgtggtgaaggacgggtaccagtggcgcaagtacgggcagaaggtgaccaaggacaacccgtgcccgcgcgcctacttccggtgctcgctcgcgccgtcgtgcccggtgaagaagaaggtgcagcgcagcgcggacgacagcgccgtcctggtggccacgtacgagggcgagcacaaccacgcccgcccgccgcagcacgacggcgccgccaagaggtcgtccgcgccgccggcgggcgaggccgcgcgaccgccggcgccactgccgctgcagaagcaagaggccgggccgtcgtcggaggtcgcgaggaagaacctcgcggagcacatggcggtcacgctcacgcgggatcccgggttcaaggcggcgctagtcagcgcgctctccggccggatctttgacaagggattataggttaataatagacgaacatgacgattaattgatgaatacacagccatttttatttcaccatgc

SEQ ID NO: 3823 - DNA, 751 bp, Zea mays
  unsure (1)..(751): unsure at all n locations
  Clone ID: TF_LIB5116-036-A1-PF1-G12
ttgacgttaagctaaaaggggcgccctgctctagtacgcttctgattaaggctagctcctcatacctttcttttcctttcttcttcctctcctctcctccgcgcttcctttcttgctctgggactgggaaacaatgtctcccgtgccgagcccaaatcaatcacaccttctaggccatggatcaaggaaagagaagcgcatgaggaaggtggatacctttgcgccgcacaacgacggccaccaatggaggaagtacggcgagaagaagatcaacaactgcaactttcccaggtactactacagatgcacctacaaagacaacatgaactgcccggccaccaagcagattcagcagaaagatcacagcgaccccccattgtaccaagtcacatactacaacgagcactcatgcaacagcgccttccttgccctcactcccacagagttccagctgcagaccgcatctggaaaggcagtctccatctgctttgattcatccggggctcaggagccgggagccaatgcgagctcgccttcttcgagtgcggcgccacgcgccacgccttcggagagcaagaacaagccccttgcgctgcgttcagaggcgctttcttcctgggcccccggcgttgtggagcaaaagacggcctgtgctgatctccagtcctgcagcaccgagtgccaagatgcatacatttcagaagacatangatgcagggagattcggttctatcagattcttccatttttt

SEQ ID NO: 3824 - DNA, 687 bp, Zea mays
  unsure (1)..(687): unsure at all n locations
  Clone ID: TF_LIB5116-050-A1-PF1-D11
gtccgggcaggaaggctagctcctcatacctttcttttcctttcttcttcctcctccttcgtcttcctctcctctcctctcctctgcgcttcctttcttgctctgggactgggcaacaatgtcccccgtgccaagcccgcatcaatcacaacttctaggccatgaatcaaggaaagagaagcgcatgaggaaggtggatacctttgcgccgcacaacgacggccaccaatggaggaagtacggcgagaagaagattaacaactgcaactttcccaggtactactacagatgcacctacaaagacaacatgaattgcccggccaccaagcagattcagcagaaagatcacagcgaccccccattgtaccaagtcacatactacaacgagcattcatgcaacagcgccttccttgccctcacccctacagagttccagctgcagaccgcatctgggaaggcagtctccatctgctttgattcatccggggctcaggagcccggagccaatgccagctcgccatcttcgagtgcggcgccacgcggcacgccttccgagagcaagaacaagccccttgcgctgcgttcagaggcgctttcttcctgngcccctggcgttgtggagcaaaagacagcctgtgctgatctccagtcctgcagcaccgagtgccaagatgcatacatttccga

SEQ ID NO: 3825 - DNA, 834 bp, Zea mays
  Clone ID: TF_ZmC580972_1
cattgggtgcctcgaggccggccggacagttacttgcagctggccatgcacatggcgctatcgtcccgcagctcattcgccgccgacgtcctcctcccagccaccatgtcgtatcgtcagccgtgcagcggtgcttccagctacttgggctctcagcccgcggcccctttcccgtcggcagcgttcggcgcggtggcgcagctggacgtcttcgactgcctgtcgtcggacgaaggcgttggcgtcccggcagctgtacctggtgcgttcgcgccgccgccgccgcttatgccggccgagcgcgtcgtcccggacgctgctgcaggctacagtagtcatactaggagtgcagcggctgtggcgggtgaggggtcgaggactacgcacagaattgcgttccgagtgaggtcggacgaggacgaggtactcgacgacggctacaaatggaggaagtacggaaagaagtccgtcaagaacagccctaatccgaggaactactaccggtgctcgacggagggctgcaacgtcaagaaaagggtggagcgagacagggacgacccgagatacgttgtgaccatgtacgagggagtgcacaaccatgtgagtcctggtaccgtctattacgccacccacgacgccgcctccggccgcttcttcgtcgccgggatgcatcagccaggccattgatcaacgagcagatcagagagcgtcttaattagtgtaagatatgtataccgactatctgttttaggccttgttcatgttttaggtcttgtccagttattccaaatcatatagattggaatgtattgaaatgaattgagatagatttag

SEQ ID NO: 3826 - DNA, 1278 bp, Zea mays
  unsure (1)..(1278): unsure at all n locations
  Clone ID: TF_ZmC568819_1
tcgaggccggccgggaaacataaaaaaaaaaaaaagccaagcgcactgtgttcttccctgcagggtcctgggctgggctggcgctggcgatggcgctagtattagggcgggaggaggagctcctggcgcagctccgcgcgctactgacgttcctaccacctcctgcgtcgcccccggcgccggcggctcccgttaaggtggagtccatcatgggcactagtggcggcggacgacgactggggagcaagagagaccgggacgacgacagcgaagccgaggccgagcagcacggcgacgaacctgcggctgcgcagcctcactattgtcctcatcctcctcctccctgcaaaaggacgaggaggaggaagaataagaagaagcggcagcagagcaagtgccttgtgacgacagtgcccgacttcgacgggtaccagtggaggaagtacgggcagaagcagatcgaaggtgccatgtaccccaggagttactacaggtgcatacagagcgccaagcaaggctgccaggcaaaacggacggtgcagcgcaacgacgacgacggcgccgccgcccccccagagtacacggtggtgtacgtggcggagcacacctgcacggccaacgacgacgcgctggaggccccgccggtcatcctggagaccactaccagcgtcgtcgtcgtccctgcacctgcagcacacaccgatcccgtcgtcgtcgtcgttccggcaactacgtcagccgccgccgccgccgcctccgcttgttccaccaccgtcaccacggggactgaatctccggcgatttccggcgacgacgacgtggcctgctggagcagcagcggcagtagcagcagcggttacagctacgccgacgactcctgctgctgctgctgctgtgacgggttgctcgccgctgtcgtccacggtggctgcggcagctcatgggcccccggaccggcggactcggtttcggtgccgtcgttccagttgcaggagatggaggacttgaccggaccgatccggtcgccggtgcacgttccccgcgcctggttggaccgttgacccgctagtccctgtgctgcatgcagctcgttgatgagaatgagatgagctacagagctagccgcttttgccacttgtaagctcgatctgctgctgcttcttcttcaactagttcgtctctgtagcttttagctttggtggtgatggacgtgcagtttgtctgtactgtgnataatggagtttgcctggggcaggngaaaaatcatggtagttttct

SEQ ID NO: 3827 - DNA, 643 bp, Zea mays
  Clone ID: TF_LIB4764-044-R1-K1-D1
ccggccgggatgtggtgttataaaaccaactgggtggagtatgtgatgtgatacataataatttgtctaattcatgtaaaagccctttgtgcggaaatgtgagggcatttaaaggatctattgaaaacagtacagtccttacccaaggagctactaccggtgcacggcgcccaagtgcggcgtgaagaagcgcgtggagcggtcgtaccaggacccgtcgacggtggtcaccacgtacgagggacagcacacgcaccacagccccgccagcttccgcgccggcggcgcgcacctcttcatgcccaacgcgcacgcgctgccgccgcagcacctgatgctgccgtccagcttccgcccggcggacctgatgggcatggtgcaccccgtcagcatgggcgcaaaccttagcatgttcctgccaactatgcctcctcatatgccatcgccggcgtctcgtgctcatcctctccagcagcagcagcaccagttcactgactacgcgctcttgcaagaccttttcccttccacaatgcccaacaacccataactaactgctacacaattagctagcctagctagaatcgacatgagagatgctgtccaagtactctgcgccatatgtgatcacctgatgggcttgcgc

SEQ ID NO: 3828 - DNA, 1454 bp, Zea mays
  unsure (1)..(1454): unsure at all n locations
  Clone ID: TF_ZmC1431_1
ccccgcgtccgcccacgcgtccgcccacgcgtccggtcaccgcctaccaccgttttatatccacccctcccactccccctgttttttcttcttccgctgttctactccggcgtgttggtcgacggcggcgcagatgacgaccctcgatctgatgggagggtacgggcgggtggacgagcaggtggccatccaggaggccgccacggcggggctgcgcgggatggagcgtctcatcttgcagctctcccaggctggcaccggggagcggtcgttgtccccaccggcggtacaggcgcagcgccagcagcagaagcagctggagcagatccagcagcaggttgactgccgggagctcacggacatgacggtgtccaagttcaagaaggtgatctccatcctgaaccgcacggggcacgcgcggttccggcgtggccccgtggcggcgcggtcgcagtcgcagtcgcagggacctgcctcccccgagcccgcgcaatcggcgccggctcccgccgcgaggcccctgacgctggacttcaccaagtcggtgtccggttacagcagggactccgggttcagcgtgtccggcgcgagctcgtcgttcctgtcgtcggtgacgaccggggacgggagcgtgtcgaacgggcgcgcgggaggctcgtcgttcctcatgctcccaccggcgcccggcgcggccagctgcgcgaagccgccgcccgccggtgcggcgcagaagcgcaagtgccacgaccacgcgcactcggagaacgtcgccggcggcaagtacggggctaacggcgggcgctgccactgctcgaagcgcaggaagcaccgtgtgaagcgcacgatccgcgtgccggcgatcagccccaaagtggcggacatccccgccgacgagtactcgtggcgcaagtacggccagaaacccatcaaggggtcgccctacccacgcggctactacaagtgcagcacggtgcgcggctgccccgcccggaagcatgtggagcgcgaccccgccgacccgtcgatgctgatcgtcacctacgagggcgagcaccgccacagccccgcctccggccaggacccgccgccgccgtcgctcgcgccgctgccggagctgcccagccattgatttggcttcctgcctgctctgtcctgtcaattactagtagctgttgtcataagttataaaatcaaaatcgccagttcagttttagcagctccgttttccgatttttttctcttctgtcgttcgcgttagcagctttgtgaaaggattaggaaagtgttagcatcagacttggagaagggaaaagaaaacaaaaggtaatgctcttgttattagtattatttttttgtatacagcaaacaaaagcatccgcagagaaagttgtggatggtgtagtcggtcggaattttgaccgggcttggggtgttccagagccggattgaattna

SEQ ID NO: 3829 - DNA, 1366 bp, Zea mays
  unsure (1)..(1366): unsure at all n locations
  Clone ID: TF_ZmC16975_1
gggtacctcgaggccggccgggataactctccaacggactagctataaagcaaaagcaagagagagagagagagagaaacaaaatagaaagcgaagagacgacgaccatgttcccgtcgccagggagggcggtgatggcgctgggccacggtggccagcacatgaccgcgtcgtccaccgccggcggcatggcggcctcctcgtcgtccacccccaccataacgttcgcgtcncagccagccgtcccctccccctcctccgacggcgacgagctccctcgccctcgcccacccccaccaccatggcgtgctaggttacggctccgcctgccttctcctggaccaccgccacccaaccaccaccacctcctcggcctctccctcgcacgcggctccgtcgaccgtcgtcccggcccccaccctccaccaccacttccatggccatgcagcaggagcgccgcacgtttccctttcccctcccacgagggcgtcgcctcctcctcctcatccatggtcgacggcggcggcctgcgaagaagagccggagccgcatcacgatcatcgccaacaagcaggccaaggcggcagaccgccgagggggaagggagcggcggtgagcgaggggtcggcggcggcgctgggggtgggcgccgtgcggatgaagaaggcgggcggcggaggaggaggcaaggcgcggcggaaggtgcgcgagccgcggttctgcttcaagacgatgagcgacgtcgacgtgctcgacgacggctacaagtggcgcaagtacggccagaaggtcgtcaagaacacgcagcacccaaggagctactaccggtgcacgcaggacaactgccgggtgaagaagcgggtggagcggctcgccgaggacccccgcatggtcatcaccacctacgagggccgccacgtccactccccgtcccgcgacgaagacgacgacgccgctcgcgccaacgccgagatgagcttcatctggtagcctgcagatccggctccgaccggcggctatctttcagtgcatgcaacgtcgtctactcggccgcctccggtctaagtttcgccagccaccagcagcagctgaatatcctgaatttagctattatatccatccatgcatcgaagaactctctcatcgatcgtgtgtgcatgtggcatgtctaggcattatatgtattgctatgtcgatcgatctttatatatatacgcgaatgatgtccgtcgctggtacgtagggtgtgaactgcatggtcctcctagctactgtcgtagttaattagctaataatatagtagtgcatccaggttatggactaaataatacttatatacatagcagctacctgacactacagttag

SEQ ID NO: 3830 - DNA, 1513 bp, Zea mays
  Clone ID: TF_ZmC413227_1
aattcggcacgaggccaccactttataaaaaggcaacgaacccctccaaagcaacgctgaactcctgcatcgaagtttttgatgacctgagcccgttgacttggtggattggagaaggcagcagcacatcactatctggttcttgtgttcttgctgcaatcagtcgagattcaggctgctttggatatacttgcaacccttgacaggattattaaggatttggaaggatcctagggaatagttgaatcaataattttggggggaaattaccctcatccctccagaatggagaacaagtcagatgaccttcagcacgagcatggtatgcccgatcagacgtctcgtcccttcacttcactcttactgtcggcaacatctgtcgcccaagcagcacaacaagataccggttctgacatcaaatcgcttagtctgctgcatggaagtagcttactcccacctgatgatggttacatctggaaggcgcgcgcgcagaacattgttccaggctgtgaatatcccaccatgtattacaagtgcgcccaggacaactgcaacacaaataaattggtggtatgctctgctgatggtcatcaggttcttgagacggttcttagtggttgccacaaccacccacgtcagcaagattgtgatctacccatacccaaggtatcaaaaacggatacttcaatgcctgtgtccagagagggagatgatgagcaactttcaagttcaagtgatagcgatgaagatgatgttgaccaagcaagagttgaaggtgatggcagtgtaactagacatgtgccacatccagctgaaaggatcactgcacaaactggaactgcaaattctcaccgacatgctggtagaagaagaccgaagtccaaggtgtgggaagaattcagtgctgtgttaagagatgacaaaattcaatgggccgaatgtaagcactgtaaaatgagccttggtggaacaagcacaggaagaacaacccatctgcggcggcatcttaagatctgtccagcgctacctgcaactgatcggatgcagaaacagaggtcatctccacatcctggttccaccattgagagcatctggaagttcgatcaagacagatctcttgaattgctcatcaaggttttagtgtccaaccttttctcctctccattgacaagcagcacaacttttagacagctatgggctggcatctgccctactaatgatgtgttatcggacgctgctattgaagagaagtttctcagtatttttgagaatgaaaagcttaagcttaaggaggaaatagcacttgcacctggcggagtttttctgacagctgcaagcagttctcttgaaactaagaacttcatctttttgaccgtgcacttcattgataaagaatggaaacttgaatagaaaatattagatgttgctttacggggtgtgaagactttgatgctgagtattttgttagcatgtttccgaaatttgcatcatgccacaatttcattaatgggga

SEQ ID NO: 3831 - DNA, 780 bp, Zea mays
  Clone ID: TF_ZmC153952_1
ttgggtacctcgaggccggccggggcgttggggagcctcagccctcaggcctcagccagcgtgcgcgcccacaacccctcacgtcgtccccgccaatcacaccgcacgaaccgaggacgacgggacaccaccgtcaccgcgacgtagtagtagtactacatgcatagcatagcctcgtggagtcgtggtagtagtagtttagttttgctcgcttccacaccgcaccgccgttcccttttttatatcccgcggatgcgcctgcctctgcctcggggtcgggggggcagctggtgacatcggattcggatcaggccgagaagatcgaactgctccgatccggcgcttaatttctctctctctctctcgggctagctgcccgggcaaatggacgccgagtggagcggcgacgagagcaaggctggcgctgcgggcggagtttcgtcggctgattgcccaggttcgccaccgccggtgtcgccggcgccaccgtcgacgtcgccagctgctaccggtgccgggaggaggcggtcggcgaacaagcgggtggtcaccgtgccgctggcggacgtcagtggcccacggcccaagggcgtcggcgagggcaacacgccgacggacgcgtgggcgtggcgcaagtacggccagaagcccatcaagggctcgccttttccgagggcttactacaggtgcagcagctccaaggggtgcccggccaggaagcaggtggagcggagcagggcggagccggacaaggtgatcgtcacgtactcgttcgagcac

SEQ ID NO: 3832 - DNA, 684 bp, Zea mays
  Clone ID: TF_LIB3592-037-Q1-K6-H4
gtagccgggagattcggaatcccgcacgcgagttggtcctggccagctggcgtcgtagccacactatgggacatgcgaggttcaattgtgaactgagagtctgaacctggtgtaaacggggaagagccggtgggcgaggtggagcgggtcgtcgtcctggatgtcgtcgaggacatccggttgtcgcttgctcatggcgtcaggctgattgcttcctcaaagcgagcggcgcatcaactatttatctacgtcctcgataatcgaattgctttgccgtggaagcaggagaaggaagaatgcaaaacacgtagtgagttcagttgtgacacaagcaccaaactttgatgggtatcagtggagaaagtacgggcagaagtggatctccaaaacaaagcattctaggctgcaattgagtacattcattctttatcaagggcatagcctgctcgttctctcaatggtgctagcctttgtcctgctagtagatcacttagcacccaggccgccactacgtcaagcacaccacagttgaaagcacaccccacgtcaagcagccaggccgccactacgttaagcaaaacagaagacgagaagaactgatgtagccatgttcatgcttccactattgaaattatatacatcatagcttactcagttcctatctgttgtttcacgttgatttaa

SEQ ID NO: 3833 - DNA, 931 bp, Zea mays
  Clone ID: TF_ZmC554_7
ccctactctcctgctcctcttcttcctcctcctctcgctctcaagcgcgtcttcactccggcctagctcggacggatcgacatcgaggggaaagggaataagtgggggcgccagcagatggatccatggatcagcagccagccttctctgagccttgacctgcgcgtcggcctgccgccgctcagcctccaccaggcgccggtggccgtcgccttggccaggcccaaggtgctcgtcgaggagaacttcctgctgcctcccaagaaagaacctgaggtggcggcgctcgagacggagctgcggcggatgagcgaggagaaccgacgcctggcggaggcgctggccgcggtggcctccaagtacgaggcgctgcgcagccagcacaaggagatggtgtccgcggcgcccgccggcgggaacgcgtcgtccgcgtcggagggcgggtccgtgtcgccgtcgcggaagcgcaagagcgagagcgcggacacggcgccggcgcctgcgcagcgcccgcacccggcggcggacctgtcggagtgcacctccggcggcgagccgccgtgcaagcgcgtcgtgcgtgaccgggcggaggaggtggaggaggaggaggagtgcaggcccagggtgacgaagctgtacgtgcgcgccgacccggccgacctgagcctggcggtgagggacgggtaccagtggcgcaagtacgggcagaaggtgaccaaggacaacccctgcccgcgggcctacttccgctgctccttcgccccggcctgccccgtcaagaagaaggtgcagcgcagcgcccacgacgcctccgtcctcgtggccacgtacgagggcgaccacacccacgccccgcccccctcgggctcgggcaagaacgccgcgaagccgccgtcgccggcgcgccgccaggaggctgctgtcgcggtga

SEQ ID NO: 3834 - DNA, 1164 bp, Zea mays
  Clone ID: TF_ZmC5807_21
cgtttcgagtccaaatcatcatcattagcatcatccccagggtaggatcttccacctccagcatcaacatcatcatcactagctggacccggaacagtgtcaatcatgccagctgaatgtacttggttacagaggttggaataaatatttgaaggcttgtcttcaatagttgccacaccatcatacctttcttcaccctggcttgaaggaactgcaccaccagctaaccttctatttggttggggcttagaatgattatgacgccctttataaacaacttcagtaacttggccatcaagcgaacgctctaatagctttttaacttcacaattaggatgcgtgcacttgtaataacttctaggattttcacttcccttgacatgcttctgtccatatttacgccaattatagccatcctctgctgatttttcagctacattttcaatttgtgtttcctgagtagcattttcagaactattgatctggtgcatctctgatgtaccaacttcagcaggcatgttgtcagacggacaaactatcgaaacagtttggtttggagcaattgaagcatgtgctgtgtgactcgattcccgtgaacagagaggtttattttcagtcttcaaattgctagatggtgtggtatgatttgagctatatttttgcatagtgtcatgatggttttgattgttgactgaaggagccgccaaatgagaattgagatgaggcttgaattcaaaatcccgagaacctccatcttcctggccactaccagctgaattatccctaggtgaaggcattatgtccatatgagtgctcttgttgatgattgcagccatgctcagagtaccagttgtgggagacggttcaaccttgaagttgttgaggaggacgggggactcgaggagggcaccggggctgaacccggcggggatagtgaggcatggctcccgcgagatcggcagccgcgcgggggacatggccttgtacctcgcgccggcgccggcgagcgcggccacgcgtcgatccgccaggaccggcttctccggcgagcccccggggccggcggggaggtccccggagctagggttcggcgaatcggccattggcgggggggtggagaggtgagtgtaagggggaccccggccggcctcgaggtacccaatg

SEQ ID NO: 3835 - DNA, 2002 bp, Zea mays
  Clone ID: TF_ZmC32154_1
caaaccctccaaagtcaacgtcggaaaccaagaagaaggcaagaagcagaggggaattctttctctcccttcctatctctctccctctctctattgcaattgcatcccgcgaccatgtccgcgcgtccgccgcctcaaccgcgcccgcgcctggcgctgccgccgcgctcgacggcggaatcgctcttcacgggcgccggggacaccagccccggcccgctcacgctcgcctcagcgctcttcccctctgacgccgacggcggcggtggccccggaggcgcgtcctcctccgccgccggggccgcgaccttcacgcagctcctcaccggctcccttgcgcctcctcctccgcagcagcagcggcatgacgcggagaggggacgaggcggcggggtcgccagggccgggccggcgctctcggtggcgccgccggcatcggcgtccgctggcgcgtccgtgttcacggtgccgcccggcctcagcccctccggtttgttcgactcccctgggctgctcttctcgccggccatgggggggtttggaatgtcgcaccagcaggctctggctcaagttacagcccaagcaacccattctccactcagaatgtttgatcaccttgaacagccatctttctccacagctgcaacaacgtctggagctctacagcacatgaattctgcagccagtatggcaggaatttcagatatgacaatggcaacagcaaacaatgagaacccgtcctttcagtctgctgaggcatcccaaaggtatcaagttaatgcccctgttgataagccagctgatgatggctataactggcggaaatatggtcagaaggtggtaaagggcagtgattgtccaaggagctattacaaatgcacccatcccaattgtccggtcaagaaaaaggtagagcatgcagaagatggtcagatatctgagatcatatacaaaggcaaacacaatcaccaacgtccaccaaataagcgggcaaaagacggcaactcttcagcatttgatcacaatgaacaatctaatgataccgcatctggcttgtcagctgccaagagagatcaggacaatatatatgggatgtctgagcaagcatctggtttaagtgacggagatgatatggatgatggtgaatcaaaacgacatgaagatgcacgagtgataatgagagtaaaagaaggaatatacacatttcttcacaaaggaccttgtcagagtctaagatcattgtgcaaacaactagtgaggttgatcttttggatgatggttatagatggcgcaagtatgggcagaaggtagtcaaagggaatccacatccaaggagctactacaagtgcacgtttgctggatgcaatgttaggaagcacattgagaggtgttcatcagaccctaaggctgtcataacaacctatgaaggaaaacataaccatgaaccaccggttggtcggggcggcaaccagaacgcaggaatgtcatcacaacagaaagggcagaacaacgtatccagcaatcaagcttcattctcgagaccagacttgagcaacgctaaccagatgccaattggaatcttacagttcaagagcgagcaatagtaacatgtatttggatgacgttcttttggcaaatacaagatgcctgcaattcgtacagccatatggcatcaaaagtttcttaaagcctgataatttcaaatggtatcagtttgcagtttttccccgtagatacacaggatatatagctgatacggcctcatcgtttctagtttgtacatgctattaagttggggcatgagggatgcaatactagctaggtgaggttacttatatgtggttatggtgttctatagatggatcgatggtatacatgttctgattttgttcccaacacccgacaagattttgtatgtatttgtacagatgtttttgagttacattttgccttttgtaactttgaagatgttctagtttgctatgtcaaaaaaatttttttc

SEQ ID NO: 3836 - DNA, 2120 bp, Zea mays
  Clone ID: TF_ZmC1136_1
ccacggcggccgccggcgtccgctctcccgcttccggggacgcacgcaccctcacgcatccgatctgatctctccccctctcgacccgtcccctggtcctccgctctgcccagctcgctcgccctggcgtcctcgacggggagcttggagcacggcgggttcacgttcacgccgccgcccttcatcacctccttcacggagctgctctctggggcagcagcggacatggtaggagccgcgggcgccgatcatcaggagcggtcgccgagggggctgttccaccgcggcgccaccaggggcggcggcgtaggcgtgcccaagttcaagtccgcgcagccgcccagcctgcccatctcgccgccgccgatgtcgccctcctcctacttctccatcccgcccgggctcagccccgccgagttgctggactcgcccgtcctgctccactcttcctcgaacttcttcgcgtcgcccaccaccggcgccatcccggcgcagaggttcgactggaagcaggccgccgacctgatcgcgtctcaatctcagcaagacgacagccgggctgcggtcggcagcgccttcaacgacttctccttccacgcgcccaccatgcccgcgcagaccacgtccttcccttccttcaaggagcagcagcaacagcaagtcgaagcggcgactaagagcgccgtcccgtcgagcaacaaggccagcggcggaagcggcggcagcaccaagcttgaggacgggtacaactggcgcaagtacgggcagaagcaggtgaaggggagcgagaacccgcgcagctactacaagtgcacgtaccacagctgctccatgaagaagaaggtggagcggtccctggccgacgggcgcgtcacgcagatcgtgtacaagggcgcgcacaaccaccccaagccgctgtccacgcgccgcaactcctccggcggcgtggcggcggcggaggagcaggccgccaacaacagcagcctctctggctgcggcggcccggagcactccggcggcgccaccgccgagaactcgtccgtcacgttcggcgacgacgaggcggagaacgggtcgcagcggagcggcggtgacgagcccgacgccaagcgctggaaggcggaggacggtgagaacgaaggcagctcaggcgccggcggcggcaagccggtgcgcgagccgcggctggtggtacagacgctgagcgacatcgacatcctggacgacgggttccggtggcgcaagtacgggcagaaggtggtgaaggggaacccgaacccgcggagctactacaagtgcaccacggcggggtgccccgtgcggaagcacgtggagcgcgcgtgccacgacgcgcgcgccgtgatcaccacgtacgagggcaagcacaaccacgacgtgcccgtgggccgcggcgccgccagccgagctgctgctgctgcggcggcgggttccggggccttgatggccaccggcggcggccagctcgggtatcagcagcaccagcagcagcagccatacaccctggagatgctgagcagcggatcgtacggcggcggcggctacgtgccccggcgccgccagccgagctgctgctgcggcggcggcggcttcgcgttctcctccggcttcgacaacccgatgggctcgtacatgagccagcaccagcagcagcagaggcagaacgacgccatgcacgcgtcgagggccaaggaggagccccgggaggacatgtttttcccgacgtcgttgctgtacactgactgaaggacaaggacggcaggacatggcgtggtgtggtgtccataaactgttcctttggcacacggattgttgttgttgttgttgttgttgttgtatctaggataggttgaacagatttctttatttgtttggaggcctccatgttggcagtggcagatgcttgccgtgccgcaggggtgtctcccttaacacgtgaaaggggggaaagaaagggatttaggatactagagtctaggacacgtggcaattacacagaaggggtaaagaagttttgttcctcaaagacaaattcacacatgagacttgttgtagtcaggattggacataatttcatgtcacagaacatttgttaagattca

SEQ ID NO: 3837 - DNA, 350 bp, Zea mays
  Clone ID: TF_LIB3116-028-P1-K1-A11
gaaaccggggcggaccaacccttccgccaacccttccgcttaagccgggtgttaatgtccggttcccagggccccaggtcggggcggagggttacaaaggccagccggggcccccggccctacttccgttgttctttcgccccggcctgcccagcaaaaaaaaaggtgcagcgcagggccaccaacccaacaatcttggtcgcaacttccaagggcaaccacaacaacggccagcccccgcaacaggcccaggccccgaacaacggttcaagccttggccccagaaaaaagccgccttctcctccaaggccgttcgccgccgttccggggcggttccacaacaagcaggt

SEQ ID NO: 3838 - DNA, 715 bp, Zea mays
  Clone ID: TF_LIB5116-047-A1-PF1-F3
ggcccacaaaatcccaaggcctctccctcctctctcctcgcttctcttctccttctccgaccgaccgccatggccctggactccgtcccttcctaccccagcgacctgggatccagcggcagggcaaccaggacccagcaaagaatccggaaggaggagcggacgtggacggcggacacctacgcgccgtacgacgacgggcatcagtggaggaagtacggcgagaagaagctctccaactccaacttcccgaggttctactacagatgtacctacaagactgacctgaagtgccctgcgacgaaacaagtccagcagaaggacatgagcgacccaccattgttcacggtcacttacttcaaccatcacagctgcaacaccacctcgaggcccatcggcagcgccccagacaccactgaacagtcgtcctcgaggagagcagtgtccatctgctttgggtcgcatgccaccggcgagcagccgacattcctaacgttgccgggcacactgcagtctccagcgagcacaaccaaccaacagagcgacagaggcgcttacggtcaccagtttcagtggacagacacatcaccatcggcaggcgatgccccagtcaagatggagaccgacagtcttgctggaacagacgcttcgtctggcgctgctagcggtcatgctctgtcgaggacactgctgccgatcggccagtcgagatgca

SEQ ID NO: 3839 - DNA, 580 bp, Zea mays
  Clone ID: TF_ZmC1382_2
ggcacatcaacggacagacacacacaagcaaggcggctagcggtgcaagtagtgcgaagctagctaggtgctggtgcatgcaatggcggcttcgctgggtctgaaccctgaagctgtcttcacttcctacacctcctcgccgccgttcatgtcggactacgtggcggcgagcttcctgccgccggccgtcgtcgactccacggacttctctgcagagctcgatgatcttcaccaccacttggattactcatcgccggcgccgaccttggccggggctcggagcgatcgcagcgagaagcagatgatcaggtggtgtgagggtggtggtggcgagaagagactcggtaggatcgggttcagaacgagatcagaggtggagatcttggacgatggattcaaatggaggaagtatggcaagaaggctgtcaagagtagcccaaatccaaggaactactaccgctgctcgtcggagggctgcggcgtgaagaagcgggtggagagggaccgcgacgacccccgctacgtcatcaccacctacgacggcgtccacaaccacgcaagccccgcagccgccgccatc

SEQ ID NO: 3840 - DNA, 678 bp, Zea mays
  Clone ID: TF_ZmC240676_2
ggccgcggacgacgcggatcgcgttccggacgaggtcggagatcgagatcctggacgacggctacaagtggaggaagtacggcaagaagtccgtcaagaacagccccaacccaaggaactactaccggtgctcgacggaagggtgcaacgtgaagaagcgggtggagcgggacaaggacgaccccagctacgtggtgacgacgtacgaggggatgcacaaccacgtcagccccagtacggtgtactacgccagccaggacgccgcctccggccgcttcttcgtcgccggcacgcagccaccgggctccctcaactgatccccggcggcccatcgcgacgtacggtccgctccaccctaccaccgcacctatctggtttcgactcccagatggcaggctggcagctagctagtcggcggtatacactagtaagtagtagtaggataggccggccgacacccgataggtgatcggctggtgggtcggtttcccgaggtggatttctcgtttgggtttctagcacacccctccgctcctccctcttttccccgtccttttcctgctccgatcatggaaagggccggcggctggctggctggctggctgttgcgatcgaatagtatgtagtggtggtggtgctgctgttcatgctgggttccaagagaggtttaatttccca

SEQ ID NO: 3841 - DNA, 1531 bp, Zea mays
  Clone ID: TF_ZmC58440_1
ttctgatacacgccgcgcatcgcaagcgagcgacacataaagagcgcccatggggtgtgcaccaccatctcgggcggtgcgggtggaggaggccccggcggggggacgtgaagggggcggggacggaggcggagaaggcggtcgcgtgggcggacgcgtgggtccggaggcgtgggttcattgaaagcccaggcacgccgcgcatcgcaagcgagcgacacaagagagcgcccatcatctgtgccctgtgcgccaccatctcgcccgccttcaatcccctccatcattcgttccaacagccccgctttctccaccatcagtgcgaaaaaatttatgcgcgctttgggaaagcgcgagctcgttttgctttgaagctgcctccgcctttttatccgtccgggccggggctgtgggctccgcctccgcctccgtgtactccggccgggcgtggtcaccgagggagcagcggcgagagagggggggatctgatcgatgtcgtcggccgaggacgggtactgcagctcggattcgccgcgggcggaatcccccgacgagccgcaggcgggggcggacgcggagtcgccgcgcgccggggccgggctgaacaagcgcgagcgcgacctccccgcctcgccgtcgtcgccgctgccgccagctaagcgcagccggagatcggtggagaagcgggttgtgtcggtgccgctggccgagtgcggggaccggcccagaggggccagcggggaggggccgccgccgtcggactcgtgggcgtggcgcaagtatgggcagaagcccatcaagggctccccctacccacggggttactaccgctgcagcagctccaaggggtgcccagcgaggaagcaggtggagcgcagccacgcggaccccaccgcgctgctcgtcacctacaccttcgagcacaatcacgaggcgccgcagcccaagaccagcggcggcagctgctgccaccagcaaggcaagccgtccgcgaatgagcccgtcgagcaggagtgagctgggtccggagcatgagccggaagacgagcaggagccggagcagaaggtcgtcccaggtctggccgggccggaaacggcgccggcaaccgcaacgttggcgccggtggcagaggaggacgaaagcttcgacttggggtggttcgaccagtacccgacgtggcaccgttcggcgctgtacgcgccgctgctgccgccggaggagtgggagcgggagctgcagggggaagacgccctgttcgcgggcctcggcgagctgcccgagtgcgccgtcgtgttcggccgccgccgcgagctcagcctggccgctaccgcgccgtgctcctgatggtccttaaagtcttttttacactagtagctctgatcgctgcacggggcatctgttcaaggccgtctgctgcctaagctttctgtccccgtgtccgtgttgattgggtacgcgcgttcgccgtccaaggttcgtttgtcccgtttgcaatgtggttccagccagaaagcagcgaaaggtttggct

SEQ ID NO: 3842 - DNA, 1034 bp, Zea mays
  Clone ID: TF_ZmC332_4
tttgccgggtatagtgcaattgtacccactgatttcatgctatcttatttaaatacgaccaccagtgctgttgagctcaggtaagtatctctcccttttcatgttctggagtgcatgatctcccatgaaggaggcaccacaaaggattgtactgatatgaaaaatatgaacaagcatcctctccctagtcttatgctgcttatagcattgggtcgtttggcttctaacctaagttctcagttttgtttcctactattttacaataagcatactgactacaagcatacatttatggttacaaacctgttgtaattctggtagcatgcctgttgcaatccaagaaaggccacaactggcaacctcttttggagcacagttcactctcctgtacctttgtcaaaatatgcagatcacagatactcacaaagctcaccggccttgcaggggttactacaagtgtagcagcgtgagaggctgccccgcgaggaagcacgtcgaggggtgcgtggacgacccctcgatgctgatcgtcacctacgagggtgaccacaaccacagccgagttctagcccagccagcctgatctctctggctatcgattattcaagatcgcttccgtagtagtcaccctccctctctagagaagggaggacagcaacagcaacaagaagagcctagtgtctgtacataagttctgcttctaacagttggaggagtgattcagttagctagctctttcagaagaaatcagtggtgacagaagggaacttattgcgtcgatggatggaagaaagggagagagttcctcatcagatactcatactctatttttgtagcttcggtttatctctcttttttgttcatcctgtgctagggcccatcctgtgggttgtatgtctgggaatggtgttgggggggattggatcggagaagaaggcatgtggcaggaaattgcctgtaaaagtggctacacctaggaacagaatgtactatcgtcttcagcagtggtacagccttgttgacgcagtggtttt

SEQ ID NO: 3843 - DNA, 1641 bp, Zea mays
  Clone ID: TF_ZmC91351_1
atgtcgtcgggagacttccactaccacgacgagctggcggcgctgttcgcgcagcggccggcgccggcgggagagatgacgatggcgctgcagcaacaggcgccggcggcgtcgtggttcgcggactacctgcacgcgggcgcccccggcatggggatggacatggactacgacctgctgtgccgcgcgctggacctgccggtgccgggggacgaggacggcgtcgtcaagcgcgagctgctgctggtggcggacacgggcgggggaggcggaggcttcgcggcgccgctcacgcccaacacgacgtcgtccatgtcctcctcgtccagcgaggcggcgggcgccgccgccggaggaggaggcggtgggagctttggcgctgcggaggaggaatcgcagtcgctggggaggtgcaagaaggaggacgacggggatggggaggagagcaaggacaaggaggcgatgaagggggaggaggacgacgcggacacgggcaagaaagggtcagcggcggggaagggcaagggcaagggcgagaagcggcagcggcagccgcggatcgcgttcatgaccaagagcgaggtcgaccacctcgaggacggctaccggtggcgcaagtacggccagaaggccgtcaagaacagcccataccccaggagctactaccggtgcacgacgcagaggtgccccgtgaagaagcgggtggagcggtcgcaccaggacccggcggtggtgatcaccacgtacgaaggcaagcacacgcaccccatcccgtccacgctccgtggcagcagcacccacctcctcgccgcgcagctgcaccaccaccaccaccacaacatcgtcggcgccttcccgccgccgccgccacccccgcagacgatgtgcttgccgttcgtcgggcggacaggcgacggcggcggcgtcatcgacatgctgggtctctgcctgcctccgcgcaaccacgccgccgtgccgccggcggcgacaggcctcgcgccgtccccctgctccatgagcggtccggtgggcacggtggcaggcgcgacgcagacgacggcgcccccaccaccaccgtcaccacgaccactacctcgtcgcctcctcctcctccctcgctccagacgatgcagcactttatggcgcaggacgacttcgggcttctacaggacatgctgccgtcgtcatcgtcgtcgttgtccttcgtcgtccacagcaacggcagcaacgtccagctgccctgaattcgatcagctaatagtcgtcgtcaccagtcaccaccaccacaagcgatcgagctaatgaggaaggaagctagcagagataagagatgatagtacttagtttggtccttgttaatgctctcctttcgtttttttttcaccgaaaatctactcccccctagctagatggatcgtatcgatcggttcttggttttcttttcgatcccgctgtgccgcgaccgcgagacacacgtacgccgctgcagtgcagatcgagtcttgtggcgccgggtctcgtaccgttcccttacgatgatctagctagctagcccttgcagtagcaggtagtacgtactagcggctcttgctgtacatgtacctagctaatcaacccccagctcatgcgcgcgtttgcacc

SEQ ID NO: 3844 - DNA, 1367 bp, Zea mays
  Clone ID: TF_ZmC8945_1
attgggacctcgagccggcgggatgcacaacaatccatcatccaggccgcaagaaacgcctcctccggccctccctccctctcgccgtccgccgtcctcctcgccatggctctggactcggttcctccttaccccagcgacctgggctccagcagggccgccgccgccgccaggacccagcagaggatcaggaaagaggagcgcacctggacctcggacacgtacgctccgtacgacgacgggcaccagtggaggaagtacggcgagaagaagctctccaactcccacttcccaaggttctactacagatgcacatacaagaacgacatgaagtgccccgcgacgaagcaagtgcagcagaaggacagcagcgacccgccactgttctccgtcacttacttcaaccagcacacctgcagcagctcaagcgccctcggcagcgccagagacgtcgcgtcccagtcgtcttcaaagaaggcggtgtcgatctgcttcagcccgcacgccccctccgagcagacctcgttcctgacgacgactacggtcgcgccgccggttatgcactcctacggcgccaaccgacagcccgacaggagcgcctacaaccaacagccccagtggtggacaggcggtgtgccatctcccacaagcaacggccctgctaagatggaggtcgcggagtccacgcagaagccgagcggttcgtacggcagcaccaccggcaacgctccgtccaggacgctgctaccgatcggccagtccaggtgcatcgagtacttccatttcttgtgatgagcttccgggaaggcaagctggggctcgggcactgcagcttggtgtctgcttgtttggagtggcaagtggagtttgtatctggagctggaggcgaaggcgaaaatgttgctgccgtcgtcctggcctcctggcctgaactacacaggccgggcggggcccaatcagtatactgactgacctgcattgcattacatacagagactgcctgctgcttactgtactgtacatctttgcatttgggttcaagccacgttttggtgcttggatgatgtgaagaatggtattggactgttggggtttctttatctagcagtagcgtacatgatatgatacgacgtacagaatgactgcttgacagttgagatatatccatttgtttgttatgtgttgtttgctgtttgtttagagatgagactaggatgtctcatttctgacagcgggatattggccatggttcagtctgctgctacggaaatgctgaaggttatagattatgtacactaaacagtaacagtttcttattaacatgtcttctacagttttagaagcaaaaaaaaaaaaaaaaaaaaaaa

SEQ ID NO: 3845 - DNA, 1424 bp, Zea mays
  Clone ID: TF_ZmC746_2
gccggccggtccgggacggtcacacacaccccaacccagccacccaccacctcccccaattgcctcttctcttctcccagcagcagccgcgacgcagtcctactcctgcggtgcctccagtttcgcagcaccgttgccacacatcgccaactaacgccatcgatcacccggcggcctcccagagtcttgccctgccatatccgaacctgctcctacagctagccagcaacacaaacagaataggtcggtcggtcgatcgatcgatggccagcgttatcgacggcaatggaggcagccggctggtggtgacggagctgggccacctcaaggagctggcgatgcagctggaggggcacctcggcggctcctcgccggacctctgcaagcacctcgcctcgcagatctcctccatcaccgaccgctccatcagcctgctcatcaccgccacctcatcaagcccccacggcggcgcctctgacgcgccgcccttcatcaaggctactaccaagaaaaggaagaggatggacaagaagaggcatgaggtgagggtgggctcggccggaggcggcggcggtgaccatccggccgacgacggctacagctggaggaagtacggccagaaggagatccttggagccaagcacccaaggggctactaccgctgcacgcacaagagctctcagggatgtgcggcgacgaagcaagtgcagcgcaccgacgaggacccggccttcttcgacgtcgtctacctcggcgaccacacctgcgttcagagccagagggcggcagcgacggcgggtcgtcaggctgccgcggacgcgcaggcgccggtgtacgacgccaacctcatggtgaagaccgaggggccggccttggagccagagcagcagcggcggggctgggacgacgcgcccacgccctttctcttctcctccacgccggcgtgccttgtgcaggagcgcagccccttctccgcgccgtccacgtccgagaactggggcgtgtccccggcgacctcggactccaaccacgtcgtctctttcccgcctttcgaggtcgccgccgccgccgccgcgcagttcgagttcgaggaagtcatgtcagcgatggacagagccgacggcgagtttctcgaggacctcgacatctatgtctcaagcttcttagcgtgatctgctggatgtaatgtaaccgatgaacgctagggaatgggaatctgaggcagctgttactgttaccatgagttgctctctgccgtttgtccaggggcagagcagggaagaacacatgttcttcctcggcccgtcccgttgtaaaccttaggatgtgagaatattgaatgtcccatctctctctctctttttcttcggtcgagggtttgcaaggaaaacaatttcataataaaaaaaaaaaaaaaagcggcc

SEQ ID NO: 3846 - DNA, 603 bp, Zea mays
  Clone ID: TF_LIB4742-048-R1-K1-C11
attgggtccctcgaggccggccccggccggcgtcacggatcgggttccggaccaggtcggaggtggacgtgctggacgacggcttcaagtggcgcaagtacggcaagaaggcggtcaagagcagccccaacccgaggaactactaccggtgctcggcggagggctgcggcgtgaagaagcgcgtggagcgggacagcgacgacccgcgctacgtcgtcaccacctacgacggcgtccacaaccacgccgcgccgggcgacgcctacctctgcccgccgcctccgtcgcgcggcgcagcgcactactcgcctccggtggcagcgcccagctggagcgccgctcttgacgcgtgggaggcgcagctgcaccggcacgccgcggcggcggctcactcgtcggagtcgtcctactgatctatcatcagctacacgcacgtacacggaacatgtagctagctagactgttcgccaacgtggagatcgagacgatcgagccacgtttttcggggtctgcatagtttgtactgtactgccgttacagttagacatacatacacacacaccgagactgtttctgattaaaaaaaaaaaaaaaaaagcggcc

SEQ ID NO: 3847 - DNA, 999 bp, Zea mays
  Clone ID: TF_ZmC260_40
ctgccggcgcgtgcgtctacttactcaggcggcctcgctaggactcgcccacgagacgagctacgccgcctactacccgccgcccgcgcccgcctcctcgtacttcccaccaccacccgacctcgtggcggacctcccgccgcccgccgccgccaccatggccgatgactacttccagttcgggttcaccggccaggagatggtggccgatgactgctcggcgccggtgttcgccaacagttcttcagacgccgtcaccgccgccgtcggcaatggcatgagcctgctgagctacggcgtggacggcgacggcgacgggaggaggccgatgagcggaccaccatatggcaccggtgggaacggcggcggccggccgccgtcgtcgtcacggatcgggttccggacgcggtcggaggtggacgtgctggacgatggcttcaagtggcgcaagtacggcaagaaggcggtcaagagcagccccaacccgaggaactactaccggtgctcggcggagggctgcggcgtgaagaagcgcgtggagcgggacagcgacgacccgcgctacgtcgtcaccacctacgacggcgtccacaaccacgccgcgccgggcccgggcgccgcctcctacctgtgccaaccaccgccgccgcgcggcgcaaccgcgaccgcaacgcccttctcgcctccacgctcggcctcggcgccagcgcctctggctgcagcgcccagctggagcgccgcctgtgacgcgtggtgggaggcgcagctgcacgccgcggcggcggttgctcattcctcggagtcgtcgtactgatccgatccgtcatccatcagttattacacgcacgtacgggtcacgtagctagaatgtgttggaactctaaaacgctcacaagcacaggacacagattggtgagaggaggaagacgaatgaacagtagctaaacacaaagagttcggcgcccaaacacctgcagcgctccgaccctgcctttctct

SEQ ID NO: 3848 - DNA, 747 bp, Zea mays
  Clone ID: TF_ZmC165426_1
ccggccgggacttctgcttctgcccaacccccctccatccatccaaacagctttgcctagcttattccttaccgacaaacaaaactgacacggatccgcacagagcgcaacgaactcgcccagtccggctgctgctgctgcacaacggactcgatctcacggccccgccggctcgcagccatgcagacgcagtcccgcctggccatgagcggcggcggcggcacgggcggcagcagcagcagctcggcctcggaggacgagcacgaggcggtgatccgcgagctgacgcgggggcacgagctgacggcgcagctgcgggccgaggccctgcgcgcgctgcgcgggcagggccaggccgaggccaccgcggcattcatcctgcaggaggtgtcccgcgccttcaccgtctgcctctccatcatgagctcgcccgcccgcgccccgccgccgacgatggaaatgcccgcgcctgccctggccccgcgacggggccgggacgacagcatcccaagagagcaacggaggacgtcctcgccgcacagcgacgggtaccagtggaggaagtacggccagaagaggatcactaagtcgccgtttccgaggtgctactacaagtgcagcttccaccgcgagcgcagctgccgggccaccaagcaggtgcagcagtgcagcgacggcgacggccacccgccccagtacgtcgtcatgtacttcaacgagcacacgtgcgacacggcgggctgggag

SEQ ID NO: 3849 - DNA, 449 bp, Zea mays
  Clone ID: TF_LIB3279-196-Q1-N6-F4
gggggggtaaaaaaaattatttttatggcccgggccttcccttttggttttttttcccttctccaagggtggggctaacactttcctaatcctttcataaagctggttacgcgaacgcccgaagaaaaaaaaaaattgggaaacggggctgtttaaactggactggggattttgtttttttaacttatgacaaccgcttctttttattggcaggacaaagcaggccggaagccaaatttatgggtgggcaactcccgcagcggggcaagcgacggggggggggggtcctggccggagggggggctttggcggtgctccccctcgtaggggacaatcagcattgacgggtcgggggggtcgccctccacatgctttcggggggggcagccgcgccccgtactgtatttgtagtagccgcgtgggtagggcgaccccttgatgggtttttg

SEQ ID NO: 3850 - DNA, 386 bp, Zea mays
  Clone ID: TF_ZmC1136_7
ggctggtggtccagacgatgagcgacatcgacatcttggacgacgggttccggtggcgcaagtacgggcagaaggtggtgaaggggaacccgaacccgcggagctactacaagtgcaccacggcggggtgcccggtgcggaagcacgtggagcgcgcgtcccacgacaagcgcgccgtgatcaccacgtacgagggcaagcacaaccacgacgtgcccgtgggccgcggcgccgccagccgagctgctgctgctgctgcggcggcgggttccggggccttgatggccaccggcggcggccagctcggctatcatcatcagcagcagcagcagccatacaccctggagatgctgagcagcggatcgtacggcggcggcggcggctac

SEQ ID NO: 3851 - DNA, 1719 bp, Zea mays
  Clone ID: TF_ZmC746_1
ccccgcgtccgcggacccgtgggcccgcgcgtgggcggcgtccctcgagagtcgaccacctcgacggccggccaatatagcaacctatacagggcattctcatctcatggcgacgacggagacgatggagatgggcgtcgtcgtcgacggcgtcagtagcaacggatcaggcggctgcggcgggctggtggtgacggagctgagccacatcaaggagctggtgaggcagctggaggtgcacctcggcggctccccggacctgtgcaagcacctggcctcgcagatcttctccctcaccgagcgctccatcggcctcatcacctcctcctccagctccagcggcctcgacggcgcccgccggaagcgctccgcgggcgacgccggcctcgcctcgccgctctcggccacgcccaccagcggcgtcaccgacgggccgttcaagaacaccaagaagaggaaggcgatggaacagcggaggcagagggtgagctcggccggcggcgagaacccggtcgacgacggccgtagctggaggaagtacggccagaaggagattctcggagccaagcacccaaggggctactaccgctgctcgcaccgctactcgcaggggtgccaggcgacgaagcaggtgcagcgcaccgacgaggacccgacgctgtacgacgtcatctaccacggcgaacacacctgcgccccccacaggccggcggcggcggcggctcagcacaacccggacgcgcgcgggcacctgcagaccctgagcgccggcctcacggtgaagaccgagggcctgccggacccgtgggcgccgcggggccggggcgccgccacgcccttgtacctctccgcctcctccacgccgccgtccacgtcggagaactggggcgtgtcgcccgcgacctcgggctccacccacgtcgcctccttccggccgttcgaggccgccgagtggcgggggcaggccgagcaccaggaagtggtgtccgcgctcgtggccgccatcgcgccgccgcccgccgtcgacagcctcgacgacctgctcatcgacatagatctagacgacatcgcgagcttcttcgcgtgacccgcgcgttgtagctgaccaagggtaggaaatcaaatcaaagcagccgatgtggcgtagtatgtgaccgagccctctggctctgcttcctgaaactggaacagaacagaggagggaagagcaccagagctctgcttcctggggtccatgcagatgcaggatgcaggagtaaaaacctaggagatgaacaagagtagggactgcattttttacccctcttttttgttaatctttttcctctttctgaggactgagggtagtgtgtttgtattgtattattgattttttatgccaatggaaaaaataagatccttcgtgccaaaaaaaagccgccgccgccgcgcagttcgagttcgagaaagtcatgtcagcgatggacagagccgacggcgagtttctcgaggacctcgacatctatgtctcaagcttcttagcgtgatctgctggatgtaatgtaaccgatgaacgctagggaatgggaatctgaggcagctgtcactgttaccatgagttgctctctgccgtttgtccaggggcagagcagggaagaacacatgttcttcctcggcccgtcccgttgtaaaccttaggaagtgagactattgaatgtcccatctctctcaaaaaagagg

SEQ ID NO: 3852 - DNA, 1306 bp, Zea mays
  Clone ID: TF_ZmC746_3
gggtacctcgaggccggccatatagcaacctatacagggcattctcatctcgtggcgacgacggagacgggcgtcgtcgtcgacggcgtcagtagcaacggatcaggcggctgcggcgggctggtggtgacggagctgagccacatcaaggagctggtgaggcagctggaggtgcacctcggcggctccccggacctgtgcaagcacctggcctcgcagatcttctccctcaccgagcgctccatcggcctcatcacctcctcctccagctccagcggcctcgacggcgcccgccggaagcgctccgcgggcgacgccggcctcgcctcgccgctctcggccacgcccaccagcggcgtcaccgacgggccgttcaagaacaccaagaagaggaaggcgatggaacagcggaggcagagggtgagctcggccggcggcgagaacccggtcgacgacggccgtagctggaggaagtacggccagaaggagattctcggagccaagcacccaaggggctactaccgctgctcgcaccgctactcgcaggggtgccaggcgacgaagcaggtgcagcgcaccgacgaggacccgacgctgtacgacgtcatctaccacggcgaacacacctgcgccccccacaggccggcggcggcggagcacaacccggacgcgcgcggccacctgcagaccctgagcgccggcctcacggtgaagaccgagggactgccggacccgccgcggggccggggcgccgccacgcccttgtacctctccgcctcctccacgccgccgtccacgtcggagaactggggcgtgtcgcccgcgacctcgggctccacccacgtcgcctccttccggccgttcgaggccgccgagtggcgggggcaggccgagcaccaggaagtggtgtccgcgctcgtggccgccatcgcgccgccgcccgccgtcgacagcctcgacgacctgctcatcgacatagatctagacgacatcgcgagcttcttcgcgtgacccgcgcgttgtagcagccgatgtggcgtagtatgtgaccgagccctctggctctgcttcctgaaactggaacagaacagaggagggaagagcaccaaagctctgcttcctggggtccatgcagatgcaggatgcaggcgtaaaaacctaggagatgaacaagagtagagactgcatttttttacccctctttttttgttaatctttttcctctttcagaggactgagggtagtgtttgtattgtattattgatttttaatgccaatgggaaaaataagatccttcgtgccaaaa

SEQ ID NO: 3853 - DNA, 809 bp, Zea mays
  Clone ID: TF_LIB4759-048-R1-K1-C7
ccggccgggcatttgtgatggaagctgtcaagggtaatatattttctctaaatatttagcctaaaaaaaaaaaaaaaaaaaactcctttaatttcagcctgcctttccacaccgccttttccctccctctcaatcccagataaaccatggggggtaaattaagaatgactcacaattagcatttcctcgcatctttctagctacctatctctctctctctctctctctctctcgtagtctcgtgtgcggtttgtatctagctaggtataacaacagcccacccagcgtgggtttctagatcgacggctggtctagctagccagggactaggaccgatcgatggcgtcgtttggcagcgacgaccacgtgccggcggccatggcggtgaacgatctgatcgaggcgcgcgacggcgtggcgaggctcaggatcttgctgctgcagctggacgagcagcgcgcggcgtgggcgcagctggagatcgacgccgtgctggccaagctgtccagcgcgatatcggcgttggatgcaagcgaagtaggccggagccgggccgccggaccggacggtgcgaggccacagcgacagcagtcggggaggtcgggcgggaacaagaggaaacaaggttccagcagaagcagatcacagcgcccctctgacaagaagatcactgctacgctggaagacgggcacgagtggcggaagtatgggcagaaagagatccaagactcaccctatccaaggagctactacaggtgcacgcacaaggcggaccagggctgcaacgccaaggaggcagtccagcgctg

SEQ ID NO: 3854 - DNA, 2473 bp, Zea mays
  Clone ID: TF_ZmC1377_1
ccgcgaggcctgtggggccgggcaaccgccggccgctcccctactcttctccctccctccccgtctctctctctctaaaaaaagtagcgcccggagaaccgagaggccggagaaagaaaggcggaaagagggagcaaaatctcactttgctgggagttctttcctctgtttccgactcctttgttctcttagtgttcttggttggtggaatggaagctcagcagctccatttgtgttccagagatcttcgtcgttctcgttcccctcgtgtgtagcctttggtaggttggtggaagggcgaggcacacaagaaaattgatagaggggggatccccattttcagctcttcgtgtttttttgtaggaggaattcccgttcacatgatccgtgcctggacgtgacggttttgccgcgctctgctgcttccctttcggggagaagaggactcgactcaaatcatttggtatcgcagacgtcgcccttcccagttcagttgagagagatttctggcatgtccggcgcaagtaactatggatccctcatcgatgaatggttgccgccccctacacctagcccaagaactctcatgtctagctttctgaatgaagaattcagctctgcgccattctctggtccccatgatcaatctgaaaagagcagagaagttttgaattcgagcgatgaggttccttcacatgctgtcaaaggcctatttcaaaatggtttctcaaatttgttcagtgctaaatcaaactccaatggtggtttggcggagcgcagggctgcgagagcaggtttcagtgtcccgaaaattgatacttctcgagttggttcatccacagttattcgatctcctgtgtcaattccacctggtctaagtccaactacacttcttgagtctcctgtttttctttacaataaaatggcacaaccgtctccaaccactggcacattgccatttttgatggctacgaatgataagtcaacaatatcaccagctgccaagataactgaagattctacatttgataatgatgtgttttctttccaaccccacttaggttctgaacaaacagggttctctactgcagaaaaaaaaaaaagaaaaagtccgaaaaagcagtccttgtcgaatattcatcagcaggaatccagtcttcagtcaagctttaccgcagtcaaggataacactagtgcaacaattgttaaagcgaagccatcttctagttccatgttcagtgatagtcactattcagctgaccaacagcaagctgacgagacaaacataaaggtgcaaggcaaaggtgtggaggctagatcagctgcttttgctcctgtatcagcgcacagtgatgcatctctcctggagtctcaagaagcacttgatgtctcctcaacactgtctaatgaagaggacgagagggcaacacatggcactgtttctatagagtgtgatggtgatgaagctgagactgtatctaaaagaaggaagctggaactagatgctttagaagctactcttactgctactacctccaccaccagtaccatcgacatggggcctgcagcctcaagagctgtccgggagcctagggttgttgttcagaccacaagtgaggtagacattcttgacgacggttatcggtggcgcaagtatgggcagaaggttgttaagggcaatccaaatccaaggagctactacaaatgtacaaacccgggctgttcagtgcgcaagcatgtggaaagagcatcgcacgatctgaaatcagtcatcacaacgtatgagggaaagcacaaccatgaagttccagcagccagaaatagtgggcaaggcagttccagcgctccatctgcatcacaagctggtggttctcaccgtaggcaagaacctgcacaggccagctttgctcacttcggtacggcttctttcagctcgttcggtctcccaccgagtggtcagttgggaccaacaactggcaatttcggcttcgggatggttcccccaggcatgacgatcccagtgccctctctaggatcgcttgcccctgtaaagatggttggaaattcatcagctatgcaggggtacccagggcttatggtgccgggagaaccaaaggtagagcctgtctcgcaaccactcatccaaatggcaaatgcatctccaccagcttaccaacagatattgagcaggcctcctttcggtcaccagatgtaaataataggaaagagaaaggggataatagatttgcttcagcttgtatacatgatagctacgctgcaacatggctttagtgttcatggatcgtccaattttttatttctattttatttttctgcccacgcatgtctttgaagcaaagaatgctgaggatgataccctgtcgtgcctgttgtaatcacgtaaaggatacctttcgtctttttgagactcgaaattggaaaacgatcaatcaaaatttctggttgcgaatgc

SEQ ID NO: 3855 - DNA, 1886 bp, Zea mays
  Clone ID: TF_ZmC1136_2
cattgggtacctcgaggccggccgggactcccgtccgcttctcccctctcctcctcctcacgtcacgcaccccatctcttctctccccctctcgtctcgtccagtcgtcccccactctacccagctgccctgctctgcgtcgctcgccatggcgtcctccacggggagcttggagcacggggggttcacgttcacgccgccgcccttcatcacctccttcaccgagctgctctccggcgcaggggacatgctaggagccggcgccgatcaggagcggtcgtcgccgagggggctgttccaccgcggcgccaggggcgtgcccaagttcaagtcggcgcagcctcccagcctgcccatctcgccgccgcccatgtcgccttcctcctacttcgccatcccgccggggctcagccccgccgagctgctcgactcgcccgtcctgctccactcgtcctccaacatcctggcgtctcccaccaccggcgccatcccggcgcagaggttcgactggaagaaggccgccgacctgatcgcgtctcagtctcagcaagacggcgacagccgggctgccgccgccggcttcgacgacttctccttccacacggccacctccaacgccgtgcgcgcgcacacgacgacgacgtccttaccttccttcgaggagcagcagcagcaagtcgaaaaagccgccgtcccgtcgagcaacagggcgagcggcggcgggaacggcaacactaagctggaggacgggtacaactggcgcaagtacgggcagaagcaggtgaaggggagcgagaacccgcgcagctactacaagtgcacgtaccacagctgctccatgaagaagaaggtggagagggccctggccgacggccgcatcacgcagatcgtgtacaagggcgcgcacaaccaccccaagccgctgtccacgcgccgcaactcatccggcggcggtgcggcggcggaggagctgcaggccggcaacagcagcctctcggccgtagcggcggccggctgtactggaccggagcactccggcgccaccgccgagaactcgtctgtcaccttcggcgacgacgaggcagagaacgggtcgcagcggagcgacggcgacgagcccgacgccaagcgctggtacgtacgtgatcccgcccgagcgagcgagcgagattcattattcgctacccgcgggccgcggttcacaagttgagcgtgtattactactgtttcctcgtgttcctgcaactcatgtatatatgtctgcttgatcaggaagcaggaggacggcgagaacgagggcagctctgcaggcgccggcggcaagccggtccgcgagccccggctggtggtccagacgctgagcgacatcgacatcctggacgacgggttccggtggcgcaagtacgggcagaaggtggtgaaggggaacccgaacccgcggagctactacaagtgcaccacggcggggtgcccggtgcggaagcacgtggagcgcgcgtcccacgacacgcgcgccgtgatcaccacgtacgagggcaagcacaaccacgacgtgcccgtgggccgcggcgccgccagccgagctgctgctgctgcggcggcgggttccggggccttgatggccaccggcggcggccagctcggctatcagcagcagcagcagcagtagccatacaccctggagatgctgagcagcggatcgtacggcggcggcggccccgtgggccgcggcgctgccagccgagctgctgctgctgctgcggcggcgggttcgggggccttgatggccacggccgtcggccagctcggctatcatcatcagcagcagcagcagccatacgccctggagatgctgagcagcggatcgtacggcggcgacgacggct

SEQ ID NO: 3856 - DNA, 1487 bp, Zea mays
  Clone ID: TF_ZmC2906_1
tcactatgccgctagggttttctcctgccaattgctaatgctgatctccacaactgtgtggctagcatgccaggctttggtggcatgatgagagcatgcgatgccagggcctgcaacaatcaatatcctcaggcagccgaaagtgacaccatcagtcttgaccttggtgtagctatcggcccttaccacggcgatgcaacaaaccagatgcagccctcagttccgaggccaatggaatctcctgggctcgatgccgctccgatggagataatgttccgggtccccaggttatgtgtacgatcattctggaggtggaagaccctaccctggggatgactctaatgatgatgatgacttggactcgaaacgcaggaaaatggaatctgctggtatcgacgccgctttgatgggtaaaccaaatcgtgagcctcgtgttgttgtacaaactgttagtgaagttgatatcttggacgatgggtatcgctggcgcaaatatgggcagaaagtagtgaaaggaaatcccaacccacggagttactacaaatgcacaaatacaggatgcccggtcaggaagcatgttgagagagcatcacatgacccgaagtcagtgatcacaacatatgaaggaaaacataaccatgaagtccctgtttccaggaatgcaagccatgagatgtccacagctcccatgaagcctgctgtgcatcctattaacagcaacatgccaggccttggtggcatgatgagagcatgtgatgccagggccttcaacaatcaatattctcaggcagctgaaagtgacaccatcagtcttgaccttggtgtaggtatcagccctaaccacagcgatgcaacaaaccagatgcagccctcagttccagaacctatgcagtatcagatgcgacacatggctcctgtgtacggtagcatgggacttccaggaatgcctgtgccagcaatacctggcagcatgtacggttccagagaagaaaaaggaaacgaagggtttactttcaaagctgcacctttggaccgatcagctaacttatgttacagtagtgctggtaacttagtgatgggtccatgagtgcctcttctgatggctatacctccatgaatcacacctatcaccgtcgtcatgaagttctcttcagaagatgctcctctacttcgtatcgtccgcacataattggaggcggtcaaggtatacctgggagctgcagcgatggcacatgatgtcttttgctgtgtggatgaactcgctgtatgtgacgctgcagctaaacattcgttgtacagcaaaccagttatgattaattagattatgataatttggttatgtaaacttctttctggacataaccgaagagccatctggtggcaaagctttgttatctcctgcatatgaacgatgccagtttgacattcatatgaaatgaaatatatcatttcacaaaaaaaaaaaaaaaaaaaaaaaaaaaaaaaaa

SEQ ID NO: 3857 - DNA, 1176 bp, Zea mays
  Clone ID: TF_ZmC2906_2
tcactatgccctaagggttttctcctgccaattgctaatgctgtactccacaactgtgtggctaggaaaatggaatctgctggtattgacgccgctttgatgggtaaaccaaatcgtgagcctcgtgttgttgtacaaactgttagtgaagttgatatcttggacgatgggtatcgttggcgcaaatatgggcagaaagtagtgaaaggaaatcccaacccacggagttactacaagtgcacaaatacaggatgcccggtcaggaagcatgttgagagagcatcacatgacccgaagtcggtgatcacaacatatgaaggaaaacataaccatgaagtccctgtttccaggaatgcaagccatgagatgtccacagctcccatgaagcctgctgtgcatcctattaacagcaacatgccaggccttggtggcatgatgagagcatgtgatgccagggccttcaccaatcaatattctcaggcagctgaaagtgacaccatcagtcttgaccttggtgtaggcatcagccctacccacagcgatgcaacaaaccaaatgcagccttcagttccagaatctatgcagtatcaaatgcaacacatggctcctgtatatggtagcatgggacttccaggaatgcctgtgacagcagtacctggaaatgcagctagcagcatatacggttctagagaagaaaacggaaatgaagggtttactttcaaagccgcaccattggaccgatcaactaacttatgttacagtagtgctggtaacttagtgatgggtccatgagtgtctctgctgatggtcatacctccatgaagcacatattaccgtaatcatgaagattgcttcagaaggtgctctactgtgtatcgtcatccacacataattgaatcggaggtggtcaaggtatacctgggagctgcagcgttgacacatgagccttttgctgttttggatgtacttgctgtatgtgacgctgcagctcaacattcgttgtacagcaaaccagttatgattaattagattctgataatttggttatgtaaacttctttctgtactggaatatgggatagaaccaaagatccgtctggtggcaaagctttgttatgccctgcatatgaacggtgccagtttgatatccatatgaaatgaaatatatcatttcacc

SEQ ID NO: 3858 - DNA, 1250 bp, Zea mays
  Clone ID: TF_ZmC740_3
aactctccccaaaccgagagcgcaaccaagatagcgagccaagatctgcagagccacaggcgaccacacaccggcgaccatggccgtggacctcatgggctgctacacccctcgccgcgccgacgaccagctcgccatccaggaggccgccaccgccggcctccgcagcctggagctcctggtctcctccctctccggcgcggcgccgtccaaggcgccccagcagcacccgcagcagccgttcggcgagatcgccgaccaggccgtctccaagttccgcaaggtgatctccatcctcgaccgcaccggtcacgcccgcttccgccgcggccccgtccagtcggcgccgccgccgccgcctcctccagcaccggtcgctccacctcctcccccacctttgaccgtcgtggcgccggtgtcggtggccgccccgctcccgcagccgcagagcctgacgctggatttcaccaagccgaacctggccatgtcgggcgcgacgtccgtcacctccacgtccttcttctcttcggtcacggccggcgagggcagcgtctccaagggccggagcctcatgtcctccgggaagccgccgctgtctggccacaagcggaagccctgcgccggcgcccactccgaggccaccaccaacggcagccgttgccactgctccaagagaaggaagaaccgcgtgaagaggagcatcagagtgccggcgatcagctcgaaggtcgccgacatcccgccggacgagtactcgtggaggaagtacggccagaagcctatcaagggctccccttacccacggtaaaaaaaaaaaatctcctcctccatccgcagtccggacctcgtctcgtctcgtctgtgttgtcgcgcaacgaatctgactgttctcttgtcacctggtccagtggctactacaagtgcagcactgtgcggggatgcccggcgaggaagcacgtggagcgggccaccgacgacccggccatgctggtggtgacgtacgagggcgagcaccgccacacgccgggcgcggtccaggggccgagccccctggcgaccgcgtcgccggtgcccgtcgccgtctccgccggcaacgggctcgttgtctagtctactaaaagctaggattagcttctcgtcttctttgttttttttttgtttgagctgatgtccgtgtaaaacaaggaagaaggttgtagaaagagggagaggaggacaccggaatttcgatgccgcaaaactcaaacctt

SEQ ID NO: 3859 - DNA, 552 bp, Zea mays
  Clone ID: TF_ZmC58440_4
attcggctcgagctgcggcgctggtacgggagtctggaaaccagagctacgaagatggctaactgggctcttgtctatttctgtgcgagcagccggagatcggtggagaagcgggttgtgtcggtgccgctggccgagtgcggggaccggcccagaggggccagcggggaggggccgccgccgtcggactcgtgggcgtggcgcaagtatgggcagaagcccatcaagggctccccctacccacggtacgtactcgtactcctatgcagctgctgcttctgctgaacctattaatcagcatctgcatgcaaactgttgctgccgattagcaccagtctgatgataaacctgcttcgcgcttctgtatgtcatgtgcagggggtactaccgctgcagcagctccaaggggtgcccagcgaggaagcaggtggagcgcagccacgcggaccccaccgcgctgcttgtcacctacaccttcgagcacaatcacgaggcgccgcagcccaagagcagcggccgcacctgctgccaccagcaaggcaagccgtccgc

SEQ ID NO: 3860 - DNA, 842 bp, Zea mays
  Clone ID: TF_ZmC554_6
attcggctcgagcgcgactcctcagcttcctcctctccttccttccttagctgtcccccttcccgcccccggccccgaccagatggagtgcacgtcggccgcagtcaccgccgccggcgccgccttccaccacgagccggccaggcgcatccgggaggagcgcaagcccaaggtgtcccggcgatacgtccacgccgacccctctgacctcagcctcgcggtgaaggacgggtaccaatggcgcaagtacgggcagaaggtgaccaaggacaacccctgcccgcgcgcctacttccggtgctccttcgcgccgtcgtgcccggtgaagaagaaggtgcagcgcagcgcggacgacaggaccatcctggtggccacgtacgagggcgaccacaaccacgcccagccgccgcggcacaacggcggcggcaacaaggccgcgacgaggtcgacgccagcggcgaccgaggccgcgcgaccggcgccgccactgccgctgcagcaccagcagcagcagaaacaagaggccgcgacggggccgtcgtcggaggtcgcgaggaagaacctcgccgagcatatggcggtcaccctcacgagggatcccgggttcaaggcggcgctagtcagcgcgctctccggccggatcctcgatctctccccgcccagggattaactaatacgtagacgagcatgatgattattcattgacgaactgttattagtccgtagacagaaaatttgttcacaagcatatatctcaaattttcaccaacccaagaagtgaatttgagctgcttactgcgaatatatgcatctcccgttcgaagttgctaattcaagcaaaa

SEQ ID NO: 3861 - DNA, 967 bp, Zea mays
  Clone ID: TF_ZmC2906_3
cggggcacaccaaactgaaaatgtagctgaaaaatcagcagaggatggctataattggcgcaaatatggacagaagcatgtcaagggaagtgaaaatcctagaagttattacaagtgcactcatcctaattgtgaagttaaaaagctattagagcgttcgcttgatggtcagattactgaagttgtttataaagggcatcataatcatcccaagccccaaccaaatagaaggttagctgctggtgcagttccttcaagccaggctgaagaaagatacgatggtgtggcacctattgaagacaaaccttcaaatatttattccaacctctgtaaccaagcacattcagctggcatggttgataatgttccgggtccagcaagtgatgatgatgttgatgctggaggtggaagaccctaccctggggatgactctaatgatgatgatgacttggactcaaaacgcaggaaaatggaatctgctggtatcgatgctgctttgatgggtaaaccaaatcgcgagccccgtgtcgttgtacaaactgttagtgaagttgatatcttggatgatgggtatcgctggcgcaaatatgggcagaaagtagtgaaaggaaatcccaacccacggagttactacaagtgcacacatacaggatgcccggtcaggaagcatgttgagagagcatcacatgacccgaagtcggtgatcacaacatatgaaggaaaacataaccatgaagtccctgtttccaggaatgcaagccatgagatgtccacagctcccatgaagcctgctgtgcatcctattaacagcaacatgccaggccttggtggcatgatgagagcatgtgatgccaggggccttcaccaatcaatattctcaggcagctgaaagtgacaccatcagtcttgacctttggtgtaggcatcagcccctacccacagcgatgcaacaaaccaaatgcagcct

SEQ ID NO: 3862 - DNA, 761 bp, Zea mays
  Clone ID: TF_LIB5117-056-Q2-PF1-B5
gcgcccaagttcaagtccgcgcagccgcccagcctgcccatctcgtcgcccttctcctgcttctccatccctgcgggcctcagccctgctgagctgctcgactcccccgttctcctcaactactcccatatcctggcgtctccgaccacaggtgcgatccctgcgcggaggtacgactggcaggcgagcgccgatctgaacacctttcagcaggatgagccctgccgaggagacagcggcctctttggcttctcctttcacgcagtgaagtccaacgccacggtcaacgctcaagcaaattgcttacctttattcaaggagcagcagcagcagcaacaacaacaagtggtagaagtgagcaacaagagcagcagcggcggcggcaacaacaagcaggttgaggacggatacaactggaggaagtacgggcagaagcaagttaaggggagcgagaacccgcggagctactacaagtgcacctacaacaattgctccatgaagaagaaagtggagcgctctctcgccgacggccgcatcacgcagattgtctacaagggcgcacacgaccacccgaagcccctctccacgcgccgcaactcctccggctgtgcggcggtcgtcgcggaggatcatgccaacggctcggagcactctgggccgacgccggagaattcatccgtcactttcggagacgatgagggcgaccacgggttgcagctcagtgatggcgctgagcccgtgacaagcgccggaaggagcat

SEQ ID NO: 3863 - DNA, 217 bp, Zea mays
  Clone ID: TF_700151333H1
aagtcgataaagtcgccgtcccgtcgagcaacaggtcgagcggcggcgggaacggtaatactaagctggagtacgggtacaactggcgcaagtacgcgcagaagtatgtgaaggggatcgagaatccgcgtacttattacaagtgcacgtatcatagctgctccatgaagtagaatgtggatacggccctgtccgacggccgcatcacgcagatcgt

SEQ ID NO: 3864 - DNA, 813 bp, Zea mays
  Clone ID: TF_ZmC346080_1
gaccctgggctgccggccagcccatagctttcccatctttccttcttcacctttcgaagagtgccccccttcgtttgtcgacgcgctccgactccatgccgctgtcgccgccgccgccctcctccagcccgaggcaagcagcgatccaggagctcaggaggggtacccagctggcggagctgctcaggcagcaggtagagctcatcccggagcctaaccgccgccacgctgcagcggtcaacgtgggcgagatatccatggctatggagtcgtcgctctccatcctccagtctcagatggagcaccccttctctgagcctgaggtcatggcggctgcgctcactgcccactccgacggaggcaccagcggggaaagaaatggcggtcccgtggcccgtacaaggaaggtgagggtgcggcaccggccaggcagaggcaggcctgcagctggagatgaactgccgatcaaggagatactgactgaggcaccagaaaatgatcgtttccactggaggaaatatggtgagaagaatatcctctattctgaatatccaaggttatactacaagtgcgggtacagcgacgaccacaagtgcccagcgaagaaatacgtgcagcagcaaagcaacagctaccctccgattttcttggtcaccctgatcaacgagcacacgtgcgacgccttgttccgagacgacgagcccatcatcagctcaagcagcagtggctcgtcgcaggtcctcgacttcacgaaggcgtcgctttcttctcctctccattgatgttggcggcggcgcggctgcaggggttggg

SEQ ID NO: 3865 - DNA, 622 bp, Zea mays
  Clone ID: TF_LIB4762-013-Q1-K1-E6
ttcggccggggcaccccttctctgagcccactgcccactacgacggaggcaccagcggggaaagaaatggtcccgttgcccgtacaaggaaggtgagggtgcggcaccggccaggcagaggcaggcctgcagctggagatgaactgccgatcaaggagatactgactgaggcaccagaaaatgatcgtttccactggaggaaatatggtgagaagaatatcctctattctgaatatccaaggttatactacaagtgcgggtacagcgacgaccacaggtgcccagcgaagaaatacgtgcagcagcaaagcaacagctaccctccgattttcttggtcaccctgatcaacgagcacacgtgcgacgccttgttccgagacgacgatcccatcatcagctcaagcagcagtggctcgtcgcaggtcctcgacttcacgaaggcgtcgctttcttctcctctccattgatgggcggcggcgcggctgcaggggttaattgaagaaatagagatgcatggaagaagacagatattcgtgttcggatgatgagtagtactagctagctaagctagtcgtcttcaattcgttgcccacgatgatgtcggcggcagatcgatggagct

SEQ ID NO: 3866 - DNA, 724 bp, Zea mays
  Clone ID: TF_ZmC734841_1
tacctcgaggccggccgggaggctgcttgttgggacttgggtatgggcttgcagtgctgtgcccgccctctctccttccttgttccttctttataaggagacgagcgagctcggcagagaggtacaacgcccaggacacgacagggcgctgcttgttgccgattgctagctggtaaagggtaggccggtgcgtctagctaccttggttggttgggtgccggaatttccatggaggtcgcggtcgtggaaagtcctcgtcctcctccgccgccgccgcaggccaaggaggagaagaggtccgacgccaccaagccagagatcgccgcatcgatggtaggaagcgctctcccaatagtcttcgaaagctttccgtcgacgcaaagagaagcggcggcggcgggcgtcaaacaggaggagcgcaggctggaggcggccagggcggagatgggcgaggtgagggaggagaacgagcgcctcaagtcgatgctgtcccgcatcgtcggccagtaccagtccctgcagacgcacttcctcgacgtcgtcaaggtgcgcgagctgccaatggcggaagtacgggcagaagatctccaaggggaacccgtgcccgcgcgcctactaccgctgcacggtggcgccgcactgcccggtgaggaagcaggtgcagcggtgcgcggaggacacgtcggtcctgatccccagtacgattgcgcgcacaaccacccgc

SEQ ID NO: 3867 - DNA, 229 bp, Zea mays
  Clone ID: TF_jC-zmXLIB3526P032bh01a1
ctgcggttgtgtttggtccgtggaccacgggcacgtagaggttgatgcttgcccttatgcgtggagatcaccgcgcgcgcacaaagaaaacgcgcgtacacgtgtttacgcaccgagcaccaggccgagacgcacttgtggtagatccgcctgatcagggtcacctacaagagcttttggctgtacttgcgccaccggaatctgtcgcccacaatgtatatgttgctca

SEQ ID NO: 3868 - DNA, 786 bp, Zea mays
  unsure (1)..(786): unsure at all n locations
  Clone ID: TF_LIB4759-038-Q1-K1-B11
ccggccgacggagcttgttgagagacccgctgaaaagctcaaaccctcctcacttccacgcctctctcctccctttcacacttagctccccatgtcttctggaggaggagaccaccatggcgtctaccaccagcagcacggccacggccacggccatctcgcccgcgctgacggcgccgagtacgcgttccacggcaacgacgacatggagagcttcttcttcaaccatccggcgtcggcgggcctcgacggaggaggcagcaggacgactggcgccgacgagctcctggcgccgtactccagcatcacggactacctgcaggggctcctggacccctccgggctagctcggcacctcgacgccccgctcaagcacgagctgtctgtcgacgcgagccacgacagccagggcaccagcggcgcgcccggcggtgaagcggcggcgatgcacacgccganactcgtcggtgtctctctcgtcgagcgaccgggacggggagggccagcagcctcgtcggtgcaagaagggcaggaccaacaaggcggaggacgcggagggggatgagaaagatcagcaggatgggggagaattccaccaaagcgaacaaatccaagaagaaggctgagaagaggcagaggcagccgcgcgttgccttcctcaccaagagcgagggtggatcaccttgaggacggctatcggtggcgcanatacggccagaagggcggtcaagaacagtccttacccaaggagctactaccggtgcactacgcccaagtgcggcgtga

SEQ ID NO: 3869 - DNA, 219 bp, Zea mays
  Clone ID: TF_LIB3236-084-P1-N1-B12
agcagtaaatttgcattatattagttaacactgatgatggccaggccacacacatcaatattcagaggagttgattagtgcaagactggagctgcgagaggagctggagctgtttgaggatggggctgagcgcctccatgagcttctcgcacgggtggttgtgcacgccctcgtacgtggtcaccactatgctcgtgtccttggccagccgctgcacct

SEQ ID NO: 3870 - DNA, 797 bp, Zea mays
  Clone ID: TF_LIB4740-138-A1-K1-A11
ggctaattcatgaccttccccggattactatgatttgtcttggttattgtgggagtttgtaattttcactagaaaacagttcagtttgtatacgaagtattggtctactactctcttaagttccataaatccctggttcagggaagatgcaacctcatgagaaggttgctgttctgaagcctgttgcctccaggcctttctccagcttctggcccttcccaaagtttctgcacgacttcaacgccacttgttccccaacaatcaccttcccacaggagactgagctaatcaggccaaaagccactcggttggcatcgctgccgggtgaccttccaacacatattgcagcaacgacagatgccgggtcggataccatgtctgaggaggtggaagggtatgcaaaacatcacacgtatcgtgaccatgcaacagcgtgccaagctgcgaggcggaatggtgagcgcagtcgcctgtcacttgacgggtacagctggaggaaatacgggcaaaagaaagtgaaaggcagcgagttcccgcggagctactacaagtgcactcaccctagctgccctgtgaagaggaaggtggagacgcaggttgctgagatcgtgtatagtggtgagcacaaccacctgaagccgggcaagccttgtcccccgaggaagccattgctgtcgacaagcacagatgctgtgatgtgtgacacgcatggtattgacgacatgacgccgccggagtagagacgaagacaccaggagttcagattcttcgttccagtacttaaatctagctaagct

SEQ ID NO: 3871 - DNA, 835 bp, Zea mays
  unsure (1)..(835): unsure at all n locations
  Clone ID: TF_LIB4977-067-Q1-K1-D11
cctcgaggccggccgggccgggagtatttctcatcaggtcgcccgtcggtgggcgcgggcacgtgacagcgatacgcccggaggccaagataatctttgcatcgttctcggtctcggttctggagagttttatatggccgcgaggtgtcaattattatggagttctctctcccgccccttctctcttcgtgatgctcatgctcctctgcttgccttgccctggtgtggtggtgtctagtcaagtacgcttccgaattaaaagcgctctggcctgcaacctgctgtctgctccgtcctcccacggccggccgcctgcccgcgtcttcttcgccacccctcttctccggtcccgcacctgcatttcttgaccccttcctccaccgcagccagacaatgtctccggcgccgagttcgcatcactcgcagatcaattcgaggaaggagaaacggatgaggaaggtggacaccttcgcgccgcacaacgatggccaccaatggaggaagtacggcgagaaaaagatcaacaacactaacttccccaggtattactacagatgcacgtacaaggacaacatgaactgcccggccacgaagcaggtgcagcagaaggaccacagcgacccgccattgtacgcggtcacgtactacaacgaccactcgtgcaacagcgccttcctcccgctctccccctccgagttccagctgcagacctcgtcctgcagcaccgagtgccacgacgcccttctcggctgncgccgccgccgtgcccggaggaggtggtagatgcaggcagatttggatctatcaggtcttccattttttgtaaatgatcact

SEQ ID NO: 3872 - DNA, 652 bp, Zea mays
  unsure (1)..(652): unsure at all n locations
  Clone ID: TF_ZmC300_23
gtgcggcgctcgagccggccgggccggctctctcccgccccttctctcttcgtgatgctcatgctcctctgcttgccttgccctggtgtggtggtgtctagtcaagtacgcttccgaattaaaagcgctctggcctgcaacctgctgtctgctccgtcctcccacggccggccgcctgcccgcgtcttcttcgccacccctcttctccggtcccgcacctgcatttcttgaccccttcctccaccgcagccaaacaatgtctccggcgccgagttcgcatcactcgcagatcaattcgaggaaggagaaacggatgaggaaggtggacaccttcgcgccgcacaacgatggccaccaatggaggaagtacggcgagaaaaagatcaacaacactaacttccccaggtattactacagatgcacgtacaaggacaacatgaactgcccggccacgaagcaggtgcagcagaaggaccacagcgacccgccattgtacgcggtcacgtactacaacgaccactcgtgcaacagcgccttcctcccgctctccccctccgagttccagctgcagacctcgtccgggaaggacgtctccatctgcttcgactcctcgtccgggaccngcggcgccgcgcggccgccaccaccaatg

SEQ ID NO: 3873 - DNA, 950 bp, Zea mays
  Clone ID: TF_ZmC332_2
gcgtcatcgtctcgctcgttcctttcgtctctgagcatggaaggaagtcttgcgagcttggatggaagccgggccagcaggccgttccagctagttagtggctctcagacatctagcacaccggagctgggcctggtgcaaaggagaaggtgcgctgggaaggaggatgggagtggtcagtgcgcaaccgggagccggtgccattgttcaaagaaaaggaagctaaggataaggaggtccatcaaagtccctgcagtaagcaacaaggttgcagacatcccagctgatgagttctcgtggaggaagtatgggcagaagccaatcaagggatccccacatcctaggggctactacaagtgtagcagcgtgagaggctgccccgcgaggaagcacgtcgagaggtgcgtggacgacccctcgatgctgatcgttacctacgagggtgaccacaaccacagccgagttctagcccagccagcctgatctctctggctatcgattattcaagatcgcttccgtagtagtcaccctccctctctagagaagggaggacagcaacagcaacaagaagagcctagtgtctgtacataagttctgcttctaacagttggaggagtgattcggttagctagctctttcagaagaatcggtggtgacagaagggaacttatcgatggatgggagaaagggagagagagagagagttcctcatcagatactcatactctatttttgtagcttcggtttatctctcttttttgttcatcctgtgctagggcccatcctgtgggtgcagtgtaacattgagctgcaattgtatgtctgggaatggtgttgggggggattggatcggagaagaaggcatgtggcaggaaattgcctgtaaaagtggctacacctaggaacagaatgggccatcgtcttcagcagtggtacagtcttgttgacgc

SEQ ID NO: 3874 - DNA, 1607 bp, Zea mays
  Clone ID: TF_ZmC91351_2
cccacgcgtccgctcgtccttgataagtgagcaagcggcaagaaccggcggggcgcccatgtcgtcgagagacttatacttccacgacgagctggcgtcgctgttcgcgcagcggccggcgccggccggagaggcgatgatgacgcaccagcaccagcagcagcaacaggcgccggcgtcgtggttcgcggactacctgcacgcgggcgccccaggcatggggatggactacgacctgctgtgccgcgcgctggacctgccgctgccgggggacgacgtcgtcaagagggaggaggagctgctgctggtggacacaggcggggacggaggaggcttcgccgcgcccacgcccacgcccagcgggggcggcacggcgccggtcacgcccaacaccacgtcgtccatgtcctcctcgtccagcgaggcggcgggcggcgccgccggaggaggaggaggaggaggaggaggaagggaggaggactcgccgcaggggaggtgcaagaaggaggaaggggatggggaggagagcaaggcgctcgacaagggggaggaagacgctgacaagggcaagaaagggtcagcggcggcaggcaagggcaagggcaagggcgagaagcggcagcggcagccgcggttcgcgttcttgaccaagagcgaggtcgaccaccttgaggacggctaccggtggcgcaagtacggccagaaggccgtcaagaacagcccataccccaggagctactaccggtgcacgacgcagaagtgccccgtgaagaagcgggtggagcggtcgtcccaggacccggcggtggtgatcaccacgtacgagggcaagcacacgcaccccatcccggtcacgctccgcggcagcacccacatcctcgccgcgcagctgcaccaccaccacaaccaccacctcggcgccttcccgacgccgctgccgcagacgggcgcggcgccgttcgggcgggcagcaggcggggcgaggcgtcatcgacatgctggggctcctgcccccgcgcaaccacggcatgagcggcggcccgatgagcgccgtggctggcgccgcgacgacgacggccgccaccattactactacctccaccacaccgtcgtctcccccctcgctccagatgcagcacttcatggcgcaggacttcgggctcctgcaggacatcatgctgccgtcctttccacggcggcggcggcggtaacatccagccctgaatcgatcccaattgctcaccgccatcgcaagcgcagcaagctaatgaggaaggaagctagctagataagagatagtagtttggttcttgttgatgcttaccctctttaatccttcgttttttttttcaccgacgacgatttactcctctagacgggaccgcgcgcgtgccatgcatatcggtccttgatttgcctttccgcctgcagctgtactggcgccggcaggcctggtctcgtaacgtttcttaattatgcatgatgatctagctagtccttgcaggtagtactagccgttcttgtacatgtacctaattaatcaactcccccgccggctcgtcctggccatgagctatgataattttatgctagctcctctttgcatt

SEQ ID NO: 3875 - DNA, 3254 bp, Zea mays
  unsure (1)..(3254): unsure at all n locations
  Clone ID: TF_ZmC9869_1
aaacgaagttccatcgccctacctcacgatcccgcctggcctgagcccagcaacgctgctggagtcaccagtcttcgtttctaattccatggtatgtgctcttctctaggttatgatagggtgtggacgcgttaccagaatcagtattgctttcgtctatggatgctaaactggcagttcaagaatgcttgctttaataagcttttgacctctccagggagttcgtgaaagctctacttcagttccatgatgatcagttctgccttgttttgtagcatccagtctcttctttccaaacaggcttctgtttgttttctcaaaagcagaaaaatagtatcgtaccattcaaatatttcaaagttttcttgaaagcaggaatatgatgatcaatctctgttctttccatagttatgtggcaatgtatgcccccacacttcaggtccaaacttcccccttatgtactacttggaactccaatataatagctgttaatgttgtcaaagctgcataggaatttcatgtgtttgctctcttcatattcatatctgtattttgaatcatcatgttatttcatatgtaaattaactaaggaggtatcaactaggacaattattttaataaactccgatactgaagctatttcgtacctgacagcaatgttttttgtttccttgcaattcttcagggccaggcctcgccaaccacggggacgctattcatgtttggtagcacaaatgacaatgatcctattagatttggaggtggtcctccttcagttggagatggccctaatgcttttcctttcaagcccttagatctgaaatcctcacactacactgctgaagcaatgaaggttagcaacatttgaatagttcataggttattcctgcgacgcttgcgtggtaatgattgaaggtaacatttgaatacttcataggttattcatgataacatttgcttgtgcgctaatggtaaaaggatctcttaacttagaaagtattcgtataaacgtgcagtttgcagtgatgtttgtttctgaaattttgccccgagtctagatgagaaatcggttaaatccaaatggttttgctctgtaagtcttttatctgttgcactacctgtaacagactagtttgtctttttggaatggttgaggcttgaagcacatttgtctattctctgagtgttagtgacacaaagtggctgttttgctgcatattgttcatactaattggagaaagaccagagaccagctagtgttagatagtttagaagttcaataaaaataattctcactggcaactaaacaacaggttagtcttccttgagttccaactaaacatataagaacatcgttctaattgtacatttcaaaatgtcaatgaacatttttttttctattcatgatccaataccttttgataccatttccttacgagttagttcataattgctccgtcaggaacaaaatacgaagtcttctgtcaagactgaaaccaagattctgacagtacaagaggctagtttgctgagccaactgaaccagctgaatcacaattcgcagatcattattgatagtggcggtcctcatgaccccaagctcagccgtcctgcatctggcgccggtgcaggcaatgaacacatatcacccccggatcacggacagacagctgaggaaactgatgcgagggaagactacccggcaatggctattaccacgccagcagaggacgggtacagctggaggaagtacggacagaagcaggtgaagcacagcgagtacccgcgtagctacttcaagtgcacgcatcccaactgcctggtgaagaagaaggtcgagcgctcgcacgaggggcacatcacggagatcatctacaagggcgcgcacaaccacccgaagcccacgcagagccgccgtccaggcgtccagcccgtgcacccgtttggcgacagtgcgcaggcggacgcagccgacaacctggggtcacaggcaaacgcagtggacgccaaccagccgaggcgtgcgggtgttcaggatggcatggacgcgacgtcgtcgccctcagttcccattgagcgctgtgactcgccggcctcgatgcaggtcgactcggcagcccggtttggatcccccgagggcgcggatgtgacgtctgtgtccgacgaggtgggcggggacgacagggtgactcgtggcagtatgtctcagggcggtgccgacgcggagggtgacgagctggaatgtaaacgaaggaagctggagtcgtacgccatcgatatgagcaccgcgtcgagagctgttcgcgagcctcgcgtggtgatccagacgacgagcgaggtggacatcctagatgacggctaccgctggcgcaagtacggccagaaggtcgtcaagggcaacccgaatccaaggagctactacaagtgcacgtacccgggctgcgtggtgcggaagcacgtggagcgcgcgtcgcacgacctcaagtccgtgatcaccacgtacgagggcaggcacaaccacgaggtccccgccgccaggaacagcggccacccgggcaccgcggcggcgacaggcgcgggtggcccgcgcaggctggagcacccgtcgctgcgcgacggcctgatggggcacttgggcggctgcggcgtgccgttcggcctgccgccgcctagggatccgctggcgccgatgggcaattacccgacgtatgcctcctccattccccttggcggcgccggccccacgtcactgccgagcctgccggtgccggcggggaccctcagcgccgtcgatgggctgaagctcccgatgctggcgccgtcgtccctgcagcagcacccgctgctgaggcaccggcaggcgatgcaggccgctggcctcgtggcgcccaaggacgacgtgaaggtcgagggcaacgttgccggcggcgctgccccgtcggtgtaccagcagatgatgtgcagcgggctgcggttgcgccagcagatgtagatacataaataaatgtggagaggattagtgattctcaagttattagtttcttaccagtcgtattaggatgagttcgtgataattgttataacgtgggaacaaacacccgttgctttctgtttttttttcacccttccacttcatttttagctcagcaactatttatttatttactgcccctcttcattgaggtttggtcgaaaaaaaaaaaaaaaaaaaaaaaaaaaaaaaaaanaagggcggcccccggaaaagtgagctc

SEQ ID NO: 3876 - DNA, 838 bp, Zea mays
  unsure (1)..(838): unsure at all n locations
  Clone ID: TF_ZmC56014_1
cctcgaggccggccgggaccgttcgatccgagtgtcctgcagagcccatcctgttcctgtccccctcgagcaatcgagctcagctgcacgctcgcttacgcggagacacagacgctgagacacacgcaggtcatgatgctgctcatggactcggggagccgcggtgactgctccccggtctgcttggacctcagcgtcggcctttcgccgccgtcgccggggagcggcccggaaacgacagctgacgctgagagactcgaccgtcccgccactggctgctgggggccacggacatcgtccctcgctgacgggcaggacgaggccaagaccctggaggccaggctcacccaggtcagcgaggagaaccggcgtctcaccgagatcatcgcctacatgtacgccagccaggtcgccgcgcggcggagtcccgacggcaggaagaggagcagggacagcctggagccgtcgaattcgggcgacgccaacgctgccgtcgagagcgccgccctcagcgacgagggcacgtgcaggcggatcaagctcaccagggtctgcaccaagatcgacccctccgacaccacgctcaccgtcaaagacggctaccagtggcgcaagtacggccagaaggtgacgcgcgacaacccgtccccgagagcctacttccgctgcgcatacgcaccatcctgccccgtcaagaagaaggtgcagaggagcgcggaggacagcgccatgctggtggccacgtacgagggcgagcacaaccacccgagcccgacgcgcgccggcgagctccccagcttcacctccatcaactcctccggcccggncatcacgctgg

SEQ ID NO: 3877 - DNA, 1734 bp, Zea mays
  Clone ID: TF_ZmC554_3
agcccggaattcggctcgagctcagctcaaacatccctactctcctgctcctcttcttcctcctcctctcgctctcaagcgcgtcttcactccggcctagctcggacggatcgacatcgaggggaaagggaataagtgggggcgccagcagatggatccatggatcagcagccagccttctctgagccttgacctgcgcgtcggcctgccgccgctcagcctccaccaggcgccggtggccgtcgccttggccaggcccaaggtgctcgtcgaggagaacttcctgctgcctcccaagaaagaaccagaggtggcggccgctctcgagtcggagctacggcggatgagcgaggagaaccggcgcctggcggaggcgctggccgcggtggtctccaagtacgaggcgctgcgcagccagcacacggagatggtggccgcgtcgtccgcgtcggagggcgggtccgtgtcgccgtcgcggaagcgcaagagcgagagcgcggacacggcgccggtgcagcgccttcaccagcagcacgcggcggcggacctgtcggagtgcacctccggcggcgagccgccgtgcaagcgcgtcgtgcgtgaccgggcggaggaggtggaggaggaggaggagtgcaggcccagggtgtcgaagctgtacgtgcgcgccgacccggccgacctgagcctggcggtgagggacgggtaccagtggcgcaagtacgggcagaaggtgaccaaggacaacccctgcccgcgggcctacttccgctgctccttcgccccggcctgccccgtcaagaagaaggtgcagcgcagcgcccacgacgcctccgtcctcgtggccacgtacgagggcgaccacacccacggcccgcccccctcgggctcgggctcgggttcgggcgccagcagcaagaacgccgcgaagccgccgtcgccgccgcgccgccaggaggctgctgtcgcggtgactgcggccgcggcggcgtcggagatggtccggcgccgaacctggcggagcagatggcggtgacgctggcgcgggaccccagcttcaaggcggcgctcgtgtccgcgctgtcaggccggatcctcgagctgtcgccgaccaaggactgacggaccgcagacggatcggatcgagcggcgtgacacgagattctcgcctcagggctcagggtgtcttcgcacgcacgcggcaatggtcggccgaacaggagacgaggatctgcagcccagcaccagggacgagcagaccggggctgctcgcgcggccggacatggcgtggaccggtgtccagactccggagatcgtcatgccgacgacgtaacatgcgaaacgctactagtacaagaaacaacatccaagtgtacaatcccctgtactttgtagtcttgtttaggcaaactgttctctgtccatccaatcgatgaaacgagaacgttacaaattttttttactccgttcgataagatggcaatgggtacccgctacccaaaacccggtgggtttttgctttattaggggataagtttggatcaatttctccacccctcggtttgttaatgggttcaaatagaaacccaacgggtacatgggcatgggtttgttcttcccctacccatacccgcaaaccatgggaaaaaaaaaaaaaaaaaaaaaaaaaaaaaaaaaaaaaaaaatttttttaaaacccccccaccccccccacggcggccgtcgcgattctagaa

SEQ ID NO: 3878 - DNA, 518 bp, Zea mays
  Clone ID: TF_LIB3606-048-Q1-N6-A9
gacgctaactttgacatgtttttccctcagcaatatcaacaaatcaaacaataggcatgtattcttttttttgaacgaaaaaaaggcatatatcttcggatgcttgtagatgtcaaatcacaaggggaaaaagcaaggagcagctggaaccaggaaagaacagcggtgatctctcgggcaaaatgctcgactaaggaacctcgtgcgctgcggcagtggcggtgacgtagtaggcgacggtgatcccgccgtggacgaagcacatgatccctccgagggccaaggtgtgtccgtgagtgaacccgcacgacgtcttggacttggagttgggcaaagcgaggtcacctgcaccggcaagaggaaggccgctggcggagcgggcaaaagggccgccgcgtgtcggaggagagcccagccatcgtcggttgtgacgaaaagcgtgagggatctggaggacggacacgcgtggcgcaagtacgggcagaaggagatccagaactgcaagcacccaaaggcct

SEQ ID NO: 3879 - DNA, 1347 bp, Zea mays
  Clone ID: TF_ZmC740_1
tgattcaattctcctcaatcaaagaacgtgcccacgcccgtccgaaaaaaactaatagaaaaaataaaaagaatccattgactcgcagcttcccctgctcctgctctcaccatttccacctataaagtcggccgcagcctcctgcgcgacaaacacctcccaacccaatctcctcactctcagagagagccccaagccaagatctgcgcgggcaagtcaccaggcgaagcaccggctcccatggccgtggacctgatgggctgctacgccccgcgccgcgccaacgaccagctcgccatccaggaggcggcggcggccgggctccgcaacctggagctgctggtgacgtccctgtccacgcaggccgccgcgccgcacagggccgctgatcagccgttcggcgagatcgccggccaggccgtctccaagttccgcaaggtcatctccatcctcgaccgcacggggcacgcccgcttccgccgcgggcccgtcgagccgccgccgccgacgccgcctcctgtcgtccccggtcctgcccctggcgcccgtcagcgtggcgcagccgccgcagagcctgacgctggacttcacgaagccgaacctggccgtgtcggccgccacgtccgtcacctccacgtccttcttctcgtcggtcacggccggcgagggcagcgtctccaagggccggagcctcatgtcctccgggaagccgccgctgtccggccacaagcggaagccctgcgccggcgcccactccgaggccaccaccaacggcagccggtgccactgctccaagagaaggaagaaccgcgtgaagaggaccatcagagtgccggcgatcagctcgaaggtcgccgacatcccgccggacgagtactcgtggaggaagtacggccagaagcccatcaagggctccccttacccacggggctactacaagtgcagcactgtgcggggatgcccggcgaggaagcacgtggagcgggccaccgacgacccggccatgctggtggtgacgtacgagggcgagcaccgccacacgccgggcgcggtccaggggccgagccccctggcgaccgcgtcgccggtgcccgtcgccgtctccgccggcaacgggctcgttgtctagtctactaaaagctaggattagcttctcgtcttctttgtttttttttgtttgagctgatgtccgtgtaaaacaaggaagaaggttgtagaaagagggagaggaggacaccggaatttcgatgccgcaaaactcaaacctttgtgtcgtgtcctaaaaaaaaaaaaaaaaaaaaagcaccgcctcacgccgggcgcgcccgcgcccgcgcccagccccct

SEQ ID NO: 3880 - DNA, 1039 bp, Zea mays
  Clone ID: TF_ZmC1382_1
cggggggcctcgagaccggccgggattattcaggcaggcgcattgactgatacacatatatacaacaagcaaggcggctagctacagcggctagtgcgcgcgtggtgcaggcgcatctagctactacctggtgcttgttgtgcatacaatggcgacttcgctgggactgaaccctgaagatctcttcacttcgtactcgtcttcctactactcctcgccgccgttcatgtccgactacgcggcgagcttcacgccggcggccggggactccacggccttctcctcggagctcgacgaccttcaccacttcgactactcaccggcgccgatcgtcactgctgccggagccggggctgggggcggcgatcgcaacgagaagatgatgtggtgtgagggtggtggtgacgagagaagactcagaagcaacggaaggatcgggttcagaacgaggtcagaggtggagatcttggacgacggattcaagtggaggaagtacgggaagaaggccgtcaagaacagcccaaatccaaggaactactaccgctgctcgtcggagggctgcggcgtgaagaagcgggtggagagggaccgcgacgacccccgctacgtcatcaccacctacgacggcgtccacaaccacgccagccccggagccgctgctatcatcgtcccgtacggcagcggcggcggcaatagcggcttctacagcccgccgcacagcggctccccgtcggccacctcctactcgggctccctagccttctgacttttccgggccttgacccatagttacctttacactccagtcgtcggataagaagaatgttcagcggctggctaaacagtctcaactgctgcagctattcaaattagtgttggagatgcaatttatagagataaaatactctagaagctatcgctgtagccggattaaattctgacctacttgtatagttttacacttacacagtgcaagtaataatatttaagggaagcagagagcactctaagcggctacctctcaaaaaaaaaaaaaaaa

SEQ ID NO: 3881 - DNA, 1118 bp, Zea mays
  Clone ID: TF_ZmC713262_1
actgctcatatatccgcctcccctcgccctccctctctctctctctctcactcacaaacaaacaaacaaacaagcctggatcgagcgaattcagccgagcttcagaaacccttgcaagctcgtagcaacttctctcaaccttattcggctttcttctagctatataacgaccctaaattagtctgcttcattcggttcttgcgaattgccaagaccgaaagaacagcttattactcttctgttagaaagactcgaagaggccggccgagatagactatcagctagctagagggagctaactacctacctagctagccatgtgtgactacttcctgcaaaggatggatcagggcgaccaccaccaccaccaccaggccggagacctcacggacgtcgtccgagccggcggcggcgcgatgcatcaggcagctgtcgcggagctctcctccgcggacacggggtggcagctcccggccgagccagcagctggagcaagcctcttcccgccaccccagccctcgtcgtcggactgcgacggcttcgcggacgcgttcgccggcctcccggacccgtttgccagcgactttcgcacctcctcctcctcctccggcgtgggccttggccctgccgacttcttcgacttcgaggcgcctgctgctgctgctgctgccggtggcggcgctcgaagaggcggaggcgtactggcgggcgcgcagatgcccgcgctgtcgccgagagagatacggccgtacccggtgacgatgggcggcgacaccgtgaagatcggcgcgccgacgatgatgcccgggctggccgttgggccgccctgctgtgcgttcgacgctgtcgccgggatgcagatgccgagcgcgcacgcgcacggtgaggggatgaagcgcaagaaaaaccaggcaaggaaggtggtctgcatcccagctcctgcaccatgatcgggaggaggaaggaccactggggagggtgttcgttctgatctctgggcttggaggaagtatggacagaagcctattaaaggagcacgctacccaagagggggctacagatgcagcagctctaaaggatggccggcgcggaagcaagtggagcgcaagcgaaccgac

SEQ ID NO: 3882 - DNA, 461 bp, Zea mays
  Clone ID: TF_LIB3732-003-Q1-N6-E5
gggggatcaaaattccggggtccccctttccctttttttacaacctttttccttgttttacccgggcattagctcaaacaaaaaaaaaacaaagaagacgggaagcttatccttgcttttagtaaactaaacaacgagccccttgccgggggaaacggggacgggcaccggcaacccggtccccagggggcttggcccctggaccccccccggggtgggggggggctcccccttttacgtaaccaccaaaatggccgggtcggcgggggccccctccacgtgctttcttgccgggcatccccgcacagggctggacttgtagaacccccgggggtaaggggagcccttgatgggcttttggccgtacttcctccacaagaactcttccggggggatgtcggggaccttcgagctgatccccggcactttgatgctccttttcacgcgggttttcctttttt

SEQ ID NO: 3883 - DNA, 763 bp, Zea mays
  Clone ID: TF_ZmC240676_1
cggcaagaagtccgtcaagaacagccccaccccgggcgacggctaccagtgctccacgtacggcaagaagtccgtcaagaacagccccaacccaaggaactactaccggtgctcgacggaagggtgcaacgtgaagaagcgggtggagcgggacaaggacgaccccagctacgtggtgacgacgtacgaggggatgcacaaccacgtcagccccagtacggtgtactacgccagccaggacgccgcctccggccgcttcttcgtcgccggcacgcagccgccgggctccctcaactgatccccggcggcccatcgcgacgtacggtccgctccaccgcaccaatctggtttcgactcccagatggcagctagctagtcggcggtatacactagtagtagtaggataggccggccgacacccccgataggtgatcggctggtgggtcggtttcccgaggtggatttctcgtttgggtttctagcacacccctccgctcctccctcttttccccgtccttttcctgctccgatcatggaaagggccggcggctggctggctggctggctgttgcgatcgaatagtatgtagtggtggtggtgctgctgttcatgctgggttccaagagaggtttaatttcccattgccttgagctcagctaaattattagtccgggacggaaatgtagcatatactgcattgaccgtgtaataagatgtacagaagctgtcccaacgttggacacaagatacttagattatatct

SEQ ID NO: 3884 - DNA, 478 bp, Zea mays
  Clone ID: TF_LIB4185-024-R1-K1-A8
cccctccccccccccccccccccccccttttggagttttggggcatcaaaattccggggtcctcctttccctttttttacaacctttttccttgttttacccggacatcagctcaaacaaaaaaaaaccaaagaagacgagaagctaatcctagtttttagaaaactaaacaacgaccccgttgccgggggaaacgggaacgggcaccggggaacgcggtcgccagggggctcggcccctgaaccgggcccggggggggggggggctcgccctcgtacgtaaccaccagaatggccgggtcgtcgggggcccgctccacgggcttcctcgccgggcatccccgcacagggctgcacttgtagtacccccgggggaaaggggagcccttgatgggctttgggccgtacttcctccacgagaactcgtccggggggatgtcggcgacctttaagctgatcgccggcactttgatgctcct

SEQ ID NO: 3885 - DNA, 1528 bp, Zea mays
  Clone ID: TF_ZmC1136_4
gcggcggcagcaccaagcttgaggacgggtacaactggcgcaagtacgggcagaagcaggtgaaggggagcgagaacccgcgcagctactacaagtgcacgtaccacagctgctccatgaagaagaaggtggagcggtccctggccgacgggcgcgtcacgcagatcgtgtacaagggcgcgcacaaccacccaaagccgctgtccacgcgccgcaactcctccggcggcgtggcggcggcggaggagcaggccgccaacaacagcagcctctctggctgcggcggcccggagcactccggcggcgccaccgccgagaactcgtccgtcaccttcggcgacgacgaggcggagaacgggtcgcagcggagcggcggtgacgagcccgacgccaagcgctggtacgtgtgatgatctcaccagatcgattcgctgctcctccgatccttcacgagttgaggcgcgcggcgccgtgtgtttcctgtgttcgtggaagtggaactcatatatacaccaccatgtatgtccgctttattattgatcaggaaggcggaggacggtgagaacgagggctgctcaggcgccggcggcggcaagccggtgcgcgagccgcggctggtggtgcagacgctgagcgacatcgacatcctggacgacgggttccggtggcgcaagtacgggcagaaggtggtgaaggggaacccgaacccgcggagctactacaagtgcaccacggcggggtgccccgtgcggaagcacgtggagcgcgcgtgccacgacgcgcgcgccgtgatcaccacgtacgagggcaagcacaaccacgacgtgcccgccggccgcggcgccgccagccgcgctctaccggcccgcgccgccgaccgcggacaccgccggccaccactacctcgccgcggctcggccgggcgtggcctaccagacggggcagcagtacgggttcggtgaccagctgggctcgttcggcctcagcggcgccccggcgcagagcggcggcggcggcttcgcgttctcctccggcttcgacaacccgatgggctcgtacatgagccagcaccagcagcagcagaggcagaacgacgccatgcacgcgtcgagggccaaggaggagccccgggaggacatgtttttcccgacgtcgttgctgtacactgactgaaggacaaggacggcaggacatggcgtggtgtggtgtccataaactgttcctttggcacacggattgttgttgttgttgttgttgttgttgtatctaggataggttgaacagatttctttatttgtttggaggcctccatgttggcagtggcagatgcttgccgtgccgcaggggtgtctcccttaacacgtgaaaggggggaaagaaagggatttaggatactagagtctaggacacgtggcaattacacagaaggggtaaagaagttttgttcctcaaagacaaattcacacatgagacttgttgtagtcaggattggacataatttcatgtcacagaacatttgttaagattc

SEQ ID NO: 3886 - DNA, 412 bp, Zea mays
  Clone ID: TF_LIB3245-516-P1-K1-C4
agcgccgagcctgccgagcgctgaaccgccgagcgccgcctgcgtgagcggcatcacgagcatcaacaacaccgcctgcggtggcaacaacgccgcgtcggctatggcgccgccaccggccaaacctgcactgcacgagccgccgcagctgcccaggagcgcagcgtcagcgaacaagacttcagagaagcggcagagagttccttccgcatacaaccgtttcatcaaagatgagatccagcgcatcaaggccagcaatcccgacatcactcacagggaagctttcagcgcggctgccaagaattgggcccatttcccacacatccatttcggcctcatgcccgatcagggtctgaagaagcaccccatgcaaactcaggagggagctgaatgcatgcttttcaaggacggg

SEQ ID NO: 3887 - DNA, 690 bp, Zea mays
  Clone ID: TF_ZmC32886_2
cccggggccacggcaatgcatgccggccgcctcgttggcagcaggaagagggaagagggagacgaccctgatggtttttgttctcgttcagtcgtcgttcgctgaggaagagagagagagagaggcagatcatgctatagtgacgtgtcgctgagctagctaggtagcttctgatcatatgcatcgatctgacgtctcccttttgcttttcttttttctgctggctctctccctcggggaatacgattgcagggacgaaatccaacgcatcaaggctggcaatcccaacatctcgcacagggaggccttcagcgcggcggccaagaactgggcgcactttccacatatccactttggactcatgccggatcaccaggggctcaagacgacaagcctgctacctcaggatcaccagagaaaggacgggcttcttaaggaagggctctacgcggcggcggcggcggccgcagctcatgcggcagccaacatggggattgctccatactaattaatttacaattactcctcctcaagcttgctactgatggtaccttgcttccgagaatctccctgatctttacattagcttgttaaacgttccaaatcacgtacgcatctgctgtgtaaacctgttccttcgatcgagctggtctctagtatatataatctactacgtttttgcgttggtta

SEQ ID NO: 3888 - DNA, 840 bp, Zea mays
  Clone ID: TF_LIB4740-008-R1-K1-D11
cccccgaggttggccgagagaggaaattgggctcacgccctccctaatccttcctatatagggcacaggagacatcgtcttgctcatccatatcgcttgctggctttgctttcttccttcctccctctagatctcgccttacaacaacgacgaacagcgggtacgtacttggagatccaagaagctaagaaatgtcagcccagtttgcatccgagcatgcttgctatgtcaactgcaactattgcaacactatcctgggggtgaatgtgccaagcagttgttcctacaacgtggtgactgttaaatgtgggcattgtacaatggtgctgtccatggatctcagtcccttccatcagcaggcacgcactgtcccagacaaccaggttgtccagaacagagggtttcaatataacaatttcgggagctacgagcaagcctcgtcaagaaatctacgaacgcctcccatgtatccagtgtcaaacaatctgccacaagtgccaccaatacgaccctcagagaagagacagcgtgttccatcagcatacaacagattcatcaaggaagaaatacaaaggataaagacgagcaacccagagattagccacagggaagcattcagtgctgcagcaaagaattgggctcatctccctcggctccatttcggcctcagcgtcgctgacggcggcggcggcagcaactagggaagacgatgattacggatcgagctcttcgccttacacatatatatatgcagtgtgctatgtcgtgcttggattttgaagccttattaagtgttttgacaacctgtgttttcagacctggtgcgtacttgcatgcatg

SEQ ID NO: 3889 - DNA, 1282 bp, Zea mays
  Clone ID: TF_ZmC31888_1
cattgggtacctcgaggccggccgggaagcatctcaatccaaaccagacaagcaaggaatcccccgatggatcatcgcgttctcctcctcctctctctcgcgtcggccgcgcgcgagttgccgccgccgtcgacgcggaggacccgctgatccgacagtgtgtttccctggtggatatgacaacgatctggagatgaacgcggagtcccgcttcctgagcttcgtgctagcgcgtcggggagtgctacaaggacgccgacgagcacgcggaccggctgtccgttttcaaggtcaacctgcgccgcgcgcggccccgaaaaaacctctttcaattcaaccatagacgacgacgaagacagtccattgggtacctcgaggccggccgggatcatatcgcttgctggctttgctttcttccttcctccctctagatctcgccttcacaacgacgagcggcgggtacgtacttggagatccaagaagctaagaaatgtcagcccagtttgcatccgagcatgcttgctatgtcaactgcaactattgcaacactatcctggtggtgaatgtgccaagcagttgttcctacaacgtggtgactgttaaatgtgggcattgtacaatggtgctgtccatggatctcagtcccttccatcagcaggcacgcactgtcccagacaaccaggttgtccagaacagagggtttcaatataacaatttcgggagctacgagcaagcctcgtcaagaaatctacgaacgcctcccatgtatccagtgtcaaacaatctgccacaagtgccaccaatacgaccctcagagaagagacagcgtgttccatcagcatacaacagattcatcaaggaagaaatacaaaggataaagacgagcaacccagagattagccacagggaagcattcagtgctgcagcaaagaattgggctcatctccctcggctccatttcggcctcagcgtcgctgacggcggcggcggcagcaactagggaagacgatgattacggatcgagctcttcgccttacacatatatatatgcagtgtgctatgtcgtgcttggattttgtaagccttattaagttttttgacaacctgtgttttcagacctgttgcgtacttgcatgcatgaatcctgcattgcgtgcagtaattaacatgtttgatgctatatatgatatatgcatgcatggtgtacaacattactaaataaatggaaaatatttgttcaaaaaaaaaaaaaaaaaagcggccaacattaaaaagcgcgccc

SEQ ID NO: 3890 - DNA, 996 bp, Zea mays
  Clone ID: TF_ZmC31888_2
cattgggaccctcgaggccggccgggtcgaatttatgccccgcttggccgcgcccttgtcgcatggttaaaaaaaaaaaaaaaaaaaaaaaaaaagacatcctctctctctctcttcctggccggtcgatccttctgttttgttttcctccacaaacctctttcaattccaccatagacgacgacgaagacagcgccgataagatctcgccttcacaacgacgagcggagggtacgtacttggagatccaagaagctaagaaatgtcagcccagtttgcatccgagcatgcttgctatgtcaactgcaactattgcaacactatcctggtggtgaatgtgccaagcagttgttcctacaacgtggtgactgttaaatgtgggcattgtacaatggtgctgtccatggatctcagtcccttccatcagcaggcacgcactgtcccagacaaccaggttgtccagaacagagggtttcaatataacaatttcgggagctacgagcaagcctcgtcaagaaatctacgaacgcctcccatgtatccagtgtcaaacaatctgccacaagtgccaccaatacgaccctcagagaagagacagcgtgttccatcagcatacaacagattcatcaaggaagaaatacaaaggataaagacgagcaacccagagattagccacagggaagcattcagtgctgcagcaaagaattgggctcatctccctcggctccatttcggcctcagcgtcgctgacggcggcggcggcagcaactagggaagacgatgattacggatcgagctcttcgccttacacatatatatatgcagtgtgctatgtcgtgcttggattttgtaagccttattaagttttttgacaacctgtgttttcagacctgttgcgtacttgcatgcatgaatcctgcattgcgtgcagtaattaacatgtttgatgctatatatgatatatgcatgcatggtgtacaacattactaaataaat

SEQ ID NO: 3891 - DNA, 974 bp, Zea mays
  Clone ID: TF_ZmC31888_3
gggtacctcgaggccggccggggtcacaccaatcttgcccattggttgctgtagcctgtggcttggtctttccacctcttgcacactagatcagctgcactgtcctcccacaagacaactcaccagacacctttcctcctcccccctgaccccggcccattcagatctcgccttcacaacaacgacgaacggcggctacgtacttggagatccaagaagctaagaaatgtcagcccagtttgcatccgagcatgcttgctatgtcaactgcaactattgcaacactatcctggtggtgaatgtgccaagcagttgttcctacaacgtggtgactgttaaatgtgggcattgtacgatggtgctgtccatggatctcagtcccttccatcagcaggcacgcactgtcccagacaaccaggttgtccagaacagagggtttcaatataacaatttcgggagctacgagcaagcctcgtcaagaaatctacgaacgcctgccatgtatccagtgtcaaacaatcagccacaagtgccaccaatacgaccctcagagaagagacagcgtgttccatcagcatacaacagattcatcaaggaagaaatacaaaggataaagacgagcaacccagagattagccacagggaagcattcagtgctgcagcaaagaattgggctcatctccctcggctccatttcggcctcagcgtcgctgatggcggcggcggcagcaactagggaagacgatgattacggatcgagctcttcgccttacacatatatatttatgcagtgtgctatgtcgtgcttggattttgtaagccttattaagttttttgacaacctgtgttttcagactgttgcgtacttgcatgcatgaatcctgcattgtgtgccataattacatgctgatgctatatatgatatatgcatgcatggtgtacacattactaaataaatggaaatattttgcccc

SEQ ID NO: 3892 - DNA, 883 bp, Zea mays
  Clone ID: TF_ZmC31888_4
gttatccttctgttttgttttcctccacaatcctccgagaaggtcagaggaacggccgctacacgccctccctaatccttccatttatagggcacaggagacatcgtcttgctcatccatatcgcttgctggctttgctttcttccttcctccctctagatctcgccttcacaacaacgacgaacagcgggtacgtacttggagatccaagaagctaagaaatgtcagcccagtttgcatccgagcatgcttgctatgtcaactgcaactattgcaacactatcctggtggtgaatgtgccaagcagttgttcctacaacgtggtgactgttaaatgtgggcattgtacgatggtgctgtccatggatctcagtcccttccatcagcaggcacgcactgtcccagacaaccaggttgtccagaacagagggtttcaatataacaatttcgggagctacgagcaagcctcgtcaagaaatctacgaacgcctgccatgtatccagtgtcaaacaatcagccacaagtgccaccaatacgaccctcagagaagagacagcgtgttccatcagcatacaacagattcatcaaggaagaaatacaaaggataaagacgagcaacccagagattagccacagggaagcattcagtgctgcagcaaagaattgggctcatctccctcggctccatttcggcctcagcgtcgctgatggcggcggcggcagcaactagggaagacgatgattacggatcgagctcttcgccttacacatatatatttatgcagtgtgctatgtcgtgcttggaatttgtaagccttattaagtttttgacaacctgtgtataaaaaacccgtgcgtacttgcatgcatgaatcctgcatt

SEQ ID NO: 3893 - DNA, 779 bp, Zea mays
  unsure (1)..(779): unsure at all n locations
  Clone ID: TF_ZmC31888_5
actcaccanacacctttcctcctcccccctgaccccggcccattcaggttattatcctctctctctctcttctttcttggtatccttctgttttgttttcctccacaaacctctttcaattcaaccatagacgacgacgaagacagcgccgagaagatctcgccttcacaacaacgacgaacagcgggtacgtacttggagatccaagaagctaagaaatgtcagcccagtttgcatccgagcatgcttgctatgtcaactgcaactattgcaacactatcctggtggtgaatgtgccaagcagttgttcctacaacgtggtgactgttaaatgtgggcattgtacaatggtgctgtccatggatctcagtcccttccatcagcaggcacgcactgtcccagacaaccaggttgtccagaacagagggtttcagtataacaattttgggagctacgagcaagcctcgtcaagaaatctacgaacgcctcccatgtatccagtgtcaaacaatcagccacaagtgccaccaatacgaccctcagagaagagacagcgtgttccatcagcatacaacagattcatcaaggaagaaatacaaaggataaagacgagcaacccagagattagccacagggaagcattcagtgctgcagcaaagaattgggctcatctccctcggctccatttcggcctcagcgtcgctgacggcggcggcggcagcaactagggaagacgatgattacggatcgagctcttcggcttaacatatatatatgca

SEQ ID NO: 3894 - DNA, 897 bp, Zea mays
  unsure (1)..(897): unsure at all n locations
  Clone ID: TF_ZmC7254_10
ctcagcacgctcctcttctgctaccttgctttccctgctgcgatccgttccttgccctattagtattagctacgcggccggccggatcgacgatcgagcaaggagaggcgccccagcagtcctcgtcggatcgatccatctcgtcgacagcgtcagcgcctcaggtggatcggagcggaggtggtggaccgggagctagtagctgccacacatttcggtcttcgaaaccacatatcatgatgtcgtcctcgtcctcgtcgtcggccgcctgctgcttcccgctggaccacctcgcgccgtcccccaccgagcagctctgctacgtgcactgcaactgctgcgacaccatcctcgccgtcggcgtgccctgcagcagcctgttcaagacggtgacggtgcgctgcggccactgcgccaacctactctccgtcaacctccgcggcctcctgctcccgcccgccgcgccggcgccgcccaaccatctcaacttcgctcactccttgctgtcacccacatccccgcatggcctcttggacgagttggctctccagcaggcgccgagcttcctgatggagcaggcgagtgccaacctgagcagcaccatgacgggccgcagcagcaacagcagctgcgccagcaacctgccgccgccggcgccgatgccggcagctcagcctgtgcagcaggaagccgaactgcccaagaccgccccgtcggtaaacaggcctccggagaagcggcagagagtcccgtcggcatacaaccggttcatcaaaggacgagatccagcgcatcaagggcggcaacccggacatcacccacccgnngaggcgttcagcgcagcccgcaaagaattgggcccatttcccacacatccacttcggcctcatgccggac

SEQ ID NO: 3895 - DNA, 1423 bp, Zea mays
  Clone ID: TF_UC-ZMFLB73131H04_FLI
acaaatatatttcaaaggtcttgttggatcattgcgactaggaggttgtctcatatacacctcttcttcaagcacccaatgcaaagaatgcattctgaatgcctatttgtttcatgctccatatttgagagattacaagtgataggatgactctgattgttgttggtttgataactggacaaaatgtatcaagataatcaatagcatacttttgctttgtgacaagtctagctttaagtctatgcactaaattaaaccatcaacctttctcttcactttgaaaaccatctactatcaatgagatctattcctttccattatggaagcagctcccatgtgtgattcctcttttgcatcttgtttttgacaaaaatcagaggtaaagggtatgatatatcatcaacacctagaagttcattgtgtagcgtgtggtcatgcttatttgttttgtgcttgcattctactctttatattgaaaatcataatttaaaatgtgaaaatgcactacataagtgaattgtcattgcgagtaaaattaatatgatcaagttcaataaccatgtgaagtgttgttaaaaacatctagtttccaaatgtgaatacatcaaacatgggcgaatgtgttcttataaatttctctaaaaaataagacgagatgataagtattccaaattcatatatacctcatgctagctcttctatttttggaacctctgtctaatataacacaaaagaattttttcctaatgtttaagccttcccttggttggtgtgaggtgttcatgaaggggtttcatgtggtttgcatagtatactttgcaattgtattgactattatttaactatattagagtgcttttgaacaaagggagttttgtaaaatatgtatatctatgatgtatatatgtcctaataataatttcatatgtccgatgtttgtaataaacaacagctccagagaagaggcagcgtgttccttcagcatataacagatttattaaggaggagatacgaaggattaaagcatgtaacccggacataagccatagggaagccttcagcactgcagcaaagaattgggcacattttccgaatattcattttggtctagggccctgtgaaagtagcaacaatcttgatgaggccaccggtgcaatgtgccatccccagaaagtccaagatctctactaagacctatatcagcactgccctttgtttcctcttagttctggactagttggtgagtgccatatatatatgcatgagtgtgatatgatcatgaggtaaggaattatgattaagatgatatatatgtacgagatgaacatgcccctaggttcatgaaagactaaataaggatcgtcatctcaccatgttatcataggtagtaactattgtttgaaataaattatcctttgtgtgc

SEQ ID NO: 3896 - DNA, 943 bp, Zea mays
  Clone ID: TF_ZmC21266_2
cgctgctttcagatatctcaccggaccgtcgtcgtcggcccctccgagaacataccaccgcgcccgccgccgcgcgcgccaccacgtccacgtacgccggccggccaccaagcaagcatggatacggtttcacagtccgagcacctgtgctacgtccgctgcacctactgcaacaccgtgctcgcggttggggttccatgcaagaggctcatggacacggtgactgtcaagtgcggccactgcaacaacctctcctacctcagtccacggccccccatggtgcagccgctctcgccgactgatcatcccttggggccattccagtgtcagggaccctgcagtgagtgcaggaggaaccaaccgctgccgctggcctcgccgacatcgactgacctcaccccgagaatgcccttcgttgtcaagcccccggagaagaaacatcgcctcccatctgcttacaatcgcttcatgagggaggagattcagcgcatcaaagctgcgaagccagatatccctcacagggaggccttcagcatggctgccaagaattgggcgaagtgtgacccgcgctgctcgacgactgcctctactgccacttctaacagcgctcctgagcctgctagagtcgtcgtgcccactcctcatgtaactgagccacgctttgatctggaggatagggccaaggagcatgtcattgagagcttcgacatcttcaagcagattgagcgcaacatctagatgtctccatttcgagtaccatcagctctatatataacctatgcatgcatatgcatccccatcttgtactttttacccccatgttactgttgctattattcttgctcttgttggattgtacgcaccctttaattgacagttgctaccctatataatgtttgccatcttatatattgtcgtcgttccttatatagggttatgatcc

SEQ ID NO: 3897 - DNA, 803 bp, Zea mays
  Clone ID: TF_ZmC21266_3
tgggggccccctcgaggccggccaccagcaagcagcatggatacggtttcacagtccgagcacctgtgctacgtccgctgcacctactgcaacaccgtgctcgcggttggggttccatgcaagaggctcatggacacggtgactgtcaagtgcggccactgcaacaacctctcctacctcagtccacggccccccatggtgcagccactctcgccgactgatcatcccttggggtcattccagtgtcagggaccctgcagtgagtgcaggaggaaccaaccgctgccgctggcctcgccgacatcgactgacctcaccccgagaatgcccttcgttgtcaagcccccggagaagaaacatcgcctcccatctgcttacaatcgcttcatgagggaggagattcagcgcatcaaagctgcgaagccagatatccctcacagggaggccttcagcatggctgccaagaattgggcgaagtgtgacccgcgctgctcgacgactgcctctactgccacttctaacagcgctcctgagcctgctagtagagtcgtcgtgcccactcctcatgtaactgagccacgctttgatctggaggatagggccaaggagcatgtcattgagagcttcgacatcttcaagcagattgagcgcaccatctagatgtctccatgtcgaaatggtgcggtagcccaggatcgagtaccatcaccatcctgtactttttaccccccatgttactgttgctattattcttgctcttgttggattgtacgcaccctttaattatggacagctgctaccct

SEQ ID NO: 3898 - DNA, 1362 bp, Zea mays
  Clone ID: TF_ZmC13380_5
aaaccgaaaagaaaagaggaaagtgggtcagctcaatctcttcttcgtcattcctctcctgtaggttctctctctctccctccctccctcccgcagcacacataaactcgagatacatatatatcagtaggatggatgtgcaaacctagcctgctgcctttgtagctgcaaattaaactgagctgtacctgttggccttcctcctcgctcctcttggttctcgctggttgccgggagctggggtcgagagtacttctgttgttcgcacggcgaggcggcggcggagaccggtcagaaggaatgtcttcgtcccaaatcgcgccggcagatcatgtgtgctatgtgcactgcagcttctgcaacacagttctcgcggtgagtgtcccggggaatagcatgctcaacatcgtgacagttcggtgtggacactgcgcaaatctactgtcagtgaacctgagagcactgacgcactcactcccagaacaagatcatcagctccaggagaacatcaaggtccatggcatcaacggcactttgcatgatgatcatcagtgcggccatttggatcagctcggttcttcttcgtcgtcaaggttccggcggcttccagtgatgtgttcgccacagaacgggcagcacctgctgcaggagaaaacacttaacaacaatgctcgtcgtaaggctcccttccacgtacacgccgacgaccatgcatatgcatgcctcaatttgcataatcttctttttttagcttaattagcatatccacatgcatgcaatcatacgccaaataatgataattaactgtactacgtcggtcgaccttgcttcgaactaaatgcgccgcgcgcagctccagagaagaggcagcgggttccgtcggcgtataacagattcatcaaggaagagatacgcaggatcaaagcgaacaactcccgacattaaccacagggaagccttcagcacggcagccaagaatgtaagtaaagcctttttctagctagctggctaattgctatagtacgtacttgtcgtcgtgggcgcctgaattggttgttttacatatatatacactacgtacgaccgttgttgcatgcagtgggcacattatccaaacatccatttcggtttagacgactccgggcgagagggcaagaagaagctcgtggatcatgaggcggcggcgtctgtcgtcgcagtcgcagcagcaccgacagctgctaaaaagatccagggtttctactgatggtagcagatagatgtgtagattgattgatacatcatcggccgggtggaagaattgataccaaaaaaaaaaaaaaaaaaaaaaaaaaaaaagtactctgcgttgttaccactgct

SEQ ID NO: 3899 - DNA, 700 bp, Zea mays
  Clone ID: TF_ZmC32886_1
cctccatcccccccactcccccctcctgcgcccgaggcctagcgccggcagcccgggcccccagctgctacagcaacgcctgcccgccgccgcgatccccagcggcaggaacgggctgcacccgcacccgccccagccccagccccagccgcccgcagcgggtaaaggggccaaagagccgtcgccgcgcgctaactccgccatcaacagacctccggagaagaggcagcgcgtgccgtcggcgtacaaccgcttcatcaaggacgaaatccaacgcatcaaggctggcaatcccgacatctcgcacagggaggccttcagcgcggcggccaagaactgggcgcactttccacacatccactttggactcatgccagatcaccaggggcccaagaagacaagcctgctacctcaggatcaccagagaagcgacggcggcgggctactaaaggaagggctgtacgctgcggcagccaacatgggggttgctccatactaatataataataatcactcctacttacgtgctcaagcttataatattagagtagcaaagctgctacgtactgttagggctctatggactactacgaagctatggacgtgtttggtaggctgcatatgggccggccaggctggtaagatacagcgtacgcttgtttggttgctaaaaaaaaaaaaaaaaaaaaaaaaaccgatt

SEQ ID NO: 3900 - DNA, 785 bp, Zea mays
  Clone ID: TF_ZmC13380_4
cccgggcttttttttttttttgcaatttcttggttgaaatgagatagcggctcctgagaagaggcagcgggttccgtcggcgtataacagattcatcaagtgagctcgctcgatgatcgacgacctcctcagatcagcagcttacgtttggttcattctaccaaataattaaacgctgtgtacgtgtgtgcagggaagagattcgcaggatcaaggcgaacaaccccgacattagccacagggaagccttcagcacagcagccaagaactgggcacattatccgaacatccatttcggcttaaactccggccgagagggtggcaagaataagctcgtggacgaggctgtcgcggcggtggcggtggctccgaagaagatccaaggtttctactgatcgatgccggtcgatcgagggatcagcgctcgtcgtcatcaactggccggccgggtgtggaagaattaataataccacacaaattataaatgtactgtgatgagtaaattaaagagttatagtggggaatgaagggagagagagatatatagcaatacgtatattaccttaccttattaatgagtgcaaaaaaaacacttgtgaagggagagagagatatatagcaatagtggcgcgtactgatgcatgagtgggaagtgaagcatcatacaatcacatgaattatattgctactggcatggcgtgggcgccatgcatggtttaaattaaccgagaagacgacttaataaatcattatttgacctgaaaaaaaaaaaaaaaaaagcggcc

SEQ ID NO: 3901 - DNA, 2075 bp, Zea mays
  unsure (1)..(2075): unsure at all n locations
  Clone ID: TF_ZmC13380_2
atttcgatctgccagatctagacatatataccctccacgcgtccggcatttcccctctctccagcacattgctgcttccacagttccacacacataaggccaccacagcaaataaaggcactgctgcactctctctctctctctctctctctctctctctctacgcgaaaagaaaagaggaaagtgggatagctcaatctctccttccacgcgtcctcagttctcactctagcgctctctctccctcgctctctctctacacatatatatcagtataggatggatgtgcaaacctagcttgctgctgcctttctagctgagaactgagctgtagctgttggtacggttttcctcctcgctcttcttctcctccttcttgctgctggttgccgggagctgagatcgatcgagagcactgctgttgttcgtgcggccggcggcggcggcgcgcggcagtgggcggagacgacgaccgatcggtcagaaggaatgtcgtcggcccaaatcgtgccggcggaccatgtgtgctatgtgcactgcaacttctgcaacacagttctcgcggtgagtgtcccggggaacagcatgctcagcatggtgacagttcggtgtgggcactgcacaaatctactgtcagtgaatctgagagcactcatgcactcagtcccagaacaagatcagctccagggagaacatcagggtccatggcacgttgcgtgagcatcatcagtgcggcggcggccaccatctggagctgggctcttcgtcgtcctcaaggttccggctgccgatgatgatgtcgtacgcgccgcagaacgagcacttgctgcaggaacagacactgaacaacgctcgtccggctcctgagaagaggcagcgggttccgtcggcgtataacagattcatcaaggaagagattcgcaggatcaaggcgaacaaccccgacattagccacagggaagccttcagcacagcagccaagaactgggcacattatccgaacatccatttcggcttaaactccggccgagagggtggcaagaataagctcgtggacgaggctgtcgcggcggtggcggtggctccgaagaagatccaaggtttctactgatcgatgccggtcgatcgagggatcagcgctcgtcgtcatcaactggccggccgggtgtggaagaattaataataccacacaaattataaatgtactgtgatgagtaaattaaagagttatagtggggaatgaagggagagagagatatatagcaatacgtatattaccttaccttattaatgagtgcaaaaaaaacacttgtgaaggtttctactgatgcatgagtgggaagtgaagcatcatacaatcacatgaattatattgctactggcatggtgggcgccatgcatggtttaaattaaccgagaagacgacttaataaatcattatttgacctaccaaaaaaaaaaaaaaaatcatgcatatgcacacacacagcatggcagctagcaatctatccacctcttggccttttgtgtgtgtacgtctgcatgggctaaacacacatgcatatactcaatcattgttgttagctaggggtcatccatggactttgtttattcattgtttttgggagtgggcgccgagaaagatagatggtgagcagataatatcagactgagccatgattttagcctgcactatcagatatgattgtgtgtgtacctatactcccaaagagagaaaaggaaagggaaacaggagcacaaaaagtgatcggcatgcagggtgttaggaaagtgagaaaccatcagcaggcagcaacagcaacgagcgtctgataaaagtcatacactggaccagcagcagcagcttgttgatgcagctagctgcttaaagtagtgacaaactgacaacaacaaaagtagggctagaaaagctactacctggtgtgaaatctctctctagtcctttccgatctaccgtgatctttgatttcgnttatttctctctctcttctttttttttttggtttgggttcatcacaacttttccgatctaccgnggatctttaaattttttt

SEQ ID NO: 3902 - DNA, 1154 bp, Zea mays
  Clone ID: TF_ZmC13272_2
cctcgaggccggccgggactacttctttctctctctctcaccacacacagacacaaataaaagaaatcagtagttcgatttctcccgggacctttatttacacatatctctgtatttacaaattaggttgttgatgtaggctgtacgcacctgctagtttgctactcgatcctatatatcgtccaatcctatctgacctctcgacatctggtccttgattactcgtcctttttgcttggttatatcgtcgccccggccgcttgagctagcttcctctagttctcgcgctcgtcgtcgatcggttgtttgcatagcccacggcgagccgaaggaataatgtcgtcggcgcccctgcagatcgcgccggtgccggagcatgtgtgctacgtgcactgcaacttctgcaacacaattctcgcggtcagtgtcccgagtcacagcatgctgaacatcgtcacagtccgttgtgggcactgcactagcctgctgtcggtgaacttgagaggactcatccaatcacttcctgtccagaaccaccactactcccagcagcaggagaatttcaccgtccaaaatatgggttttactgaaaattaccctgagtacgcaccttcgtaccgcatgccaacgacgctgtcagcgaaaggtgatctggatcatatgctgcacgtgcgcgctccagagaagaggcagcgtgttccttcagcatataacagatttattaaggaggagatacgaaggattaaagcatgtaacccggacataagccatagggaagccttcagcactgcagcaaagaattgggcacattttccgaatattcattttggtctagggccctgtgaaagtagcaacaatcttgatgaggccaccggtgcaatgtgccatccccagaaagtccaagatctctactaagacctatatcagcactgccctttgtttcctcttagttctggactagttggtgagtgccatatatatatgcatgagtgtgatatgatcatgaggtaaggaattatgattaagatgatatatatgtacgagatgaacatgcccctaggttcatgaaagactaaataaggatcgtcatctcaccatgttatcataggtagtaactattgtttgaaataaattatcctttgtgtacagtttta

SEQ ID NO: 3903 - DNA, 1462 bp, Zea mays
  Clone ID: TF_ZmC7254_8
ccggccggatcgatcgagcaaggaggggcgccccagcagtcctcgtcggatcgatccatctcgtcgacagcgtcagcgcctcaggtggatcggagcggaggtggtggaccggagctagtagctgccagccacacatttcggtcgtcggaaccacatatcatgatgtcgtcctcgtcctcgtcctcgtcgtcggccgcctgctgcttcccgctggaccacctcgcgccgtcccccaccgagcagctctgctacgtgcactgcaactgctgcgacaccatcctcgccgtcggcgtgccttgcagcagcctgttcaagacggtgacggtgcgttgtggccactgcgccaacctactctccgtcaacctccgcggcctcctgctcccgcccgccgcgccggcgccgcccaaccatctcaacttcgctcactccttgctgtcacccacatccccgcatggcctcttggacgagttggctctccagcaggcgccgagcttcctgatggagcaggcgagtgccaacctgagcagcaccatgacgggccgcagcagcaacagcagctgcgccagcaacctgccgccgccggcgccgatgcctgcagctcagcctgtgcagcaggaagccgaactgcccaagaccgccccgtcggtaaacaggcctccggagaagcggcagagagtcccgtcggcatacaaccggttcatcaaggacgagatccagcgcatcaaggccggcaacccggacatcacccaccgggaggcgttcagcgcagccgcaaagaattgggcccatttcccacacatccacttcggcctcatgccggaccagggcctcaagaagaccttcaagactcatcaggatggcgctgaagacatgctactcaaagacgatctctacgccgcagcggctgcagctgcagcagccaacatgggcatcactccattctaataactctggttaggcatgtgttctgaatcagctggcacgtcgtagtggctatcgccctttgtgctgcattctagggtttcgtctcagatcttgatctcaacatcgatcgtgtgtcgtttaattagggtactttccagtgtggggatagaaatggagaataatcaagttagagcgcgcatcaagtaggccactgatgatccgtaggtacagacttgattgtctcctctatatatcccttttcatttcatgttctctctctttttcctattttttgttcctggaccccttcaactcgccagtagagagctcgttgtgcctctccaatcccatgtttgcgtatgtctgctcaacaacatgtttttaccatggagaacaagttgaacatctgttagatctatcaagagtgtcatatatatgttccatcgtcctttaccatgtacttctactactactatgtggtttctttcaacatatagggttatattgcgttgcgaaaaaaaaaaaaaaaaaagcggcc

SEQ ID NO: 3904 - DNA, 1160 bp, Zea mays
  Clone ID: TF_ZmC21266_1
cgaactgggtctgaccggcagcggtgcggcgctcgagcaggccggggggggatctatctgtctgcccgtggcgtgctccactgattcttcttcttcttctacctcccggcctcctcccccttcttctttgcctgccttattagtatctcgcctcacaccacacagctagcagacagccagacacgcgctgctttctgatctctccccggatcggaggctcctcccaacataccaccctgccagccgcgccgccacgtccacgccggccggccaccaagcaagcatggatatggtttcgcagtccgagcacctgtgctacgtccgctgcacctactgcaacaccgtgctcgcggttggggttccatgcaagaggctgatggacacggtgactgtcaagtgcggccactgcaacaacctctcctacctcagtccacggccccccatggtgcagccgctctcgccgactgatcaccctttggggccattccagtgtcagggaccctgcaacgactgcaggaggaaccaaccgctgccgctggcttcgccgtcatcaactgagctaagcccgagaatgcccttcgtagtcaagcccccggagaagaaacaccgcctcccatctgcttataatcgcttcatgagggaggagattcagcgcatcaaagctgcgaagccagatatccctcacagggaggccttcagcatggctgccaagaattgggcaaagtgtgacccgcgctgctcgacggctgcctctaccgaaacttctaacagcgctcctgctgagcctagagttgtgcccactccccagttaactgagccacgctttgacctggaggatagggccaaggggcaagtcattgagagcttcgacatcttcaagcatattgagcgcagcatctagaggtcgttcgatgccgctgttgtagcccagtatcgatcgagtaccatcagctatatgtataacctatcccgtatcgccgtcgtcgcctcgcaatcatgcatccccatcctgtacttttacccccgtacgtgttactgttgctgttattctcgttatggttggattgtacgcaccatttaattatgaacagctgctacctatatatataatatttgccttcttttttgttcctaaaaaaaaaaaaaaaaaaacgagagta

SEQ ID NO: 3905 - DNA, 965 bp, Zea mays
  Clone ID: TF_ZmC21266_4
aagcatggatatggtttcgcagtccgagcacctgtgctacgtccgctgcacctactgcaacaccgtgctcgcgctgcaggttggggttccatgcaagaggctgatggacacggtgactgtcaagtgcggccactgcaacaacctctcctacctcagtccacggccccccatggtgcagccgctctcgccgactgatcaccctttggggccattccagtgtcagggaccctgcaacgactgcaggaggaaccaaccgctgccgctggcttcgccgtcatcaactgagctaagcccgagaatgcccttcgtagtcaagcccccggagaagaaacaccgcctcccatctgcttataatcgcttcatgagggaggagattcagcgcatcaaagctgcgaagccagatatccctcacagggaggccttcagcatggctgccaagaattgggcaaagtgtgacccgcgctgctcgacggctgcctctaccgaaacttctaacagcgctcctgctgagcctagagttgtgcccactccccagttaactgagccacgctttgacctggaggtactgcaaagccttctcccttcactcttctctgtagacaaataagcaagatttgaatatgctatgctatttcctatacgcacatgcatgcatgctgctcttgcaggatagggccaaggggcaagtcattgaaagttttgacattttcaagcatattgagcgcagcatttaaaggtcgttcgatgccgctgttgtagcccagtatcgatcgagtcccatcagctatatgtataacctatcccgtatgggggtggtcgcctcgcaatcatgcatccccatcctgtacttttacccccgaaagtattcaagttgctgttattctcgttagggttggattgtacgccccatttaattatgaacagctgctccctatatatataatatttgccttttttttgttcct

SEQ ID NO: 3906 - DNA, 569 bp, Zea mays
  Clone ID: TF_LIB3596-045-Q6-K7-A8
ccgggttcgacccacgccgtccgatcgggttctcggcggcgtctaacaggttcatgcacggaagattgcgccaggatcaaagcgagacaaccccgacattaagcacagggaagcctttagcacgggagccaagcattgggcacgttatccaaacatacatttcggtttacacgactccgggcgagagtggcaagcaagaaactagcggatcatgaggcgggggtgtctgtcgacgcagtcgtagcaagactcaactgctgctaaaaagatacagggtttttactgatggctgcagatagatgtgctaatggactgatgcatagtcgaccggttggaagaatggataccacatacactgctttaaaaatatgtacttgtgagtaaacagtgaaaatataacttgtgagatgtaccgtacatatgatagaggtagctaggatgcgtgtcctagagctgggaacagtgaagcatatgttgtaaccagaaacatcacatgaattgctattgggcgccatgtctatgcacttaattatattggttgaggagacctagttctcattggtcctgcc

SEQ ID NO: 3907 - DNA, 638 bp, Zea mays
  Clone ID: TF_LIB4828-125-R1-N1-C9
ccggccgggatctggtccttgattactcgtcctttttgcttggtgcctgtgtatatcgtcgccccggccgcttgagctagcttcctctagtgctcgctctcgtcgtcgatcggttgtttgcatagcccacggcgagccgaagcaatgtcgtcggcgcccctgcagatcgcgccggtgccggagcatgtgtgctacgtgcactgcaacttctgcaacacaattctcgcggtcagtgtcccgagtcacagcatgctgaacatcgtcacagtccgttgtgggcactgcactagcctgctgtcggtgaacttgagaggactcatccaatcacttcctgtccagaaccaccactactcccagcagcaggagaatttcaccgtccaaaatatgggttttactgaaaattaccctgagtacgcaccttcgtaccgcatgccaacgacgctgtcagcgaaaggtgatctggatcatatgctgcacgtgcgcgctccagagaagaggcagcgtgttccttcagcatataacagatttattaaggaggagatacgaaggattaaagcatgtaacccggacataagccatagggaagccttcagcactgcagcaaagaattgggcacattttccgaatattcattttgg

SEQ ID NO: 3908 - DNA, 1744 bp, Zea mays
  unsure (1)..(1744): unsure at all n locations
  Clone ID: TF_ZmC13380_1
cgcagaacgagcacgtgttgcaggaccggacactgagcaacgctcgtccggctcctgagaaaaggcagcgggttccgtcggcgtataacagattcatcaagtgagctcgccctatgatcgncgtcctcagatcagcagcttacgtacgtttggttcatttcggcccaataattatgggcctcgaggccggccgggacaacaaataaacgcactgctgcttgccagtattgctttgctttgctttgccttgcttgcccccacacgccctctctctcctctctctctctcaaaccgaaaagaaaagaggaaagtgggatagctcaatctcttcttccttcgtcattcctctcccgtaggttctctctccctccctccctccctccctcagcacacataaactcgagatacacatatatatcagtaggagaggatggatgtgcaaacctagcctgctgcctttgtagctgcaaattaaattgagctgtacctgttggtcttcctcctcgctcttcttggttctcgctggttgccgggagctgggatcgaaagtactgctgttgttcgcacggcgaggcggcggcggagaccggtcagaaggaatgtcttcggcccaaatcgcgccggcagatcatgtgtgctatgtgcactgcagcttctgcaacacagttctcgcggtgagtgtcccggggaatagcatgctcaacatcgtgacagttcggtgtggacactgcgcaaatctactgtcagtgaacctgagagcactgatgcactcactcccagaacaagatcatcagctccaggagaacatcaaggtccatggcatcaacggcactttgcatgatgatcatcagtactgcggccatttggatcagctcggttcttcttcgtcgtcaaggttccggcggcttccagtgatgtgttcgccacagaacgagcagcacctgctgcaggagcaaacacttaacaacaatgctcgtcctccagagaagaggcagcgggttccgtcggcgtataacagattcatcaaggaagagatacgcaggatcaaagcgaacaaccccgacattaaccacagggaagccttcagcacggcagccaagaattgggcacattatccaaacatccatttcggtttagacgactccgggcgagagggcaagaagaagctcgtggatcatgaggcggcggcgtctgtcgtcgcagtcgcagcagcaccgactgctgctaaaaagatccagggtttctactgatggtagcagatagatgtgtagattgattgatacatcatcgaccgggtggaagaattgataccacaaaaactgctttatatatatgtactgtgagtaaacagttaaaattaaacttgtgagatgtaccgtacatatgaagagctagctagtagtgagtcataaagtgggaaagtgaagcatatatagtcgtaaaaacaatcacatgaattgctattaggcaccatatatatgcacttaattatattggttgaggagacctaataaatcatttgacctaccatacaaaaaaaaaaaaaaaaaacccgcggccctttgagacaatgcaggcagaaaaaagtgaggttagtacgcagcttcagctgatgagctataagagttaaaggggggaatgaaggagagagagattttttacgtttttaccttacnnnnnnnnnnnnnnnnnnnnnnnnnnnnnnnnnnnnnnnnnnnnnnnnnnnnnnnnnnnnnnnnnnnnn

SEQ ID NO: 3909 - DNA, 804 bp, Zea mays
  unsure (1)..(804): unsure at all n locations
  Clone ID: TF_ZmC151488_1
ccggccgggctagcactccctcccgtgcacacccatccactcgccgcccaagcccttagcttcctgcccaacgctgctgcgcttcacgctccatcgcccctcatccaataactccaacaaagaccgggttgcttcgagctgcacacaacagaagaagcacgcccatccgcggctcttgcttcttttggcgctatgatgtcgtcggcgccggaggagacgttgttcaacctggaccagcagcagcctccgccggcggagcaggagcagatctgctacgtgcactgcagctactgcgacaccatcctcgcggtgggcgtgccgtgcagcagcttgttccagacagtcaccgtgcggtgcggccactgctccaacctgctctacgtcaacctccgcgccctcctgctgccggcggcggcggccaataaccagctaccacccttcggccagcctctcctctcccccacctccccgcacggtctacttgacgctgaggcgatgtcgttccaggcgccgagcctgccgggtgctgaaccgccgagcgcttgcgtgagcggcgtcacgagcatcaacaacacgtgcggtggcaacaccaccacgtcgtcggccatgtcgtccatggcgccgccaccggccaaacatgcactgcaggaggcgcagcagctgcccaggaccgcggcgtcggtgaacagaacttcagagaagcggcagagagttccttccgcgtacaaccgtttcatcaaagatgaaatccagcgcatcaaggccagcaatccngacatcactcacagggaagctttcagcgcg

SEQ ID NO: 3910 - DNA, 682 bp, Zea mays
  Clone ID: TF_LIB4744-101-A1-K1-B10
cctcgaggcggccgggaatccatacaaaagaatggtttgcttccttcctttctccctctatatctcgccttctcctcgaccagcggagggtacgttgttgccgatccacgaaccgacacttgtcatgccagtatgcatccgaacatgcttgctatgtcaactgccactattgcacactatactggtggtaaatgtcccaagacagctgttcctacaacgcccctgactgctaaacgtgcgcttcgtacaaaggggctgctactggatctcagtcccttccatcaccccccactaactgtcccacacaatgaagttgctcacaactgaggcctcgaataacctttccttagtactaacaacccataagccagcaaatctatccacacgccctcccagtgtgatccacgtgtccgaacacatctgccacaattgccacccttacgaccctcatagaaaacacccactgctccatcatgatacaactcattcctctactgctaaccacgaaggctaaagacaagccacccagagattagccacagggaagcattccgtgctgcaacgaagaattggcctcatctacctcatactccatttcaggctcatcgtatgtgaccatcggtagggtaacaactagcaaagacaatgattacgtatcgatctcttcgacttaccatatata

SEQ ID NO: 3911 - DNA, 761 bp, Zea mays
  Clone ID: TF_LIB4975-011-R1-K1-D11
atcctcaccgcggactctcctcatcccttccccgatctctcaccacgctcctcttctgctaccttgctttccctgctgcgattcgttccttgctctattagtattagctagccggccggccggatcgatcgagcaaggagaggcgccccagcagtcctcgtcggatcgatccatctcgtcgacagcgtcagcgcctcaggtggatcggagcggaggtggtggaccgggagctagtagctgccacacatttcggtcgtcggaaccacatatcatgatgtcgtcctcgtcctcgtcctcgtcgtcggccgcctgctgcttcccgctggaccacctcgcgccgtcccccaccgagcagctctgctacgtgcactgcaactgctgcgacaccatcctcgccgacgagttggctctccagcaggcgccgagcttcctgatggagcaggcgagtgccaacctgagcagcaccatgacgggccgcagcagcaacagcagctgcgccagcaacctgccgccgccgccgccgatgccggcagctcagcctgtgcagcaggagcccgaactgcccaagaccgccccgtcggtaaacaggcctccggagaagcggcagagagtcccgtcggcatacagccggttcatcaaggacgagatccagcgcatcaagggcggcaacccggacatcacccaccgggaggcgttcagcgcagccgcaaagaattggggccatttcccacacatccacttcgggctcatgccggaccagg

SEQ ID NO: 3912 - DNA, 605 bp, Zea mays
  Clone ID: TF_LIB4073-012-Q6-K1-G12
cggacgcgtgggcggacgcgtgggcacaaacacacacaaatcagtagttcaatctctcctctcagctttacatctctgtatttacaagctgtttgcacaacccaaggcgagaagagccgaaggaatgtcggcccagcagatcgcgccggtgccggagcatgtgtgctacgtgcactgcaacttctgcaatacaattctcgcgctccagagaagaggcaacgtgttccttcagcatataacagatttattaaggaagagatacgaaggattaaagcaagcaacccagacataagccacagggaagccttcagcactgcagcaaaaaattgggcacattttccaaacattcattttggactagggccctatgaaagtagcaacaagcttgatgaggccattggtgcaacgggccatccccagaaagtccaagatctctactaagacctatatccacatcgtcctttgttttcctattgtaagtaatttgagataaaatgtatcttagttgtgtactagtttgtgagtggcgtacatatatatagatgagtgatatgatcatgatgtaaggaaataagacgtatatatatgtacgagaagaacatatc

SEQ ID NO: 3913 - DNA, 717 bp, Zea mays
  Clone ID: TF_LIB4703-004-R1-K1-F7
ttgatgacgacgagcgctgatccctcgatcgaccggctttgatcagtagaaaccttggatcttgttcggagccaccgccaccgccgcgacagcctcgtccacgagcttattcttgccaccctctcggccggagtttaagccgaaatggatgttcggataatgtgcccagttcttggctgctgtgccgaaggcttccctgtggctaatgtcggggttgggcgccttgatcctgcgaatctcttccttgatgaatctgttatacgccgacggaacccgctgcctcttctcaggagccgctatctcatttcaaccaagagattgcaaaaaaagatatgaaacaaagcagtcaaaacgcacgcatcgacttacgcatgcatgattgcatgtaattaatatatagcaaacaaaacaagaaacgaaacttacgacgagcgttgttcagtgtctgttcctgcagcaagtgctcgttctgcggcgcgtacgacatcatcatcggcagccggaaccttgaggacgacgaagagcccagctccagatggtgcccgccgccgcactgatgatgctcacgcaacgtgccatggaccctgatgttctcctgctggagctgatcttgttctgggactgagtgcatgagtgctctcagattcactgacagtagatttgtgcagtgcccacaccgaactgtcaccatgctgagcatgctgttccccgggacac

SEQ ID NO: 3914 - DNA, 578 bp, Zea mays
  Clone ID: TF_LIB4744-099-A1-K1-A7
ttgctacttccgctgtacctactgctacatttccgttcgctgctgcaggtctggatctctactgcaacaatgtgatggacacgatgactgacgagtgcggccagtgctacaacctctcctacctcacataacgatcccgcatggcgcagacgctcatctcgactgatcacccgttattgccataccagaggctaggaccctgcaacgactgccggaggaatcaacctctgccgttgtgttcacacatgtcatctgatctaactcggagaatggcctttcgatgccatccacaacacaaaagacatcgtcttccatctggtcataatctatgcatgacggactatattcaacgtatctcagctgactggccacatatccctcactgggaggccttcaccatggatgttcacaattgagctaaatatgaccttcactgatccacgactgcttctacttactgttctaacgactgtcctgctgacactaaaggagtgtgctctccccaacttcctgacccatgctttgatctgacactagactctcccatgcgcaactcattagtatagcttatcacatct

SEQ ID NO: 3915 - DNA, 1600 bp, Zea mays
  unsure (1)..(1600): unsure at all n locations
  Clone ID: TF_ZmC1397_2
cgggatggtctacaaccgtatgcgtactttatcagttaactgcccatgatctagcagtggtccaatgtttgtcctagactcctagggggaaaaaagatctgcactttgtgctgtgctgtttcttcttcttgttgttgttgtacgtagcgccgagatttcccagcaccgcttgcgatttagaaacccacagtttgttctttttcgtttaggggatggctgtacactgctgctgcttcttactaatgatagaaaggagaggtgaagttcgcagttgctgagatagacagatgatagaaggcaacgctagctaccgcgagggggaggaagatgagcaatcgggaaagcacggcatcaagcaagttgttgccttgtagttgtaggagtgtccttattgcgactttgtcaccctggtgacctgagcgctcccacgcggccatgtctgatgaattacggcggcccattcgctcccatcagcaaacacccacgaatggccaatcgttgcccagcagcagcgggcttcagtattcgtcaaccaaattgtcagagagagtccttttgcgccgcgcggatcgcatactanagaggaggttgagcggagtaggcggcggccagcaatgaaggtacagtgcgacgtgtgcacggccgaggcggcctccgtcttctgctgcgccgacgaggccgcgctgtgcgacgcatgcgaccgccgtgtccaccgcgccaacaagctcgcggggaagcaccgccgcttctccctcctgcacccgtgttcttcctcttcctcctccgccgcgcacaagccgccgctctgcgacatctgccaggagcggaggggcttcttgttctgcaaggaggacagggcgatcctgtgccgggagtgcgacgcgccggtgcacagcgccagcgacatgacgaggcggcacagccggttcctgctcaccggcgtgcgcctctcgtcagcgccggtggactctgcgggcccatccgaagaggaggagcaggagaacagccgcggcccctgcaacgacgaatcctgcagcagcggcagcggcgccggcggcgcgaccacggcgaccgccagcgacgggagcagcatctccgagtacctgaccaagacgctgcccgggtggcacgtcgaggacttcctcattgacgacgcgtccgctggcgacgtcggcgcctgctcggatggcctctatcagggacaaaatggacagatcagtggggtgctgcaagaagcttacctgccgtggacggagcgggagcaggtgcaaactgacgtcgcagacgagcgggccagctgggagcggtgggtgccacagatgcatgcggagttcggcggcggcggcaagcgacctagagcgtcgccttcgcctccctgttcgtactggtgattggtgaaaagttcgccgtcttcagcaagatgatttgtattgggctaattagtagagctactgtaggaacgaccgaaaaatgagccaaaaaagtaacggcctccatcgagctcgttttaaattattctctgcctaaagccaaactttcagaaaggagaacggtattttcctgttcgattaattaggtcgatttcgatcgaactcgttcc

SEQ ID NO: 3916 - DNA, 1694 bp, Zea mays
  Clone ID: TF_ZmC1397_1
gtacatgactgcattctgtcacctcgctcccagtgtgtgtgtatatatatcgtcctccgacactattgtatctgcagttccttcggttgctaacatctctagccgagacatttgacttggacaatctgctcatctaccactccggcactcccacgccgggccgcgcggatcgcatcgagtttgagtggagtaggcggcgggcagcgaatcagcgatgaaggtgcagtgcgacgtgtgcgcggccgaggcggcctccgtcttctgctgtgccgacgaggccgcgctgtgcgacgcgtgcgacgaccgcgtccaccgcgccaacaagctcgcggggaagcaccgccgcttctccctcctccacccctgttcgtcctctgcgcacaagccgccgctctgcgacatctgccaggagcggagaggcttcttgttctgcaaggaggacagggcgatcctgtgccgggagtgcgacgcgccggtgcacagcgcgaacgacatgacgaggcggcacagccggttcctgctcaccggcgtgcgcctctcgtcggcgccggtggactctgctgacccatcagaaggggaggaggaggaggagcaggagaacagcagcaggcccggcaacggtgagtcctgcagcggcggcgccggcgctaccacggcgaccgctagcgacgggagcagcatctccgagtacctgaccaagaccctgcccgggtggcacgtcgaggatttcctcgttgacgacgcgtacgccagcgacgtcggcgcctgctcatcagacgggctttatcaggtcagttcagttcttccatgcgaatggaactgcaagctttcactgaggcgttcctgagaacgccaagaacattattaaacttgtgcattgcgccgccatttgcacacagagccacagcggccaatgcgccataccggtctcgccgccggcgccggccatctatcgcgtcgccattaatcacggggcaggctgttgccatgctcacacctgcaaggccgagttgctggaccagtctgtcaggataatatctcgtggagaccacctagatacgatacgatacgatctgatgcaagcgaacatcatgtgctaaaccaataaaacaatggaaaaggcaaaaattcattaatttcatgtgtggaaccatggtctcacttggcgtgtggtcatttaacttgcatttttagcagggacaacaagatggacagatcagcggggtgctgcaagaagcttacatgccgtggacggggcgggagctggtgcccgctgacgtcgcagacgagcgggccaactgggagcggtgggtgccgcagatgcacgcggagttcgccggcgacagcaagcggcccagagcgtcgccttcgcctccctgttcgtactggtgaaaagctcgccgttacccgttattagtagagttgatttactgggtaccgtaggaacgaagagaaatatgagccaaaaaaaatcatggaacggaccggtgtttctctgttggattattattgggtccatttcgatcgagctgctttaaggtgacgtttggttcataaaatgtaacgtaaataacaataataacgattgaccctcgagtgacagcggtaataagtttaaataggccgataccagtttttaatatgagatccgattacggttggaattaaacaaatatgatttaacgttatcagtt

SEQ ID NO: 3917 - DNA, 1335 bp, Zea mays
  Clone ID: TF_ZmC3762_1
cccacgcgtccggtcctctcctctgtctctctctctttgagcctcctttttcaacctaacctttgacgctgtagctcgagagcaagcatagtgcctagtgcctaccagattctctccctgagcggctgagctctgccgatccgcgataggctcgcgccatgcagatgctctgcgacgtctgcgccgccgcgccggccgccgtgatctgctgcgccgacgaggccgcgctctgctccgcctgcgaccgccgcgtccaccgcgccaacaagctcgcccacaagcaccgccgcatccccctcgcccagccctctggcgacgaatccgacgccgacgccaagccgctctgcgacgtgtgtaaggagcggaggggcctcgtgttctgcgtggaggaccgcgccatcctgtgccccgactgcgacgaccccatccacagcgccaacgacctcaccgccaagcacacccgcttcctcctcgtcggggccaagctctcagccgcgctcgtcgacgcccaggcgccccactcccctgacgacgacgacaacgactgcggccgcggcaacggcgccgccgccgagcccgacgctgtccccgccgtctgcgcgcagggctcctgcgcggccaaggcctcgtctcttgagtccggtggcggcggcggcggcggcagcggcagcggcagcagcatctccgagtacctcaccaacatctgcccaggctggcgcgtcgacgacctcctctttgacgactcggcgttctcagcggcatcgaaggccgacagctgcgacgacgggcacgagcaggtgccgtccctggacgccgacctcttcgacgtggtggctggcgccggctggccggggaagcgcggcagcgcgtggtcaggagtcggagctctgggcttcgacaaggtgccggcctccgttgttgtcgtcccgacggcggccaagcaacagcaggggtgcgtgagggagaggacctgggactcggacagcgacagcgacgtgttcgcggtgccggagctcccgcaaccaccgcaggccaagaaggcgcggccggcgccggctccggcgccgactttctggtgcttctgagctgcactgtcccagtccggtccggccggcctgtgtgcactgtgtacttgccgtgacttctgtaaccagtgtgtgtgagcgagcttgctcgtgctttttacccatgtactgttgttactgcatacacacacacactccactactattagtagctagcagtgctcaaacccaagttaattaagtttggcgcagtttatattatgacttaatcataaggtgatattgctgttgccggtcgagatcttgaact

SEQ ID NO: 3918 - DNA, 636 bp, Zea mays
  Clone ID: TF_LIB4741-061-R1-K1-E4
tgggtccctcgggccggccggaatcccctcccgccgcgtacatcgccgccgtcctcgtgccccgttacctctaaaaccctagcggggagccggggatgaagatccagtgcaacgcgtgcggggccgcggaggcgcgggtgctgtgctgcgcggacgaggccccgctctgcgtcgcctgcgacgaggaggtgcacgccgccaacaagctcgccgggaagcaccagcgggtgccgctcctgacggacgccgccgtcgctgccgccgcggcggccccggccgtgcccaagtgcgacatctgtcaggaggcttctggatacttcttctgcctagaggaccgtgcactactttgtagagactgtgatgttgctatacacacagtgaattcctttgtttcagtacatcagagattcctgctaactggagttcaggtgggtcttgatcctgctgatccagttccacctattgctgaaaagcacgttaatgctgctggtggatcagtaaatcaaccagtgagacatcagccaaagagaagcccgacagttcaattttcagttgaagggagtgcttctgttcctactaaaaatgtaacaaatggagattgttcaaggcagaattttgtcccaacagccaggggag

SEQ ID NO: 3919 - DNA, 1656 bp, Zea mays
  Clone ID: TF_ZmC460_8
cttaatccaacgattagtgctttttattcacttaagccctcccacctcaacgatgagtgttcctggccagcagcctgatctttataattacatatgtgtccaacgtaagtgtcagtgcatcccatgatggcatacatacatattttgcgtacatacacatcacatgactggataattacatatgtccaatgtaagcgtcagtgcaccccatgatggtatacatacatattttgcatacatacacacatcacatgactggagaatcatgcagagatctctcatctcagccaagatcaggaacgatgaagtagtcctcgtcgtcgtcgtcaggcacctccatccgtgacttcttgaacaggcgcgccccgttcgccttgtagaacccggcgttactcactggctgcggcgaggcgaagaactccgccatggcagttttagctggcgaatgggcgtggaacaggtcgatgtcctcgaaccactccagctccttgagcccaagagacgagtctttcttgtcgctggattcgtagtccgacagctcgaggaggtcctcgacggcccaaccggacggtggcaggaacggcgaggacggcacctcctgcggcagcgcgtccttgaccgtccttgttttggtggtcgtcccggcagctggcgcgctgacgacggccgcgggcttggagctgcccttgggcggcgccggcgggaggccctcggcgctggcgccgcagacggagctgaagccgacgcggatgccggtggcgaggtagcgctggtggttgccggagagcgtgccggggacgtggatgggctcgtcgcagtcgcggcagaggagcgccctgtcctcgacgcagaagatgaaggccggcctctcctggcacacgtcgcagcgcgggaggctggcggggagcgccgcggcgtcgccgagcgggagccgctggtgcttgctggcgagcttgttggcggcgtggatctccacgtcgcagcgcgcgcacagcgccgcctcgtcggcgcagcacaccaccgtggccgccgcggcctcgcacgcgtcgcactggatcctcatgccgcccgttgggaagggagcttcgaggcggcccgccgcggcgcgtcggccgggcgggctgagccaatggcacgggcccttggggcgcgaacgccctaacgtgggtcggggcttccagtggagacaggcaggccagcagccgcctaaaaaaatcagcatgggaacgcgaacgcagacgtcgcagcgcggaaggctggcggagagcgcctcgagcgggaggcgctggtgcttgctggcgagcttgttggcggcgtggatctcgacgtcgcagcgcgcgcacagcgcggcctcgtcagcgcagcacaccacggtggcagccgcgccctcgcacgcgtcgcactggatcttcatggccgctccacctctctgtctgcagtctatactcccaggcccagctcgctatcctgtcctgtcgtctcgcaagtcgcaacaacgagggaggcaaggacgaacaagataaggccactgactgcgatggaggaggacgagcttgcgcgcgcgagcacgcaactggagcaatcagtgagctgccgctgctgggcgagcttgtggtggaggactcgccggggagacttgtggccaggggctcccgg

SEQ ID NO: 3920 - DNA, 1796 bp, Zea mays
  Clone ID: TF_ZmC3_1
cccacgcgtccgcccacgcgtccgccccgcgtccgagcattggtacctcgaggccggccggggaaaacgcaacagcgcactcgcccccctcgcttaaaagctgtagctcacacgagccgtgccactgcgagggaaggagggagagaaaaaggggagcccgatccaatcccaatcccctcccgccgcgtcacatcgccgccgtcctcgtgccccgttacctctaaaaccctagcggggagccgccgagccggggatgaagatccagtgcaacgcgtgcggggccgcggaggcgcgggtgctgtgctgcgcggacgaggccgcgctctgcgtcgcctgcgacgaggaggtgcacgccgccaacaagctcgccgggaagcaccagcgggtgccgctcctgacggacgccgccgccgctgccgccgcagcggcgccggccgtgcccaagtgcgacatctgtcaggaggcttctggatacttcttctgcctagaggaccgtgcactactttgtagagactgtgatgttgctatacacacagtgaattcctttgtttcagtacatcagagattcctgctaactggagttcaggtgggtcttgatcctgctgatccagttccacctattgctgaaaagcatgttaatgctgttggtggatcagtgaatcaaccagtgagacatcagccaaggagaagcccgacagttcaattttcagttgaagggagtgcttctgttcctaccaaaaatgtaacaaatggagattgttcaaggcagaattttgtcccaacagccagggcagaagtggttgattggactatgaataatagtacaattcgatcagtagaatctccgcctaagtacatttcagaggaaagccccacacttctgcaatctagccagaccacaacagtcttctccaaccaaattaatggcaatagtgatggggcctaccacttgtcattctcaggtggtaatgtgacagacagcctaccagattggcccgtggatgagttcttcagtaactcagaatatggtccaaactttggcttctccgagaatggttcttctaagggtgataccgctaagctggggggcgctggtggatctccacaatgccgtttggctgaaggctcagttgctgaggaactattagggcaggtgcctggattgatcaccgatgaatatatgggccgagtacctgagaattcatggacagtgcctgaggttccctctccaccaacagcctcggggctcaactggcacgggaatttgtgtttccctgcgtatgacagcaccatgttgttcctgaaattacctcccttcagaactccgaaagtcacttcaccgtaccttccagtttcaagcgccggagaagagagtactgagaggcgacaagaagatcactagacaccactgtccggtctaggctatcttgagaaaggcttcttggtgggctaaatgacgaaagaaaatatccaggactgggtggtcattcaaacatcaactgagctatccagtagccaggttttaagtgtgttgtaatgcttcaatgtgtttcattttccaaagacctgagcttcgcttgtgatttgttccgagctgtacggtgtcgattttgtgtatataatataatataacgaaataaagggtacccagtatgagtatgatcattccgaaataaaaaaatattaatgatataataaaaaaaaaaaaaaaaaaaaaaaaaaaaaaaaaaaaaagaagaaaagaaaaaagggggggaggggaaaagggagaaaaaaaggggggggggggggaagag

SEQ ID NO: 3921 - DNA, 398 bp, Zea mays
  Clone ID: TF_ZmC3809_2
ccggccgggctttcctgctaagcccgggctagctaggaagtaacacactctagtagcatcccccatcatccagcctcgcggtcgctacagttagcttcgctttcctccagcccatccttctatacacgattgacctgagctgagccgcctccgacccgtctcgagagggagggagagggagagggagagcgagagctagcgcgcgcgatcgcaaagagagcggtgaaagatgaaggtgcagtgcgacgtgtgcgcggccgaggcggcgtctgtgttctgctgcgccgatgaggccgcgctgtgcgaggcgtgcgaccgccgcgtgcaccgcgccaacaagctcgccggcaagcaccgccggctctcgctgctcggcccggtggcgccgtcctcattgt

SEQ ID NO: 3922 - DNA, 608 bp, Zea mays
  unsure (1)..(608): unsure at all n locations
  Clone ID: TF_LIB3597-024-Q1-K6-F4
gctgcagagaactcccggcagcaacgttgaggagtcttccatcctggagacagtcaccgctgtggctgcgggcaagcctctctcctgcccaaaccacgatgggaatgtgatggacttttactgccagtcttgtgagaccgccatgtgccgggagtgcacggagggggagcatgcagaacaccccacggtccccctcaaggacgtggtagagcaacacaaggcctcactccaggtccagctggacgccgtcaacaaaaggctcccagaaatcgattctgctcttcagttcatctcagaaatcattcatcagttaaccaaccaaaaggccagcattgtggatgacatccactctacatttgatgagctccagaagactctaaatgtgcgcaaaagtgtgctgcttatggaactggaagtcaactatggcctcaaacataaagtccttcagtcgcagctggatacgctgctcgagggccaggagagtataaagagctgcagcaacttcaccgcgcaggccctcaaccacggcacggagacggaggtgcntgctggtgaagaagcagatgagcgagaagctgaacgagctggcggaccaggacttcccgctg

SEQ ID NO: 3923 - DNA, 810 bp, Zea mays
  Clone ID: TF_ZmC9242_2
cttgccatcagtatgttcagtgtgagatatgtggagaaaagcacctgaagaagaacatcaagcggcatctgcaatcacatgacaaggtgccctctgatggaaggatgaaatgcacttttgatggttgtgaacacttcttttccaacaaatcaaatctgaccaagcatgtcaaggcatgccatgaccagctgaaacctttcaagtgcggaatcgttgggtgtggcaaggcgttcacctacaagcatgtcagggataaccatgagacatctggtgctcatgtatacatggaagtgagttgtgctacctgatctatgttaattccgagtttgtgttttttggcctattaggtcaaactatcagctcctgattttcgtacgtatctctaatttaaacgtatgttcacatctgctttgtgatcaaaccgtgtgaacctgtggataacaaaaatctgcttcatgcagggagactttgaagagttggatgagcagttgcgtgcccggccaagaggtggtcggaagaggaaagcattgacggtggaaacactgacacgcaagagggtgaccatctccggcgaggcttcatccttggatgatggagtggagtatcttcgctggttgctatctggtggggatgattcaattgattgtcagtagccggcgtctttttgctatcaccgctgctttgtacatgggttagattatgtaatgtaagttgtttggtagactacgatggtgttcatgacgcgtttgatatattgtcagcagtatggtagtgcagggctctcatagtaaagcttgccatttttgttgt

SEQ ID NO: 3924 - DNA, 1387 bp, Zea mays
  Clone ID: TF_ZmC205_12
gacactgggccttcttaccctttgcttctcttctctgccgctagggaggcgctgacactgttcctcttccctcctcctgctctctccccatgtcctcctcctccggtcctcggcggccatgactgctgcggcctctttcgtccgtgcctgcgcgctgcatggctgctgccagctctagatacacactcctagctaggcagctgttgccttcacctgctgccgcgcgctgctcgatcgactgcacgtcttcacagttcacaccacagagcagagggagagagaaagccaagaagccgtcaggggagagtagggagagagagaggggaggagtcgtatgatagaaagaatctggaattgctttccctctcgttttgtcccccctgcgcctccttgattattgtgttgcttgctgttcctccctgcctgcttgctccctgcttcggcttggaggccttctcatgcatcaacctccttagcatctctctccccctctcccatacatacccccttgtctgatgcctgcttctgcttgccccatcctccttcatccttcacgagttcgtctctcgatttattgtctgccacacctcccttcagctagctatcttcccctagctagctaggtaccagtagtgtgtgtatatatagatagatttatagatatagacacacacaacaagtgcaagatcaggcgaaagctactagccgcccttgcaggtcttggactccattcgtcgtccttgggttctcctcctcacctagctactatatgttccaccatcagcaggagctcttgcaggcagaagctgcagcggcagatcgggagagcagcatgtccaacctcacctcctccgcgtccggcggccccaacgcggctgctgctgctgctgccccgccggcgcccgcggcctccggcaacaacaagcggaaacggagcctcccaggcaaccccgaccccgaggcggaggtcgtggctctctccccggcgacgctgatggcgacgaaccgtttcgtgtgcgagatctgcgggaaggggttccagcgggaccagaacctgcagctgcaccggcgcggccacaacctggccgtggaagctgaagcagcgcggcacgggcaaggaggcgcagcgggaggaagggtgtacgtgtgcccccgaggccgtcgtgcgtgcaccacgaccccgcccgcgcgctgggcgacctcaccggcatcaagaagcacttcttccgcaagcacgggcgagaaagaagtggaagtgcgacaagtgctccaagaagtacgccgtccctttccgactggaaggcgcactccaagatctggggcaccagggagtacaagtgcgactgcggcacctccttctccaggcgggacagcttcatcacgcacc

SEQ ID NO: 3925 - DNA, 896 bp, Zea mays
  Clone ID: TF_ZmC28550_1
cccacgcgttccccctcccctaacactgtagccgatatccgtgttggaacactgtagccgctccttcaacggcgtcctcctcctcctcctctcccttcctgattctttctctctcccgctaaatcgatgggcacgctacgccgtattccttccccgcagccccgcagccgcttcttcgcccgcgcgctcggaatactccgcaccaatcctagctgcgggcaggggttccagccgcttcttcgcccacacgcccgctcgctcggaatactccgcaccaatccgtgtcggaccggtacgtgtgcgagatctgcgggcaggggttccagcgcgaccagaacctgcagatgcaccggcggcggcacaaggtgccgtggaagctgctgaagcgggaggccggggaggcggcgcggaagcgcgtgttcctgtgcccggagccgagctgcctgcaccacgacccctcgcacgcgctgggcgacctcgtcggcatcaagaagcacttccgccgcaagcacagcggccaccgccagtgggcctgcgtcttctcccgcattgtgtggggatcaattgcttggcttatctagatggttccatatttagtacaagtgatcatcttttttgcgggagccgtgatggtaccttgaaaagatgggaattaaataatggggatgcaagcttctcaggaacttttgagtctcatgttgattgggtatgcttttttctgtttttaattaagtaggcttactgtttcatcaatcagtgctttaaatagacattatgtttataaattagttatgtttatgtttaacatggtgtctgtggtcttgctcctggagccaaagctgtgcacgcttctggggtccaggttccttagcgtcaccccgcgcctgctttgacaa

SEQ ID NO: 3926 - DNA, 403 bp, Zea mays
  Clone ID: TF_LIB3279-048-P1-K1-E3
ggacggaggaacgcgagatagatcgagcgccggcgatgccgccaccgcacccgacggacgcggaggcggggcccgagcaggtggcgccgacggaggcggtgcccttggcggctgcggcgccggcgccggtcaagaagaagcggaacctccccgggacgccagatccggacgccgaggtgatcgcgctctcgccggggacgctgctggccacgaaccgcttcgtgtgcgaggtgtgcggcaagggcttccagcgggaccagaacctgcagctgcaccgccgcggccacaacctgccctggcgcctgcggcagcgcgggcccggcgcggccccaccgcgccgtcgggtgtacgtgtgccccgagcccggctgcgtgcaccactccccgacccgagccctcgggga

SEQ ID NO: 3927 - DNA, 1397 bp, Zea mays
  Clone ID: TF_ZmC12456_1
cgctagccaatccgagcgctggctccccagtccccaagcgtggctcttccagcccagcgccaccgcagccatgccccatgtcctctccttcctccacctccacctcccgctcaacactgcccctttgcattccttccgagtccatcgcactcgccactcccaccctcacctctccctccgtactcggcgcgcctcagcgacggcggcggccgccgaagcagagaacccgtccgcatcggcggacgtcgagatggtccgcgggcgggacggtgtttggacggcgcggtccccaactgtggtggtcctgtgggatctcgacaacaagcccccgcgcgggccgccgttcccggccgcaaccgccctcatcggcgccgcctctctcctcggccgcgtcgtctcgatttcggccttcgccaaccgccacgccttctcccacctccctggctgggtcaccgccgagcgccgcgcccgccgcgccctcgaccgctccgagcgcgcgggggtcgtcgtcccttccgtgccctactcctgctccgtctgtggccggcgcttccctacccgccccgatctcacccgccacttccgccagcttcacgagcgcgagcgaaacaagaagctctcccgcctccgctccctcaagggcaagaagcggcagaagttccgtgagcggttcatcaccggcaacaccaagtacgaggatgccgcgcgggagctcctcacccccaaggtagggtacgggcttgcctccgagctccggcgcgcgggcgtccacgtccgcaccgtccccgacaagccgcaggcagcagaccacgcgctcaagcgtcaggtgaagcactccgtcgcctgtggcgtcgattggctggtgctcgtctctgacgactcggatttcaccgatacggtgcgtaatgcacgcgctgccgacctgaggacggtcgtggtgggcgacggttgccgcgctcttggcaaggttgctgacatttggttgccatgggaccgagttgagaatggggaggttgatgaggagatgctgaggagttgcacgttttcagagtaccgagaagatcagggaactgagcgggatgggcagttcataggggattgggatgcaggtgactttgatgatgttgttgacgatattgttggaactagaaccagtttgcttggagctacgacaatgtctgcgtttgctgacgaggacattgcagatggcatatttggagttgaattgaccggggataacatgttttggagtagtgacgatgaggaagaggatgattacttgtgaggttcacatgtgtattgagcagtaaacatttagggcttgtttgctttttcttaatccatgtggatcggatgatattgggtgaatttaaatcctaaacaagtcaaaattcttc

SEQ ID NO: 3928 - DNA, 568 bp, Zea mays
  Clone ID: TF_ZmC3270_1
ccccgcgtccgccaagtctcaccgccgtctctctcccagtcccaaatcttgagctcgatcgcaaaccctcagacacttcttcccccagccgacgtacatgaagcacccgagagacgccggcgccatgccgctctccctcgcgctgtccctcggcgccggcgtggcccccgggcacggcagcagcaagcggccccggcgcgcggcgggcggcggggacggcgagttggtctgcaagacgtgcagccgcgccttcgtctcgttccaggcgctgggcgggcaccggacaagccacctgcgggccggccggcacggccttgcgctcgggatgcccgcgccggcgccggcgaaggaggcgccgccgcccgcgacgacccacctgtgccacgtctgcgggctcggcttccagatgggccaggcgctaggcggccacatgcggcgccaccgcgaggaggctgccgccaccaccgcgcaggcgccgcccgtcctcctccagctcttcgtgtagagttttgcccgtccacggagtctagctagtagaaggaattcttcgcgttccctgtcgtcactc

SEQ ID NO: 3929 - DNA, 736 bp, Zea mays
  Clone ID: TF_LIB4745-008-Q1-K1-G3
gtaccctcggagccggccggggggcctctcctcttccggtctttatctccttggttctgtcgggctcttcctcgatttgtctccggatcggaggaacggcaaaaatctttctcgtctcgcccccatggtcgccgctcgcatgctcgaagaaggggaaggacgaagaacactgccgaccctattcctagcaacgggccaaagcgaccagccgcaggaaggagaagcagtgttggcgtgttcgagctggtggtgccaggataaatcgggaggaagtgatggcatcgaattcatcggcggcgttctttggtgttagggatggggaccagcaagaccagattaagccgctgatatcaccgcagcaacagctggcagcggcgctgcccggtctggcaggcggtgtttctgcggcgtccggccaaggcgcgccgccggcgcagccaccgcccaagaagaagaggactatgcctgaccccgacgctgaggtgatcgcgctgtcgcccaagacgcttatggcgaccaacaggttcgtgtgcgaggtgtgcaacaaggggttccagcgcgagcagaacctgcagctgcaccggcgcgggcacaacctgccgtggaagctgaagcagaagaacccgctacaggcgcagcggcggcgcgtgtacctgtgcccggagccgacgtgcgtgcaccacgacccggcccgcgccctcggcgacctgacggggatcaagaagcacttctgccg

SEQ ID NO: 3930 - DNA, 845 bp, Zea mays
  Clone ID: TF_LIB4757-036-R1-K1-A8
attgggtacctcgagggccggccgggagtgctcataaccaaccaccactcagtcctcctcctctaccctttcccttccgccgcgttcctacttggtcctagagggagagagatctcgaactccaagggcgcatgctccggttgctagctacgatgccgtgtgcgtagctgcggcagcccttgatcgatcaatcgatcgcttgtgcggaaggagccggatcgagtggagtcaggtagactgctagcttccattccaacaaggggttgaggtacacacgcacaggcacagcgtgtgcgtgacttggactagtcgctgtgaccggccggtgcgtggtggcatcgatctttagcttgcttgctgattccttctttcctcctgtagctagctagatactccgtggtcgtcgtcgtcgttggacgtacgccagaagagggagctagagaagaataccgtacagctgcttccaacatggcagctgcctcgtctgcccacctgttcggactcggcgacgggcagatgcagatgcagccgcagcagcagcaggcgccgcctcctcctcttgtgaacaacccggccgcgccgccgcccaagaagaagcggaaccaacccggtaacccaagcaacagaccctgacgcggaggtgatcgcgctttcccccaagacgctgatggcgacgaaccggttcgtgtgcgaggtgtgcaacaaggggttccagcgggagcagaacctgcagctgcaccggcgcgggcacaacctgccgtggaagctgaagcagaagaaccccaaggagacgcggcggcgggtgtacctgtgcccggagccgacgtgcgtgcaccacgacccgt

SEQ ID NO: 3931 - DNA, 741 bp, Zea mays
  Clone ID: TF_ZmC205_25
aatactccagaaattgatttatagtggggcatattagatgtgggagaggaaagcagcaggagagaagagagagaaggaaaagtatgacaaggaaatgagagaaatgggagaacagccttcttagcctctccctccatgcatcctctctccaccactgctatctctcagtagcaagagcaaagcaagaggagagcaagctagcggtaccagggagagtgagatcagttccaagcacatacatatgagaagcgaagaaggggaaggacgaagaacactgccgaccctattcctagcaacgggccaaagcgaccagctgcaggaaggagaagcagtgttggcgtgttcgagctggtggtgccaggataaatcgggaggaagtgatggcatcgaattcatcggcggcgttctttggtgttagggatggggaccagcaagaccagattaagccgctgatatcaccgcagcaacagctggcagcggcgctgcccggtctggcaggcggtgttcctgcggcgtccggccaaggcgcgccgccggcgcagccaccgcccaagaagaagaggactatgcctgaccccgacgctgaggtgatcgcgctgtcgcccaagacgcttatggcgaccaacaggttcgtgtgcgaggtgtgcaacaaggggttccagcgcgagcagaacctgcagctgcaccggcgcgggcacaacctgccgtggaagctgaagcagaagaacccgctacaggcgc

SEQ ID NO: 3932 - DNA, 633 bp, Zea mays
  Clone ID: TF_LIB4729-120-A1-K1-D11
tttgtctcctgatcggactcggaggaacagcaaaatctttctagtctcgccccccaaatgcggcgaaggggacggacgaattgaagaacactgccagtccgatcgagctggtggtgccgccaggataaatcgggaggtatatgatggcgtcgaattcaccggcggcggcgttctttggtgttagggatggggaccagcaagaccaccagattaagccgctgatatcaccgcagcagcagcagcagctggcagcggcactgcccagcgtggcgtccggccaaggcgcgccgacggcggcggcgcagccaccgcccaagaagaagaggactatgcccgacccagacgctgaggtgatcgccctgtcgcccaagacgctgatggcgaccaacaggttcgtgtgcgaggtgtgcagcaaggggttccagcgcgagcagaacctgcagctgcaccggcgcgggcacaacctgccgtggaagctgaagcagaaggacccgctgcaggcgcagcggcggcgcgtgtacctgtgcccggagccgacgtgcgcgcaccacgacccggcgcgcgccctgggcgacctgacggggatcaagaagcacttcagccgccagcacggcgagaagaagtggaagcgcc

SEQ ID NO: 3933 - DNA, 799 bp, Zea mays
  unsure (1)..(799): unsure at all n locations
  Clone ID: TF_ZmC205_22
gacaaggtagtagcaaggaaaagatgtcaagaaaatgagagaacaaccttcttagcttctcctccaatctctctccaccactgctatctcctcggtaggaagaagagcaagcaagagagaagcaagctagctagcggtagcggtacaagggagagtgagcggcgaaggggacggacgaattgaagaacacctgccagtccgatcgagctggtggtgccgccaggataaatcgggaggtatatgatggcgtcgaattcaccggcggcggcgttctttggtgttagggatggggaccagcaagaccaccagattaagccgctgatatcaccgcagcagcagcagcagctggcagcggcactgcccagcgtggcgtccggccagggcgcgccgacggcggcggcggcgcagccaccgcccaagaagaagaggactatgcccgacccagacgctgaggtgatcgccctgtcgcccaagacgctgatggcgaccaacaggttcgtgtgcgaggtgtgcagcaaggggttccagcgcgagcagaacctgcagctgcaccggcgcgggcacaacctgccgtggaagctgaagcagaaggacccgctgcaggcgcagccggcggcgcgtgtacctgtgcccgggagccgacgtgcgcgcaccacgacccagcgcgcgccctcgncgaacttgaacggggatcaagaagcacttcagccgcagcacggcagaaagaagtggaagtgcgacaagtgctccaagcgctacgccgtgcagnccggactggaagggcgcactccagatctgc

SEQ ID NO: 3934 - DNA, 400 bp, Zea mays
  Clone ID: TF_LIB3354-032-P1-K1-D5
gttttgttttgtttttagtcgtttatagtggtccgaggtgtgtgtgcgtgccggggatagctagctctgtcgtgatcgatggcgacggcgccgtggccgtggtggtggtggcgcagatcctgacgcggaggtgatcgcgctgtcgcccaagacgctgctggcgacgaaccggttcgtgtgcgagatctgcaacaaggggttccagcgggaccagaacctgcagctccaccggcggggccacaacctgccgtggaagctgcggcagcggagcggcaaggaggtccggaagcgggtgtacgtgtgcccggagcccagctgcgtgcaccacgacccgtcgcgcgcgctcggcgacctcaccgggatcaagaagcacttctgccgcaagcacggcgagaagaag

SEQ ID NO: 3935 - DNA, 368 bp, Zea mays
  Clone ID: TF_LIB3205-044-P1-N1-E8
gctttttgtgcgttctcaggtcgggcacgatggataacatattggcgcggcaccgtacgcaggtgtggatcttctagcagaggctccgcctgtattggaacttcacgcacaggatggtcttgaggggctgtaagctttcgagcaggttgttccgattgcaccccgcgaacgggcacgagtaccggcgcttaaacggctcctgctacgggcccgcatccctcagcggctcggccagcgtcacacgagctcttgtactcgtcatcgtgccctcgcatgtgcatacgaacgttcgagtcccgcttgaaccctttgccgcacatggtgcacaagtgcgtgtgcggcagccagcatctgggactactccagct

SEQ ID NO: 3936 - DNA, 251 bp, Zea mays
  Clone ID: TF_701160730H1
catgatgattattgtgaccccacaagcacccccctcaccttacaattatcaacggctttgtataataatagcagcagcattaggagtactattaatgctaaagctaaagttcatgagtgttccatatgtggggcagaattttcatctgggcaagcgttggggggacacatgagaaagcatagaaattttctgagtgcacctattattgggcaattaatattgcaatggtggtgatggaagcctaaagtccg

SEQ ID NO: 3937 - DNA, 787 bp, Zea mays
  Clone ID: TF_LIB4602-001-R1-K1-A2
ggtcttccttactcgagtgctaacgatggtgatgatagtgctttatgttttcaagatcaaattggttcaattatggacaagacgaatgtgcattcaatttcttctcttaccttctccagctattccagtgatccaaatgatgtgaatgaaaggaacttaaacaaagcaaatgtttatcaatgccagaaatgcaatttgactttcggtgaccggacttcatatgcgcaacaccatttggcgtatcatgaaatgagtgttaagaggcgtaggactggcaagtttggtgagccagtagtagggaaagatggaaaatttgaatgccctatttgtcataagacctttgaggaggaaccacagtactttggtcatgtcggatctcatgcaagatatgaaggtttagctcctgaagcattcttggataaggctacttccagaagggcagctaatgattcattggcagaaattccatttagccttcaggaattgactgaatcacatggacagaacaacaaggtttcttatggtgaaaagggttttcagcaccacaatcattcaaataaacatggtgataataaccttacagccattgatctttttggtacaaattattcggataatttcatcaggccaaataaaacttgcggtagtcctgaagagggaccttcctgtaatgatgctccaagtgtatctagatatacaaattgtacaggccatgctgatgtgatagtttccagaagggcatcaatctccaataatcaatctggtagcaacattaatgggctttata

SEQ ID NO: 3938 - DNA, 1017 bp, Zea mays
  unsure (1)..(1017): unsure at all n locations
  Clone ID: TF_ZmC205_19
ctcgaggcttgnccggnngaagccgcaaataataatcgccaaagcccaaaagagatagagaggagagacgcgacgcgaggggagtggagaaaagcagagcacagagagagagaagggagagggaaaagagagagagaaaaaaagatccccgtccaccgcccacccgctgcgccggcgctgcacgcacggacggacagacggacctcccccccaagcggtgccggattcagtgcggtgggccaggggctgggacggagtgggcgacagatcgagcgctggcgatgccgcacccgacggacccggaggcggggtccgagcagaaggcgccggcggtgccttatttggcggctgcggcgccggctccggtcaagaagaagcggaacctccccgggacgccagatccggacgccgaggtgatcgcgctctcgccggggacgctgctggccacgaaccgcttcgtgtgcgaggtgtgcggcaagggcttccagcgggaccagaacctgcagctgcaccgcctcggccacaacctgccctggcgcctgcggcagcgtggtccgggcgcgccgccgccgcgccgccgggtgtacgtgtgccccgagcccgcctgcgtgcaccactcccccgcgcgggcgctcggggacctcaccgggatcaagaagcacttctgccgcaagcacggggagaagcgctgggtgggcccgccatcggcaccgcgatacgcgccagcgccggagccactgcgacagcaaccgcccccgcntgcgccgcatcatgcggagccacgtaatgagcctgacacgaatgcgactgaggccgtccagttcgcgccgccgcctccgccaccgccgccgccgccgcagttacagctgccggtgctttcgcaagcttcggtgagcgctgctgccaacgttagcgccagcagcagcagcagcagcgtcgcggggacgtcgcagagcctgctcgccggtatgtctcgcgccctcgtcgatggcgtcagcgccgcagtacgcggacctc

SEQ ID NO: 3939 - DNA, 737 bp, Zea mays
  Clone ID: TF_ZmC547521_1
ccggccgggctcccccaactccccaaggccccaaccgcacccgtcgccccaacaaaacctccgagcagatcactacctccgctagcttcgtcatcccgcttaaccacaccacaccatcctacctttcctcacctctcactctttcagcactctgcttgcctaacgcttgctccccccacctcccactcccagatcgcgccgcggatcctcctcgcgatcgcgtcctgatggctaccaggtcggtttcctgatccctcgatcctcaatcagtctcacggcttctcgcttatcgatggatgtcgtggagctcgatgcggcgaggcatggatgcaaggtctgcggaaaaagcttcctgtccggccggtcgctcggaggacatatgagatcgcacatctcgctcggcgaggcagcgctggaggttcacgccgccgacgagctgacgcctgtttcgtcgaatggtggccggggctgtgacggactggtcgcgtacgggctgagggagaatcccaggaagactcggcgcctatccgactttgctgacgagaaggatgtcggccatggcgttgagtgcgggaagtcgtggaggtctttgttcggccacatacgcaatcatgcgtccggcgacaggtatcacgacgtcgacgacgacgaggacgaggaagaggatgaattctctgtagaggagggggaagcagaggaagcagaaatggtgaggccgacggaggcgcctgtggcgg

SEQ ID NO: 3940 - DNA, 1242 bp, Zea mays
  Clone ID: TF_ZmC65823_1
accaggccccgagtaaacatagtaggacacccgtgtgactgattggttcttggattggggagctccgcctccctctcctcaagtttgaccaaccctcacccacctccctccgtcgtctagtatgcttcttgcctcccgcctgcttcctccgccgccctcctccgccgcggccggttcctcctcatcctctctgatctgcaggttctgacgaaccgaaccgttggggtttcaaatcttcttttgcagactccgatcccaactcaaaacacagagaactctgaaagctaatcggcaatggataaccacatccatagtcagccagctgctaacctctactaccagttcggcatggggactgagcagcaatacccaccaccgttcgcctcaccaccatccaccaacatcccgcacatggactggaacccggccacgatgctagacaacctcaccttcatcgaggagaagatacagcaagtgaaggacgtcatccgcacaatggtggacaacgccgggcaggtgcagagtgccaccaccaagcaggcgagctgctggctcagaagcagaagcagcaggtggtcaacgcggacctgacatgccttatagttcagctcatctccaccgccggcagcctgctcccgtcactgaagaactcgtcgttcctcagccacccccaccctgctggccacgtggacatggctaaccatgttggcccaagctcgagcctagtgcctaatgcgatgaccgtttctgaagactatgaggagctgttcaagggatggaccgatggcggcattgaggtcgacgacgacggcgttcttgtcgaggagcaggaaattaccaaggacggagacagcctctcgtacgagctgctgcagctggaggaggacgagatactggcgccgcacacgcacttttgcaccatctgcgggaaagggttcaagcgggacgcgaacctgcggatgcacatgcgagggcacggcgacgagtacaagagcccggcggcgctggccaagccgccgagggacccgggcgcggagcaggagccggcgaagcggcggtactcgtgcccgttcgcggggtgcaagcggaacaagctgcacaaaagcttccagcccctcaagaccatcctttgcgtgaagaaccactacaggcggagccactgcgagaagagccacacctgcggccggtgccacgccaagaagttctccatcgtggccgacctgaggacgcacgagaagcact

SEQ ID NO: 3941 - DNA, 641 bp, Zea mays
  unsure (1)..(641): unsure at all n locations
  Clone ID: TF_LIB3607-011-Q6-K6-H3
gaactgaagaaacacaactcctcattttccatctctcatctcctacaaacaagagtgtgcatatagcagtatagaaggcgtgtgtctgcctgtcaatttgttgatctcgctagcgcgtgtggctttggcgcatgcaagcagcaggttagctgattgctatcatccgcatcggatccatgtcgggagctgctggtagggagttcaccggcggcggcggcggcggcagtagcagcagcttctcttctgtgagcaacgcatcacctacggaggtggaggaagagttcctgcggtaccacaccaatccgctcctcggtggccccacgacggagatgcgagacgacggcggcccctcggatcagccgccgctgactgtgaagaagaagagaagccttcccgggacaccagacccgagcgcggaggtgatcgcgctgtcgccgcggacgctgatggcgacgaaccggttcgtgtgcgagatctgccacaagggcttccagcgcgaccagaacctgcagctgcaccggcgcgggcacaacctgccgtggaagctgcggcagcgcggcgggccctgaggaggcgctgactgcggcgggccgtcgaggaagcaggtgtacgtgtgccncgaggcgtcgtgcgtgcaccac

SEQ ID NO: 3942 - DNA, 736 bp, Zea mays
  Clone ID: TF_ZmC975_1
atcgccatctgcctcgccgcgctcgccgggacccgcaagttcgggctcggtcgggagaaggaccagcaccagcacaccaagtggtgcccgacgacgacgacaacccacgcgccatctgcgcagcaggagcttcggttccggtgcgcggtctgcgggaaggccttcgccacctaccaggcgctcggcggccacaagtccagccaccgcaagccgacgacgccggagcggtacgccgccgcccttggccaggcggcgacgacgacagcggcccggggcgaccactccgacgagatcacggcgtcgtctctgtcggggtcggcggctagcggcgggtaccaccggtgcagcatcaggcgtcacggctccgaggaactttgaccgctcgctgatgccaagcgcggagactactgggatgacgtgttgggttcgagatccggaggagccggaggtgcagagtcctctgccgatcaaaaagcgcaggattttgaattcatccttgcgccactctcccagcatcgggaatcataggtcattcaattctgggaaaaaggaaagtgggtgcagagttttttcccgattaagaagtgcatgatgtaaaactgactaaacaccaaaaaaaaaaaaaaaaacgtttcatgtaaaaatggatctacgccatcgttgtgtcgttaatttaatttcttttaattaggttctgtttttctggacataaattcgttcaattcattgattcgtc

SEQ ID NO: 3943 - DNA, 1267 bp, Zea mays
  Clone ID: TF_ZmC747_1
caattgtgtctatagagaactctggtgaaaaaggcgcaatggagaaagctgatatgtgtgtggcatcaacttctataacaaatactgatgatacttctctttgtattggaattcactctcatgatagtattgttgaatgccaggattatgccatgcaacatactctttattgtgagaagcaccttccaaggttccttaaacgtgccaggaatggtaagagtcgactcgtttctaaagatatcttcgtcaatctactgaagggatgcacatcaagaaaagataagatatgtctgcaccaagcatgtgaatttctttattggttcttgagaaacaacctttctcatcaacacactagtcttgctagtgaacatatgccccagatattggctgaagtgtctaaaaatccagatgttggagagtttttgttaaagttgatatctactgagagagagaaactagcaaatatctggggctttgatacaaatagatctaagcaaatatattctgaaaacaaagaagggtctctagtgttgcataaagagggaactaatctttcatctggtccgaagtgcaaaatctgtgctcaccagttctctgatgatgaagctcttggattacattggacaactgtccacaaaaaggaagcccggtggctgtttagaggttattcttgtgctgcatgcatggaatcatttaccaacaaaaaagtccttgaaagacatgtgcaggatgtacatggggctcaataccttcagtattcaattcttgtaatgtgaccaggaaggagagtctattcatcacttgcttgtttcttgtgtcctcgcgaggcaattttggtatcttctcctccagcgggtcggcctgtccgcactctcccccgggatggaagatatcaactttgaagcttggtggagtagatcggctgaggttactcctaaggaccttagagatggccttaactctttggtggttcttggggcttggactatctggaggcaccgtaatgactgtgttttcaatggtgctcagccttctatagctagattgcttacctcagccagtgatgagttcaatatgtggtgttttgcgggggccaaaggcttgacccgtctttcggacctagcttttgtgttcaaccccggttagaagggggttattattactagtgttgtttgtgtgtgtgtttgtgggagtggtgtttaggtcattgtaattattatcatccttcttttaatgaaatgatacgcagctctcctgcgtgttcgag

SEQ ID NO: 3944 - DNA, 213 bp, Zea mays
  Clone ID: TF_700432333H1
gaagctcgatcctacgactgtgaacaatgtgtgcaggtctttaagccgtccccaaaacttactaaacatcaggataatttagactggagaggaatcatacaaatgtgaggaatgtggaaaagcttttaacctatcttaacaacttactgacgataagatactttacgctagatagtaagcctacaaatgtaaagtctgtggccgagcctttaa

SEQ ID NO: 3945 - DNA, 424 bp, Zea mays
  Clone ID: TF_LIB3607-020-Q1-N6-H2
gcggcagtagagacggaggcggaggcggtgctgctgcagcaggagcacgacggccaagagcgcgcgaagcggaagcgctcgaggcgccgccgcgaccgcgacggcctgcagcccaaggaggcgaccacccaggaggagtacctggcgctgtgcctcgtcatgctggcgaccggccgccgcgacgccgacgccgcggctccgccgcaggaccacgcgtgctccgtctgcggcaaggcgttcccgtcgtaccaggcgctgggcggccacaaggccagccaccgcgccaagccctcgccctcgccttctccggcggcggcggcggcgctggcgccggagccgggcgcaggacacggtgaccgccacgacgagaagaagccggcgccgtcgttctcgttgtcggctggctccagacccgcggtggcgt

SEQ ID NO: 3946 - DNA, 1124 bp, Zea mays
  unsure (1)..(1124): unsure at all n locations
  Clone ID: TF_ZmC287271_1
gtctccgtgtccgtctgtcattagcatatccttcagagacacccgcagcaaagcaaagcacagaaaagcagcggcattcgcagctgcagcgccatcccttgccttctccacaagcatcaccggacaccggccagccaagccttcccctttgatctccacgcgcggccttcgtccatcctctccgccggtcgaggtcggggcgcgatgggcggcagcggcgtcctcggcgtccaagaagaagaggccggcacaccgccagccatggttgtgccaccggtggtcgtcaaggggcagcgcagcaagaaggacaggacgcgggcgccgccgccgttcccatcgcgatcgccatcgccgtggccgcgagcagcagcggcagcggcagcgccaagcaacatcacccgcgggtccacgagtgctccatctgcggcgccgagttcgggtccgggcaggcgcttggcggccacatgcggcggcaccggccgctggtgccggcggcggcggcctctcgggacgacctgcacgcgccgaggaaggagaagagcctcctggagctggacctgaacttgccagctccctgcaacgaggccgatgctccggagctgacgtccccacgcttcgctttcgccgtcgccgagcagcctccggcgccgctgcccttcccgccggccacgccgtccgcgctggttgactgccattactagtaaatacaacacaccaatcagcccccctcttctctgcttggatcatcatcatacataattacgactgcatacatacatatacagtgacacacacacacatacactacacgccacttcgttccttgctttctagatattcttcttcttctttcttcttctgttctttgtattcttagatcgatcggtctattttgattacattattttgttcatgttcatcaaaagattggggatttggaacgggagatgtgaattatcgggtacagaaacagagacgcgtgtgagattttattanaagttctattgattcattcgntgatttagaatccgccttcctggtttttttcccttctttgacttaaatatgtttttcgttgaattaactagggtttgcttccgactgtcgaaattgcgggtattggg

SEQ ID NO: 3947 - DNA, 557 bp, Zea mays
  Clone ID: TF_ZmC954085_1
cctgcgctgcccttacaagcctgtccaccagccctcttcttctgggggccccagttgcagccttcagcccagagcctggcctggagccctggaaggaggccctggtgcggcccccaggcagctacagcagcagcagcaacagtggagactggggatgggacctggccagtgaccagtcctctccgtccaccccgtcacccccactgccccccgaggcagcccactttctgtttggggagcccaccctgagaaaaaggaagagcccggcccaggtcatgttccagtgtctgtggaagagctgcgggaaggtgctgagcacggcgtcggcgatgcagagacacatccgcctggtgcacctggggaggcaggcagagcctgatcagagtgatggtgaggaggacttctactacacagagctggatgttggtgtggacacgctgaccgacgggctgtccagcctgactccagtgtcccccacggcctccatacggcttgccttccgcccgcctggagctgccagagctgctggagcccctagcacctgcctagtccctgca

SEQ ID NO: 3948 - DNA, 617 bp, Zea mays
  Clone ID: TF_20507554
cgtcagggaggccaataagacttccgctgccgccatggtgaagacgacgacgactacgaccaataaggaggagctggagagcccgtcctacaggtagcagcgtcaagagcctcttctcggcaggaacagccacgctcggccgcgggcgccggacaccggcaacaggagcaagagggggttgggctgctccgcgccggccatctgcaagctcaaggacgacagcgtgcccgcgccgcccaaggaaaccacgggcacggcgtcggcaggcgagccctgcaagcgccgcgcgtccgtgagcgggagcagcgatcggtgcgtgaagaagccccagtgtggcgctggcagcaacaagcagctgcagcgtggcgggtcgtcgtcgtcgtcgggcgggtcgtcgatcagggccggcatgcagctgaggcggctttcggggtgctacgagtgccacatggtggtggcgggcagcgcctccatgagggccaccaccatctgcccctgcccggactgcggcgaggtgttcgtcaggcaggagagcctccagctccaccagtccatcaggcacgcagtgtccgagcttggcactgatgacacgagccgcaacatcatcgagatcatct

SEQ ID NO: 3949 - DNA, 383 bp, Zea mays
  Clone ID: TF_LIB3088-019-Q1-K1-F8
cggacgcgtgggtctcctcaccatttgggctcctgccgagagctcaccgagctcggaccgtcgaaaggcgcaagcccggtggacatgccgaataacacatgcaagctctgctcccggcgcttcaccagtccccgcgccctcgccggtcacatgcgctcccattccctcgtcaaagctcatgctgaggccgcggaggcagcgaatcggctgatctcttctgcatcctccacgtccaccttcttcatcgccgccgacgactaggacgtcatctcgaagattcccacttccacccacggactctaatagaatccgaatcgcagccttctgttactcgattccagtttatcatatcgcgaaagctagtctgaatacacctcatcgta

SEQ ID NO: 3950 - DNA, 578 bp, Zea mays
  unsure (1)..(578): unsure at all n locations
  Clone ID: TF_LIB3959-020-Q1-K6-D10
gcgttctgccgccgcaaccggnagagagagagaggcggatacacaaacacgaaaccctagcaagcaagccctccacgcacagtcaagaagggagggggaggcgatggagtacccggcgacggccgccggatcggggagccacaagtactactacccgcagcagcactcgcactcacagccgcaggcgcttcgccgcccgccgcgccccgccgctcggtgggtcaagcaatggtgcgttcttaacttccctccctctccctgaaataagataatttccgcttcttctgactggaattaacctgagctaatccattgcgtgcggtggccattggtttcgggtgcgcttcgtttcccaggatcccgcaggatctcgcgtcctccggcggcaaatgctcgctcttcaagtgggtcagagaggatgggtacagaaactccaaggacaaccccagagtgttagatgtagaagcccccaagcctgaacccaccacggagatcctcttcctctgcagctacgagaactgcggcaagacctttgttgatgtcagcgcgctccgcaagcatgctagcgtgcacaacga

SEQ ID NO: 3951 - DNA, 333 bp, Zea mays
  Clone ID: TF_ZmC172980_1
agagaggggcgttgtggcgctggctagctatagctcgatccatcggaagaagttgaaccacacatcaactaacctctctgtcgtctcgcggcgatgtgtgaatctccatcatcctcgagaggccggtggcgccatagatatgatcagaagacaccgtcgactcagaaacgcggtgatgtgtgaatcgtcaatgttcctgatgtcgccgtctccgtcaccgtcaccgccgcagccgtctaggccgccaccggagtacaagcacttctgtcgagtatgcaacaagggattcacgtgcggcagtgcgctcggtggacatatgagagctcatggcgc

SEQ ID NO: 3952 - DNA, 405 bp, Zea mays
  Clone ID: TF_LIB3151-023-Q1-K1-G2
cttgccagcagctctctctatcgctccctcacgctctctctcctcaccatttttgctcctgccgagagctcgccaagctccgaaaggcgcaagttttcttgccatggggaagaacacatgcaagctctgctcccgccgcttcgccagttcccgcgcccttgccgggcacatgcgctctcattacatggccgcaactaaggagacagcggcgactgcaaccgcagcggctgcggcagccgcagcaacggcgcaacatcacatctcttcggcatcatccgcgtcaacctccatcgccatcgccgacgaggaagtcggctcgatgatgaccgcttccaccaacgggctccgggagaatacgaagcgcacccttggcgtggcggatgtacgtttctcggatcgcgagag

SEQ ID NO: 3953 - DNA, 377 bp, Zea mays
  Clone ID: TF_LIB3245-338-Q1-K1-B10
ctcaatccatgtggattgggtgggattgagtgggtttcaatcccaaataagtcaaaatcggggatgggtggttccaatctcatccaatccacatgggataggaataaccgaacaaagtcttactgggtatgaatttctgctcgtgagataattttgtaatgagacaaatataggctgtttgcctgcagaatccaggtgcttcggctatgaaccatagtgcaattggagaacagcatcagccccctaagccagcaaaggtctcagcaacgcctccagctccctcagctgagcgcccttacgtctgcccctacgatggttgcgacaaggcatacatccacgagtacaagctgaacctccatttgaaaaaggagcatccc

SEQ ID NO: 3954 - DNA, 394 bp, Zea mays
  Clone ID: TF_LIB3245-075-P1-K1-A9
ctagaactgtagacctgcatggttaatggcctggtggtgctccaaggtatcggccttggtgaacacctcgccgcactgcgggcacgcacacagctccctcggcctcgggtaccgcctgaccattaaccatccattaatcacggttagctttgccgcaatcaccagtcaccacatcatgattaccttaatcatcatccagctcaaaagctccatagtctaattagtaatcataaaactaatattgagctagtagctgggacggatcggacggacctcgacatgggctccacgttgatggcgcggcactcgtagcagccggagaggccccgcaaggaggagtgggggctgctgctgctgctgccggcgcccggcgccggagacgacgactaggcgc

SEQ ID NO: 3955 - DNA, 569 bp, Zea mays
  Clone ID: TF_LIB4762-051-R1-K1-D5
ccggggcatagctagctagctctcaatccatgaactcctccagcgccaccgctatggatcaaataggcaagtactggggcatgtggggagcaaggagaagcagcagcagcagcagcagcacgatccccatctctgcttgggctgcggcgtacggcggcagcagcgagccgtcgtgggaggagcaggccttcgcacgcgacgcggcggaacacctcggcggctgcgtctggccgccgcgctcctactcgtgcaccttctgccagcgcgagttccggtcggcgcaggcactcggtggccacatgaacgtccaccgccgcgaccgagctcttctccggctggggggctcgtcctcccccgaggacgtgcacgccaccaccaacgatcagccacacccgcagcaaggggatggagatgccaacaccaccaccaccactacttacttgccaagaattatcaaggagagcaagaacaagcgctttatgcccatgccagatcactctgtctcgtagatgacacaagatcatgcgtcggccatgagagatcatcctcaccatgaagatgggaacagc

SEQ ID NO: 3956 - DNA, 935 bp, Zea mays
  Clone ID: TF_ZmC32995_1
ccacgcgtccgaaattgctgacctccgtcatcagcatcttctctctctctctctctctgctgagctgcttactcattccagcttcaattttctttgtccgtgatctagctagcttgcatgtctctctagagtcgatctgaatcgatacaattgagactagctactatgagtttgcagatgcatagctagctagctctcaatcacatgaactcctccagcgccaccgctatggatcaaataggcaagtactggggcatgtggggagcaaggagaagcagcagcagcagcacgatccccatctctgcttgggctgcggcgtacggcggcagcagcgagccgtcgtgggaggagcaggccttcgcacgcgacgcggcggaacacctcggcggctgcgtctggccgccgcgctcctactcgtgcaccttctgccagcgcgagttccggtcggcgcaggcactcggtggccacatgaacgtccaccgccgcgaccgagctcttctccggctggggggctcgtcctcccccgaggacgtgcacgccaccaccaacgatcagccacacccgcagcaaggtgctctcctgtacagggcagcagcctctaaccctagcactaccacgccgagtactactgcagctgcaggtactactgctgccggcccagcagcagccataaccatagcaggtgcaggggatggagatgccaacaccaccaccaccactacttacttgtcaagaattatcaaggagagcaagaacaagcgcttcatgcccatgccagatcactctgtcgcggggatgagagaagatcaggcggcggccatagatgatcatcgtcataatgaagatggcgacagctggcggtcagcctcagccgcggaaaagaggaggcgtctggatcatccgttggcaacggcggcggcgcttctgatctttgt

SEQ ID NO: 3957 - DNA, 831 bp, Zea mays
  Clone ID: TF_ZmC32995_2
ttatctacaaattgctgacctccgtcatcagcatctttctctctctctctctctctctctgctgagctgcttactcattacagctccaattttctttgtccgtgatctagctagcttgcatgtctctctagagtcgatctaaatcgatacaattgagactagctactacgagtttgcagatgcatagctagctagctctcaatcacatgaactcctcaagcgccaccgctatggatcaaataggcaagtactggggcatgtggggagcaaggagaagcagcagcagcagcagcagcacgatccccatctctgcttgggctgcggcgtacggcggcagcagcgagccgtcgtgggaggagcaggccttcgcacgcgacgcggcggaacacctcggcggctgcgtctggccgccgcgctcctactcgtgcaccttctgccagcgcgagttccggtcggcgcaggcactcggtggccacatgaacgtccaccgccgcgaccgagctcttctccggctggggggctcgtcctcccccgaggacgtgcacgccaccaccaacgatcagccacacccgcagcaaggtgctctcctgtacagggcagcagcctctaaccctagcactaccacgccgagtactactgctgccggcccagcagcagccataaccatagcaggtgcaggggatggagatgccaacaccaccaccaccactacttacttgtcaagaattatcaaggagagcaagaacaagcgcttcatgcccatgccagatcactctgtcgcggagatgagagagatcaggcggcggccatagatgatcatcgtcatcatga

SEQ ID NO: 3958 - DNA, 447 bp, Zea mays
  Clone ID: TF_cC-zmle189065b10d1
gctgagtaatgtattatttcttaagctctcgcacaacagtctttatcttattatagactactccagctagctgcaggggagcgggaggagctggacctcgagctcagcctccagccctgctcggacttggcggcggaggcggcgccttccggcttcttcgtctgtacctactgcgaccgcaagttctacagctcgcaggcgctcggcgggcaccagaacgcgcacaagtacgagcgcaccctcgccaagcgccgtcgggagaacgtcgacttcatgcgcgcgcacggcgcccggcaggacgacccctacgacgcctacgggcatcatgagatgatgaggttcacgcttgtggaagcgcgttaggtgcctgctgtgcactctgccgccttgctgcgcggcacgagcagctctcttgagcacggcggcgagtcgctggatttgtctctg

SEQ ID NO: 3959 - DNA, 927 bp, Zea mays
  Clone ID: TF_ZmC29465_1
cggggcaactcggcggctgcgtctggccgccgcgctcctacacgtgcaccttctgccgccgagagttccggtccgcgcaggcgctgggcggccatatgaacgtgcaccgccgcgaccgggctcgcctccggcagtgcgccccgccggatcatgaccaggagccgatcgccgcgcctcttccagcgccggaattggcggatcaccagcagcagcttctgcaactgcatggatctcccatgaccaaggcggcagtattattctctggccgccctgctgctgcttgctgtactcatcagcaaacttattgcaataacaacagggagggggagggggaggattctcctgctcggtacatatcaacgacgacgaccatcatcaaggacagcaagagcaaggtactcatctccatacctgcagcaacgacagcaacggggagcaaaaaagccgctactactatagcaatcatcggtgaggaggaggaggaggaagaagaagaggaagagatcatggtgacggggcggaggacgaaacgaaggcggctagtccatcagccgttctacgacctgcggcggcttccgccggcatcatcatcacccaataaaggaggagttgaagatgatgatgcaaaggtacccaaattaagcagccctagtagcctcagtcatcatcttgcaggccggcaagaagaagtggatctggagctcaggcttggcactagctgctagctagtcgcgatccgccgtccggtccctaaattaagttgcgtgaatggatccatatatctctcttttcacttcaccataattaagatcgagtgtgtgcgtgcacaactgaatcatatatatcatctgctgcttgcttcattcatatatcatatatatagtatgcttctcgtgaaaaaaaaaaaaaaaaaaggcccctagggcc

SEQ ID NO: 3960 - DNA, 886 bp, Zea mays
  Clone ID: TF_ZmC13146_2
cccaatcacaccagctctctctagagctagccctctcttcctccaacacttgttgatcccctcccatctcctcaagccttcttcactgaatttctggccggtcgatcgtcatgcacagctacagagccatgcacccgtacactcatcactcgtaccagcaccacaccgcggccgttgcgcccaccaagcacggccacggccacggacatggacatggccatggcgacgaggaggacgaccagtccatgctgctcctctccctctggcctcctggccaccaccacggcaacgccgctgcttcatcggcgtgctcgtctcccccgatctgcgccagcgccaccaccacctctatggcagccgctgcctcctcccccgcttcttacccttggctcacccaccaaagcctttacaataatgccggctgcggcggagggagcagcagcagcagccacagtagcttcctgttccaggagcatcagcaggagccaggtgtcagcatctcactgtccatagccccgccgtgcagcaacaacgcggcttcgtcctgtggtggcggtggcttcgctgcaccgccggcggcaccgtcgacggtgacgacgaccgtgacgccgggcgggggccaggttcccagacagtactggatcccctccgccgccgagatcctggtcggctccacgcagttctcctgcgccgtctgcaacaagaccttcaaccgcttcaacaacatgcagatgcacatgtggggccacggttcgcagtaccgcaaggggtcggagtccctgcgcggcgccatcacggtgggcacggctccgccggcgtcgctgatgcggctgccgtgctactgctgcgcggaaggctgccggaacaacatcgagcacccgcgggc

SEQ ID NO: 3961 - DNA, 749 bp, Zea mays
  Clone ID: TF_ZmC53387_2
acaccacctgcgcatcttctttccgagcagtacgtacgtagctgaattgctgaaaagagaggcagagatccgatccggaccgcgaagagacgatgactcacccgaggccggatcatgaaccgtcgggcgaggtgtcgctggcgctggcgctgagcacggactcgtccggctccgcgggtgcaccggcggcgaagcgggcgcggcggaggggcgccgcggcggccacgtcgggggagggggagttcgtgtgcaggacgtgcagccgcgccttcacctcgttccaggcgctcggcggccaccggaccagccacctgcggggccgccacggcctcgagctcggcgtcggcgccagggcgctcaggcagcagcacaagcatcatcagcaggccggcggcggcggcggcggcggcggcggcggaggaggaggtggagacagggagccgcaggcgcagcacgagtgccacgtctgtgggctcggcttcgagatggggcaggcgctgggcggacacatgaggcggcaccgcgaggagacgacgacgggcgccgccgatgcctgggtctggcgcgccgacgacgcgctgcagcgggcccgcgggggcgccgccgacccgcccgtcttgctcgagctcttcgcctagctagctagatgatccgtagcggcggcattgattagtatataatccacccaggacatgtaaatcttcttaggccctgtttgggaacaaagtttttgaaaaccacagtttttg

SEQ ID NO: 3962 - DNA, 528 bp, Zea mays
  Clone ID: TF_ZM4161.C2.o1.fg
atgactcacccgaggccggatcatgagccggcgggcgaggtgtcgctggcgctggcgctgagcacggactcgtccggcggctccgcgggtgccccggcggcgaagcgggcgcggcggaggggcgccgcggcggccacgtcgggggagggggagttcgtgtgcaggacctgcagccgcgccttcacctcgttccaggcgctcggcggccaccggaccagccacctgcggggccgccacggcctcgagctcggcgtcggcgccagggcgctcagccggcagcagcacaagcatcatcagcaggccggcgacggcggcggaggagacagggagccgctggcgcagcacgagtgccacgtctgcgggctcggcttcgagatggggcaggcgctgggcggccacatgaggcggcaccgcgaggagacgacgacgggcgccgccgacgcctgggtctggcgcgccgacgacgcgctgcagcgggcccgcgggggcgccgccgacccgcccgtcttgctcgagctcttcgcctag

SEQ ID NO: 3963 - DNA, 859 bp, Zea mays
  unsure (1)..(859): unsure at all n locations
  Clone ID: TF_ZmC53387_1
acccacgcgtccgcccacgcgtccggcacaaaacacatcaccgcatctttttccttccgagctgtacgtatctgcagagagagagagagagagagagagagagagaaagattaggtcagagaccatgaagcacccgaggccgacggagcaggatgtgtcgctggcgctgtcgctgagcacggactcgtccacgacgacgtccgactcggcggggacgccaccggcgaagcgggcgcgggcgcgggcgcggcggcggggcgccgtggtggccacgtcgggggagggcgagttcgtctgcaggacctgcagccgcgccttcccctcgttccaggcgctgggcggccaccgcaccagccacctgcgcgcgggccgccacggcctcgacctcggcgtcgtcggcgcccgggcgctcaagcagcacaagcagcaggccgccaacgccaacgccaacggctgcgaaggaggcaagcagcggcacgagtgcaacgtctgcgggctcggcttcgagatgggccaggcgctgggcggccacatgcggaggcaccgcgaggaggagatgggcgccgccgacgcctgggtcaccctctggcgcaccgaggcgtcgcgcgccgccgacccgcccgtcttgctcgagctcttcgcttagctgattagatgatccgtagcgccagccggcattgattagtataatccacccagctggacatgtaaatcttcttagtggctgcatgcagctggttgcttgcttgctttgcttctgtaattataattacgatggtacgcacgtagttggattncnnnccctngatgattcatttggttcatcccacaatctacatgcatccgtcaaatatcatct

SEQ ID NO: 3964 - DNA, 2024 bp, Zea mays
  Clone ID: TF_ZmC205_6
tcgttcacgagttcgtctctcgatttattgtctgccacacctcccttcagctagctatcttcccctagctagctaggtaccagtagtgtgtgtatatatagatagatttatagatatagacacacacaacaagtgcaagatcaggcgaaagctactagccgcccttgcagtcttggactccattcgtcgtcgtccttgggttctcctcctcacctagctactatgttccaccatcagcaggagctcttgcaggcagaagctgcagcggcagatcgggagagcagcatgtccaacctcacctcctccacgtccggcggccccaacgcggcgcctgctgctgctgctgctgccccgccggcgcccgcggcctccggcaacaacaagcggaaacggagcctcccaggcaaccccgaccccgaggcggaggtcgtggctctctccccggcgacgctgatggcgacgaaccgtttcgtgtgcgagatctgcgggaaggggttccagcgggaccagaacctgcagctgcaccggcgcggccacaacctgccgtggaagctgaagcagcgcggcacgggcaaggaggcgcagcggaggaaggtgtacgtgtgccccgaggcgtcgtgcgtgcaccacgaccccgcccgcgcgctgggcgacctcaccggcatcaagaagcacttcttccgcaagcacggcgagaagaagtggaagtgcgacaagtgctccaagaagtacgccgtccactccgactggaaggcgcactccaagatctgcggcaccagggagtacaagtgcgactgcggcaccatcttctccaggcgggacagcttcatcacgcaccgcgccttctgcgacgcgctcaccgaggagagcgccaaggccatcggcctcaacgccatggcggccgtgccggcgcagcaccaccaccacccgatgctcttctcgccgccgcccacgcacgtcatgcagcaggacgtcgccctcctccaggagcaccaccaccaggaggtcatgcagcaggagcactgcaactacgccatgaagacggagatgccgccgtggccggggatgacctacgaccacccgctgctgcagccgctctgcaacgccgccgcaccgcagagctcggccacgtccacgccgccgccgccgacgacgatgcagcttcccgctgcctacgcgcacctatcggccacggcgctgttgcagaaggcggcgcagatgggcgccaccgtcgccggcgcgggctacacccagatggcgggggccgcgacaagcgccaccttcggcctcggcctcccggacctgcagaatacccagcagcagcagcatcaggacggcgagatcatggccgggctcgcgaggacagcctcccacggccgcggcggcgaggaaggcggcggcggcggaggcgacggcatgaccagggatttcctaggcctgcgcgccttctcccaccgcgacatcctcggcctcgccggcttggactcctcgtgcatgggcgccatcatcagtgccagcgccagcatgaactgctacgacgagccacagcagcgtgcacaggctcaggcagagcagcagcagcaaagcagcaacgagcaatggcacagcatgggcagccatcaaagctaggtcgataaaagctactttcttcttcctctcgccagccgtcatcggtacgtcgccatcgctgcatctcatcgctgccgtcgctgtgcagaggcaaagctagctagggccggccgctcggtgcaccgtgccttttgctcatcttttgcttctgttcaggatatcatctcatgcatgtggtaaccacgcaagcgatcaaaccgttccgatcaaactctagcccggtccaaggatggtgatgacagattggtgatacagaggtacgcagggagttgtataattttttttttttgggttggcgaagagatcggccaacatgtaagctaagctccaatcaagggaagaaaaccatagctatatgtgacagtaataatacatgcatgcattcatcatctttt

SEQ ID NO: 3965 - DNA, 704 bp, Zea mays
  Clone ID: TF_ZmC7589_1
ctgagctgcggcctgtggggtcggtccgctgtggcctgggtgatggtgttctaggcgagtaggtgggggcgctgttgtgatctctgcctcgtggtgttcaagacagaagctgagcttgctgtccacaagaagaacatgtgcacggtcagttcatgcagcagacatttcagatcccacagatacctgaggcgccaccagagtgcacacaacgatgatatgccttacaagtgcccatgggatggttgtaatatggctttcaagtggtcatgggatcgggctgagcatttcaaggtccatgctggggccaagccttacaaatgcacgacgcctgggtgcagcaaaatatttaagtttgtttcagatttcacccggcataggaggaggtgcaaacctcagaggtaaaagcttgcttgatactacagaattaggataatagtgaagtttgtgcttgctacagacctacagtagatgttttttatttgctaggagatccatcgtgcaactgttctgacaacttatagtgggactgtctgtttctttgttgaggaaaatgctaaaatcgttagcttagaaactcgagtttctcaaaatgtatgtacatttgcggaaggtagttgtgcactggttctggttatgatcgcgctgtatcggatctgagacttagagctgtaaatgggaaggtattatttattttattttgtttc

SEQ ID NO: 3966 - DNA, 1533 bp, Zea mays
  Clone ID: TF_ZmC342_1
tcagcctgtaaattctgataatcatgccaaatatgaagatggagatgaaagtgaaagtgtggaagcacggaacacccgacatcatcaacaatatgaatcgctaaataaaaaatcaagtttgaagaggcgaaaggataataatagaagcaacagctttcatgagctacacaaggacaatgttgacattgactgcaggtttgatacagacggcactgaaaacacctcaataggtgactgggataatagtccaccacaagggggtgatgtcaaagcagtgaaatctggtgctcgattgctaggcactaagaggtttagcaaggagaagggaagtaatggtttgtcaaatgtaaacaagaaattggtaaagatgggtaagaaaattagtactaagaagcaaaagaatgacaaaacaaataggcagtttcaagaaaatcacaaaaaagctgacattgtggatttgcttcatgaagatgatggagatgaaggcacatacatagactgtaatgaaattcgaaaacaaaaaacagatgacgtgagagtaaaatctagaggcaaaatgcaaagtggcaagaaaaaagtcagcagatgtcaggcaagtgatggttcgcacaatggaggcaaggaaatgaaattatcaagtgacatagaagtgtgcaacagaagaggagatggaacaacggcagccaattttgaagaaattccaaaagaaaaggccgatgctgtgaaagtgaaacccaagatgcaaggtgacaagaaaaaaaccagtaaacatcaggcaggcgatggagataaaggagcaaaattttcttgcgatatagaagggtgtgacatgagtttcagcacccagcatgacctgtcgctgcacaagagagacatctgtcctgtcaaaggatgcaagaagaagttcttctgccataaatacttgctccagcaccgcaaagtgcacctggatgaaaggccgctcatgtgctcattcccaggctgcgcgaagacattcaagtggccatgggcgaggacagagcacatgagggtgcatacaggggtgcgcccgtacgcatgcacggaacctggctgcacccagacgttccggtttgtgtcggacttcagccgccacaagaggaagactggcactcgtgtgacaagaaaaagaaacgcggcctttgactgctcgtgcacaagtacaggtttcttctctgacggcgagcgatcagaaggggatggatgctaatcgaataattgcgccaggttccattgtttgcagaattaatctgcattaggagtctaattcatttcattgtttattaccgctgcaacataacagctcattcactgtcgctttaggtccaactgacctgctggtgactgagattgtaccatgtcaattgtatcgttctttcgttcatacttagaaatcgggaagtttctgttgacaggaacgttggatttagtgtacggcgcctgttattaacatgcgtgtaattctgtactgaagtgctcctttcttatttttacattttttaaaatctggaaaaa

SEQ ID NO: 3967 - DNA, 1134 bp, Zea mays
  Clone ID: TF_ZmC97_2
aattcggcacgagggccaagcaaccagtaaccacagccagccaccaccgcgagaacaagtcgcagccaagagaagtcgtcctcgcgcgcgtctcgatctcccagcgaagctagagcttgccgtgtgccgtgacttccatggagctactccacgccgtcatccatggagctgcgacgacgacgacgaccaccaccaccaccaccacgagcagcagcgccaccgtcaccagcggcgacgagggcgcccacctgccccaggggtgggccaagaagaagcgctcgcggcgccagcgctcagaggaggagaacctcgcgctgtgcctgctcatgctctcccgcggcgaccgccaccgcgtccaggcgccgccgccgccggtcccgtccgcggagttcaggtgctccgtctgcgggaagtccttcggctcctaccaggcgctggggggccacaagaccagccaccgggtcaagctgccgacccctcctgccgctcatgtccagctcccggcaccaccggcagtggccctcttggtggaggcccccgcaccaccaccagtcactgccaccccgcccccgctgccgctagtcgcggtcgccgtcgccgtccgtgagccggccacgtcgtccacctccgacggggcggccgcgagcagagtccacaggtgctccatctgccacaaggagttcccgaccggccaggcgctcggcgggcacaagaggaagcactacgacgggggggtgggcagcgccgccgcgtccaccgaggtcccgggggcgcccgccgagacgtcccccgaggtcgggagctcccccgcgcgtgcgtttgacctcaacctcccggccgtgccggagttcgtgttccggtgcggcaagcccggcaaaatgtgggaggaggacgaggaggtgcagagccccctcgccttcaagaagccccgccccctcatgaccgcgtgaaacccctgcgcgcgcgggcggcggatccccccccatcacccgtccaagattttggtccgcagctgccgagttcagcggtggaagtggaacacactattcgttcattcatttcgtatggtgccagtagcgctattgtttgattttaaaaaaaaaaaaaaaaaaaaaaaaaaaaaccacaaaaacc

SEQ ID NO: 3968 - DNA, 777 bp, Zea mays
  Clone ID: TF_LIB4743-089-Q1-K1-F8
cattgggtacctcgaggccggccgggggtcctagagggagagagtctcgtcgaactcgaagggcgcatgctccggttgctagctacgataccgtgtgcgtagctgcggcagcccttgatcgatcaatcgatcgcttgtgcggaaggagccggatcgagtggagtcagctagctagatactccgtggtcgtcgttggacgtacgccagaagagggagctagagaagaataccgtacagctgcttccaacatggcagctgcctcgtctgcccacctgttcggactcggcgacgggcagatgcagatgcagccgcagcagcagcagcaggcgccacctcctcctcttgtgaacaacccggccgcggcagagccgccgcccaagaagaagcggaaccaacccgaccctgacgcggaggtgatcgcgctttcccccaagacgctgatggcgacgaaccggttcgtgtgcgaggtgtgcaacaaggggttccagcgggagcagaacctgcagctgcaccggcgcgggcacaacctgccgtggaagctgaagcagaagaaccccaaggagacgcggcggcgggtgtacctgtgcccggagccgacgtgcgtgcaccacgacccgtcccgcgcgctgggcgacctcacgggcatcaagaagcactactgccgcaagcacggcgagaagaagtggaggtgcgacaagtgcaacaagcgctacgccgtgcagtccgactggaaggcgcactccaagacgtgcggaacccgcgagtaccgctgcgact

SEQ ID NO: 3969 - DNA, 1654 bp, Zea mays
  Clone ID: TF_ZmC205_5
gcttagcccggcggccggccagaactgcaagagagaagaccaagaaacagagagagacaagcgcaggggacagcagcgggtagctagctagctagcgatcgacgacagacgatgcagatgatgatgctctctgatctctcgtctgacgaccacgaggccactggatccagctcctatggcggggacatggccagctacgccctcagccctctcttcctcgcaccggcggcctcggccaccgcgccgctgccgccacctccgcagccgccggccgaggagctcaccaacaagcaggccgcgggcggcggcaagaggaagagaagccagccgggaaacccagaccccggcgcggaggtgatcgcgctgtcgccgcgcacgctggtggcgacgaaccggttcgtgtgcgagatctgcaacaaggggttccagcgggaccagaacctgcagctgcaccgccggggccacaacctcccctggaagctccgccagcgcagcagcctcgtcgccccgtcgtcggcggcggcaggctccggcggcaggcagcagcagcagggcgaggccgcgccgccgcgtaagcgcgtctacgtctgccccgagcccacgtgcgtgcaccacgacccggcgagagctctgggggacttgactgggatcaagaagcacttctcgcggaagcacggggagaagcggtggtgctgcgagcgctgcgggaagcgctacgccgtgcagtcggactggaaggcgcacgtcaaggggtgtggcacgcgcgagtaccgctgcgactgcggcatcctcttctccaggaaggacagcctgctcacgcacagggccttctgcgatgccctagcagaggagagcgcgaggcttcttgcagcagcagcaaacaacggcagcactatcaccaccacgaccagcagcagcaacaacaatgatcttctcaacgccagcaataatatcacgccattattcctcccgttcgccagctctcctcctcctgtcgtcgtagcggcggcacaaaaccctaataacaccctcttcttcctgcaccaagagctgtcccccttcctgcaaccgagggtgacgatgcaacaacaaccctcgccctatcttgacctccatatgcacgtcgacgccagcatcgtcaccaccaccggtggtctcgcggacggcacgccggtcagctttggcctcgctctggacggctcggtggccaccgtcggccaccggcgcctcactagggacttcctcggtgtcgatggtggcggtcgtcaggtcgaggagctgcagcttccactgtgcgccacagcagccgcagcaggtgccagccgcaccgccagctgcgccaccgacctgacaaggcagtgcctcggcggccggctgccgccggtcaacgagacctggagccacaacttctaggcccgctatatacttcaagctgcattgagactttgagagacgaatgaacggaacacccaaactgcatgcactctagcttgaagagcaaccaaaactggagtagcaagtatggtgcactactgttgttaatttaccttaatttattgatctctgttagttctattttcatttagggcaatgcgggctagctaattaattcgatgtgcacaacttttgatgaatggaccagaaagtttatctt

SEQ ID NO: 3970 - DNA, 733 bp, Zea mays
  unsure (1)..(733): unsure at all n locations
  Clone ID: TF_LIB4172-014-Q1-L1-E2
gacgcctgcaggtccggtccggaattcccgggtcgacccacgcgtccgggcagcggtgcgggctttgtggccgcccggggttacccgcctggatgctgctcggcttggttccgcgccgtcctctcgccgccgagctccggattctcctgtagggagccagtggcaagaaggggatccggaagcctgaatttctggggatgaaaattcacataagatgatgtcagacgaactcacagtgctggagccctctgcctctgagtctcgggaatttcatgaagacagattggcgcagctgttggggaacccagacaagcagagcttggagagtccctcctctcaggacgggggcttcactcagatgacagtgacccactggaagattcaaacaggagacacagcccaaacgtgcagtaagtcaggaagaaaccccattctcaattcaaaccttcttatacttcagagagaactcatagatgcggaggcccgttcctgtggtggtggtggcaaaggcttcccatttaattcagatgtagttccgcatcagatctcgcacacgggggagaagccttacaaatgtgatcattgtgggaaaggcttcagtcagacctccctcctcactgaacaccagagagtccacactggggacagactctgtgtgtgccacgtgtgcggganagacttcgttcactacgcaagcctgagggagcatcagcatgtccatactggngaaaag

SEQ ID NO: 3971 - DNA, 1779 bp, Zea mays
  Clone ID: TF_ZmC13442_1
ctgccctcctttttctttgttttaggtcaacggtttttctgtgatttatgtgggaggtcttacaagtacaagcagaatatgaccgctcataaaaaatacgagtgcggacgcgagcctaaatttcaatgtgtcgtctgctttaaaaaatttaaagtcaaaagcaatttaaaagcccatttagccgttcatggattagcttcttattctttttgattcctaattttttaaaaaattatgttcctgacattttgcttccgtttactccgaaataagcaaaaaaatttttcgtcccaagggtctaatttacgaaaaaaccaaattttatcgtccaatgtatataaagactgtaaataaaaaacattttttaatgaatttgtttaaaaaatacattttttctaacattgtaaataaaccatattttccttcctccctttccttatttgtttatctttattattatttttttttattatttattattttttttaggtctctttgtatgccctcagtgtggaaggtcttatcgaaagttgggcactttgagccgccatgttaaattcgaatgtgggcgcgaacgtcaatttaaatgccacatatgttctaagccttttcacaggagagacgtacttaagcgtcatatggtcatacacagcataaatatttttccttagtttttgttttttttttctgttatattttttctgtatattttatttctattatattttatttttatttattttgttttctaatctatttttgactcctcacttttttcggagactgtcgacctgagaatccatggaaatatggggaaagccccccgcctaggtccctccctgttacaacaaaatagggctttcgcttttatgtcgctgtactcatgattttataacctgaaaattttgtttctttttttattgatctatgttgtttttagggttttattgtgaatgcggtaaaagatatttacgtttgaacacgttgaaccgtcacaggcggtacgagtgtgggaaagaaagacgtttcatatgtactttttgtaataaagcttttaaaagaaaggaccacctacaggtccacctgttatccgctcgtcattaaatatcaagtaagcgttgtttttcttgatgggcccatggcgggggctttaccgttaggccaaaaggttattccattttttttctgttatgtttttgttttaaatcaaatatttgacatttttcttttgtttttagttaagccaccatttctgtgtgtctgcgggaggaaatatcaccatctcggcaatttgactcgccataaaaaattcgagtgcggtcaagaaaaacgtttcgtctgctcaacctgtgggaaagcctttaaaagaaaagaccaacttactgcccactctattcaacactatcctcaccaataaattattttgaacattttcattttttttaaaccctctcattttttccattgattttcagcaaacaaaaattagttttaattaaaattttgtttttaatttttttccttctttttttatagatgggttattcatgtgcttccgttgtggtaaaaagttgaagaacagcaccgtcctttaccatcatgttaactacacttgtggtgtcgagccgaaatttcgatgtgaagtttgcagcaaaatgtttaaaaggaagacaaatcttaaatctcattatattgccatacatggacaagatacttaaattgtccagataattaattaattattggtttaattaaataataaataattatttttaaaaa

SEQ ID NO: 3972 - DNA, 970 bp, Zea mays
  Clone ID: TF_ZmC205_16
accctttcccttccgccgcgttcctacttggtcctagagggagagagatctcgaactccaagggcgcatgctccggttgctagctacgatgccgtgtgcgtagctgcggcagcccttgatcgatcgatcgatcgcttgtgcggaaggagccggatcgagtggagtcagctagctagatactccgtggtcgtcgttggacgtacgccagaagagggagctagagcagaataccgtacagctgcttccaacatggcagctgcctcgtctgcccacctgttcggactcggcgacgggcagatgcagatgcagatacagcagcagcagcaggcgccgcctcctcctcttgtgaacaacccggccgcgccgccgcccaagaagaagcggaaccaacccggtaacccaaaccctgacgcggaggtgatcgcgctttcccccaagacgctgatggcgacgaaccggttcgtgtgcgaggtgtgcaacaaggggttccagcgggagcagaacctgcagctgcaccggcgcgggcacaacctgccgtggaagccgaagcagaagaaccccaaggagacgcggcggcgggtgtacctgtgcccggagccgacgtgcgtgcaccacgacccgtcccgcgcgctgggcgacctcacgggcatcaagaagcactactgccgcaagcacggcgagaagaagtggaagtgcgacaagtgcaacaagcgctacgccgtgcagtccgactggaaggcgcactccaagacgtgcggaacccgcgagtaccgctgcgactgcggcaccctcttctccaggagggacagcttcatcacccaccgtgcgttctgcgatgcactagcgcaggagagcgcacgggtgccgcccatgggcgccggcatgtatggcactggcggcatggccctcggcctctccgggatggccacatcacagttgcagtcattccaagaccagacccactcctcgg

SEQ ID NO: 3973 - DNA, 2200 bp, Zea mays
  unsure (1)..(2200): unsure at all n locations
  Clone ID: TF_ZmC205_4
cattgggtacctcgaggccggccggggccttttttcgagctgagctgagcatcatggggtagtgtgtgtgtgaggcgatagagaagctagtgctcataaccaaccaccactcagtcctcctcctctaccctttcccttccgccgcgttcctacttggtcctagagggagagagatctcgaactccaagggcgcatgctccggttgctagctacgatgccgtgtgcgtagctgcggcagcccttgatcgatcaatcgatcgcttgtgcggaaggagccggatcgagtggagtcagctagctagatactccgtggtcgtcgtcgtcgttggacgtacgccagaagagggagctagagaagaataccgtacagctgcttccaacatggcagctgcctcgtctgcccacctgttcggactcggcgacgggcagatgcagatgcagccgcagcagcagcaggcgccgcctcctcctcttgtgaacaacccggccgcgccgccgcccaagaagaagcggaaccaacccgcagaccctgacgcggaggtgatcgcgctttcccccaagacgctgatggcgacgaaccggttcgtgtgcgaggtgtgcaacaaggggttccagcgggagcagaacctgcagctgcaccggcgcgggcacaacctgccgtggaagctgaagcagaagaaccccaaggagacgcggcggcgggtgtacctgtgcccggagccgacgtgcgtgcaccacgacccgtcccgcgcgctgggcgacctcacgggcatcaagaagcactactgccgcaagcacggcgagaagaagtggaagtgcgacaagtgcaacaagcgctacgccgtgcagtccgactggaaggcgcactccaagacgtgcggaacccgcgagtaccgctgcgactgcggcaccctcttctccaggagggacagcttcatcacccaccgtgcgttctgtgatgcactagcgcaggagagcgcacgggtgccgcccatgggcgccggcatgtatggcaccggcggcatggccctcggcctctccgggatggccacatcacagctgcagtcattccaagaccagacccactcctcggccactaccgccatcagcagcaacccggcggcgcagttcgagcacctcatgcagtcgtccaccggctcccccgttttccgcggcgcgcaaccgacatcatcgtcttcctcgccgttctacctcggcggcgccgaggacggccatcaaagcctatccggccacacctctctgctccacggcaacaagcaggcctaccacggcctgatgctgttgccggagcagcagcaccaggcggggagtaacggcctcctcaacctggggttcttctctggcgggagcagcggtcaggacgcgcgcctcgtgttcccggaccagttcaacggcgccgttggcgggaacgtccgcggcgacggcagcgagcacggccacagcggcgctaacacggaatcagcggccatcttctccgggaacctaatgggaaaccaccaaatggcaagcagcgcgggcttttcttcctccttgtacaactcgtccgagaccgttgcgccggcgcagatgtcggcgactgcgctgctgcagaaggccgctcagatgggcgcgacgacgagcagcggcaacgtgaactctctgctcagggggcttggtagcagcgccggcggcaccttgaacgggaggcctgccggagcagcagctgggttcatggccggcgagggatcctcgtcgaggagcacttcccaggccgagaacgagagccagttccgggacctgatgaacacgctcgcagcttccgggagcggagctgctggcacagcgttcagcgggggtttcccgggcatggacgacagcaagctgagcacgagagacttcctcggcgtcggcggcggcgtcgtgcggagcatgggtggcgcggcagggctgccgctgcggcacggtgccgcgggcattggcatgggctcattggacacagaaatgaagtaggcgaatcgaaatccgaaacgagcattattatgctccactcttgggctcttgcattgcatgcaaggtaagtagtagcagcctaagcaaacgacctatggaaagatgagaccatttgcgcccaaaataacaaatgaggccgtcaaccatccaaaaaaaaaaaaaaaaaaanaaaaaaaaaaaaaaaagaaaa

SEQ ID NO: 3974 - DNA, 601 bp, Zea mays
  Clone ID: TF_LIB3597-024-Q1-K6-C9
gggccgcactggctgtgtgaccgtgggattgtgtctgtccccttgctcagggcggcgtgcgggcgatggagcgcgcggtggagccctggggcccggatctccagggcgcagaggagagggagcagctgagaagcgcccgcacaggtatagggagtgagaatgtggagatttctcagccggatgagtttgaacataccccacaggaggatgacttggggttcaaggaagaggaagatttggccccaggtcatgaagtaggaaatgcctctctcaaacctgaaggcatccagacctgggatgacttgtgggtccagagagaggtaccaggaaaacctcaggctcgggacggaggtccccggctcttgggagagccacgttggggccaggctagtgatcgggctgccgtgtgtggtgagtgtggcaagagctttcggcagatgtcagatctggtgaaacaccagcggacccatactggggagaaaccctacaagtgtgcggtgtgtggcaagggctttggggatagctctgcccgtatcaaacaccagcgaactcatagtggtgaaaaaccctacagagcccggccaccagcccaaggcccccc

SEQ ID NO: 3975 - DNA, 288 bp, Zea mays
  Clone ID: TF_700447294H1
tgacaattcataatggggatgaaccatatgcatgtaaggactgtggaagggctttattcggggctctgtactgatgcaacatcagaggattcaagctggtgataaagcctataaatgtgaagaatgtgggaatgcctttatccgtggctcacaacttactcagcaccagagaattcacaccaatgaaaagccctatgaatgtaaggaatgtggaaagatgtttagtcatggctcacaacttactcaacatcagagaatacacactggtgagaaaccctatcaatgtaa

SEQ ID NO: 3976 - DNA, 2152 bp, Zea mays
  Clone ID: TF_ZmC205_3
gccggccgggccgggctctttgcttgcgtgtatcccccgtcctttttagcggcttctccgactccttccgatcctctcgcctcgtctccgtcgtcagtcgcctagctagcttccctcacaagcagcaaggcgggagcgaacacgccggcgaccgttagcgccgaccgacctccgcgccggcgctccgcccttgcaaagccgcagccgcgcgcttttatgctcgcggcagctcggttcgtggtctctactagcggtatcctctcgccctcggacctttctgagaaagcgaagattccggtatggaggtggaggcgacgcccacgacggccgtgtcatcttccggcgtggccgcgcagctgccgccgcccggcccgcccgccaagaaaaagcgtgccctccccggcatgccagatcctgacgcggaggtgatcgcgctgtcgcccaagacgctgctggcgacgaaccggttcgtgtgcgagatctgcaacaaggggttccagcgggaccagaacctgcagctccaccggcggggccacaacctgccgtggaagctgcggcagcggagcggcaaggaggtccggaagcgggtgtacgtgtgcccggagcccagctgcgtgcaccacgacccgtcgcgcgcgctcggcgacctcaccgggatcaagaagcacttctgccgcaagcacggcgagaagaagtggaagtgcgacaagtgctccaagaagtacgccgtgcagtcggactggaaggcgcacgtcaagacctgcggctcccgcgagtaccgctgcgattgcggcaccctcttctcccggagggacagcttcatcacccaccgcgccttctgtgacgcgcttgccgaagagagcgccaaggcgcgggcggaggcgccttccgcggaggatgggagctcggcagccgccgtggttccgccaccggcacccccgcctgcgccggcgccactgcgacagcaaccgcccccgcctgcgccgcatcatgcggagccacgtaatgagactgacacgaatgcgactgaggccgtccagttcgcgccgccgcctccgccaccgccgccgcctccgccaccgccgccgccgcagttacaggtaccggtgctttcgcaagcttcggtgagcgctgctgccaacgttggcgccagcagcagcagcagcagcgtcgcggggacgtcgcagagcctgctcggcggtatgttcgcgccgtcgtcgatggcgtcagcgccgcagtacgcggacctcggcggccggccggagcgcgcccatcccgccaagcccccgccgctgtgcctcgccacggacgcatcgtcgtcgatcttctcggcggcgccggcggtgaccgccgagcgccagcagttcgcgccgccgcctccgtccccgtccccgtccgcacacatgtcggccaccgcgctgctgcagaaggccgcgcagatgggcgccacctcgtcgagctcctcgttcctgcgcgggctgggcctggacgtctcctcgtcgtcgccgggcgcctcgtcgtcaggccagcagcaccagcaccaggaggccatgcgggtgtcactcccggacgcctcgctgcagcaatggccgccgcggctggagctggagccggcgccaatgctgtcggccgggctcggccttgggctgccgtacgactccaccggggctcaggtgagcctgccggagctcatgatgggccagtcgtctctgttcagcgggaagccggcgacgctggacttcctggggctcgggatgagcccgtcgggcgcgtcggcaggacgaggcctccccgcgttcgtccagcccatcggcggcatggccgggaccggggccggcgcagccgagacgttcggcgccgggcgtggcgcgcaggcaacgccgtgggagaggaatccgagtagctcgccgatcctgtaactaaaaacttggatagcaatgcaagtagtttggattgaaccccaggcgctgtgattttgggcaaaaggaagaggaaacagtagacgccaggttcgattagcagctacgtagtcttatgttgcactgccggttcttgctgttcttttgtttctcttagctcggtacgaagaaactcactcactctcctacaagaatgctgctttgcacttgcttcaaaaccccccccccccccc

SEQ ID NO: 3977 - DNA, 768 bp, Zea mays
  Clone ID: TF_ZM4398.C6.o1.fg
atggcactgctggtcaagagccaccaccaaatgttggtctcctcctccacctcctcgtcgtccccttccgcgtcccagcagcggcagccaccgccaccacctccctcctcctcctgcctcaccgagcagcagccgtcccccgccaagcgcaagaggcgccctcccggcactccggaccccgatgcggaggtggtggcgctgtcgccgcggacgctgctggagtcggacaggtacgtgtgcgagatctgcgggcaggggttccagcgcgagcagaacctgcagatgcaccggcggcgccacaaggtgccgtggcggctcgtgaagcgggcgccgccgcctcctgctgctgctgctggcggcggcggcggcgccgccgacgctaataacagcagcggcacaggaggtggtgcaggcggcggcgcgccccggaagcgcgtgttcgtgtgccccgagccgagctgcctccaccacgaccccgcccacgcgctgggcgacctggtgggcatcaagaagcacttccggcgcaagcacggcgggcggcggcagtgggtgtgcgcccgctgcgccaagggctacgccgtgcagtccgactacaaggcccacctcaagacctgcggcacccgcggccactcctgcgactgcggccgcgtcttctcacgggtggagagcttcatcgagcaccaggacgcgtgcaactccagccggatgcgcggcgaggcggtggtggtggccgtgcccgtgcccgtgccgccgccgtcggcgctcccg

SEQ ID NO: 3978 - DNA, 2233 bp, Zea mays
  Clone ID: TF_ZmC1295_1
cattgggtacctcgaggccggccgggcattgttggactcctgccgggagtcggctcgagcgagagcgagagagagagagagagagaggagagagagagagagagaggagggagggagctcgagaggtcaacgagggggagctggcaggaaggctcggggctccttcctcctataaacccaccgcacctgccttacaggctcccattttctcggccgggagccgcaattccatcctgctgctagagttacatactcacccaatagaacaattctatgcccggtgattgtacctcctgaagtagaagagcatactgaagcagaactcgagtggtgttggatcgaaatggaaggcgggatgtcaagtttggaagccgccatgaaagcttcttcatcgatggcaagcagcatggcaaggaatgctgaccctaaccaacagactctccgccccaatttagtggagcagttctattttccaagacctggtcaatctttgccaggcattcctccattttttgggcctccctctagtttgtatcttcctaatgacaatgaagctaaatttggcaacaactttgaatcaaatccttcacagaatacagattggaacccacaggcaatagtgagcaacctaaccttccttgagcagaagatcaagcaggtaaaggatattgtgcagtccatgagtaaccgagagaaccaagtagctggtggttcctgtgaggtagctgcaaagcagcagctcataaccgctgatctcactagcattataatccagctcatatctactgcgggttcgctgctcccttcaatgaagaatccacttcttagcagcaatccagcagtcaggcagcttggcaacactcttggttctcctacgggctttggcatgaatgctaatcagcgaccaagcgtagacagcaagactgatattcctgacacaggaaaaacttctgattatgatgaactgatgaatagccttaatcctacccaagctgaaagagatgagatgatcaaatgtccaaatccctgtggtggggaagggtctgaaccgactccgatggaggaccatgatgtgaaggaaagtgatgatggtggtgagggagagaatctcccccctggttcatatgtagtcttgcaattggaaaaggaggagattttagcaccacatactcatttctgcttgatctgtggtaagggtttcaagagagatgctaaccttaggatgcacatgaggggccatggagatgagtacaaaactccagctgctcttgccaaacccacaaaggattcaggtgcagatcatgcacctgttacaaggtactcatgcccatttgtgggttgcaaacggaacaaagagcacaagaagttccaacctctcaaaacaatcttgtgcgtgaagaaccactacaagcgaagccactgtgacaagagttacacctgcagccgttgcaacaccaagaagttctctgtcatcgcggacttgaagactcatgagaagcactgtggtcgtgataaatggctctgttcttgtggaacaaccttctccaggaaggacaagctttttgggcacgttgcccttttccaaggccacacacctgcgcttcccatggaagatgtgaaggtatcagaagcatcagagcaacctcaggacagtgagccgatgaatgaaatggcgaggagcaatgtgtatagcttcccctgtagttcgtctgatggtatatcgaacctcgacatgaaaatggctgatgatgtgcgtggttatttctcgccgctgaactttgatccttgctttggcgcgctcgacgatttcactcgccctgggtttgacatctctgagaaccccttctcattcctgccttcaggatcttgcagttatgggcagcagaacggagatagctgatggatgccgccatcgatgatgacgacaacagcactgccaacctttatttatgttgttgcatgatgctagcttggttcttcctctgttcaagagccatttgaggttatgcctttatattttccctaaatgtacttacgtttgtggtcattaataatgatcaaggacttctagcatttcttagacccagatagccccaattttcagtatacatacgcaagtattgcttgttcattttgtctgaatcggcgtgatgcttgtagcactgacaatttatcataacaagctgctcagctattaaaaaaaaaaaaaaaggggactagttctagatcgcga

SEQ ID NO: 3979 - DNA, 1110 bp, Zea mays
  unsure (1)..(1110): unsure at all n locations
  Clone ID: TF_ZmC205_8
cattgggtacctcgaggccggcccggggtgtgcataggcgcaggggggaaaattccagaaattgatttatagtggggcatattagatgtgggagaggaaagcagcaggagagaagagagagaaggaaaagtatgacaaggaaatgagagaaatgggagaacagccttcttagcctctccctccatgcatcctctctccaccactgctatctctcagtagcaagagcaaagcaagaggagagcgagctagcggtaccagggagagtgagcgaagaaggggaaggacgaagaacactgccgaccctattcctagcaacgggccaaagcgaccagctgcaggaaggagaagcagtgttggcgtgttcgagctggtggtgccaggataaatcgggaggaagtgatggcatcgaattcatcggcggcgttctttggtgttagggatggggaccagcaagaccagattaagccgctgatatcaccgcagcaacagctggcagcggcgctgcccggtctggcaggcggtgttcctgcggcgtccggccaaggcgcgccgccggcgcagccaccgcccaagaagaagaggactatgcctgaccccgacgctgaggtgatcgcgctgtcgcccaagacgcttatggcgaccaacaggttcgtgtgcgaggtgtgcaacaaggggttccagcgcgagcagaacctgcagctgcaccggcgcgggcacaacctgccgtggaagctgaagcagaagaacccgctacaggcgcagcggcggcgcgtgtacctgtgcccggagccgacgtgcgtgcaccacgacccggcccgcgccctcggcgacctgacggggatcaagaagcacttctgccgcaagcacggcgagaagaagtggaagtgcgacaagtgctccaagcgctacgccgtgcagtcggactggaaggcgcactccaagatctgcggcacccgtgagtaccgatgcgactgcggcacactcttctccaggagggacagcttcatcacacaccgggcgttctgcgatgcgctcgcgcaggaaagcgcgcggctgccgccgacgagcctcagcagcctcaccagccacctntacggcgcgaccagcacg

SEQ ID NO: 3980 - DNA, 1673 bp, Zea mays
  Clone ID: TF_ZmC1140_2
ttttccggccgggccgggctaacgctcctgtcacatgacatatgctaaaggtctagtctgagattgcgatgccacttttttcaacaagttgggcgtctgctgttctagtcatatttgataattgatgaatttacactgcaatgctgtttgagtatatctagctgtcaccgtttgatggccctcattattgacaggatagatttagcaggcatagagagacacaattcctgttctgcatagtttatgtgctcgactttagttatgtgttcactgaaatgattggatcatgatcttccttagttgaattatacattccctgccaaaatcaaattgattttcatttgaaggtgagttatgcggatacggtgtgctgctatttgcccctgtatttggggactggtgtacgacatttgatttgctggtttttgtaggcaatttgttgacatatgaatgcgtgaagcattggatcccaaagaactccaaaatgcgataaggccttgaatggactagtatcaggattgggagaccatcctgagaagctccatcaagcatgccttgttcacgcgtttcttaagaggcccttttcctgcactgttgatggttgcccctttagctatagcaggaaggatcatttgaacagacatttacttactcatgaagggaaactatttgtgtgccctgtcgaaggatgtggccgtaagttcaatatcaagggtaatatgcagagacatgttcaggaaatccacaaagatgtctctccttgtgaaagcaagaaagaattcatctgtccaaaggttaactgtgggaaggctttcaaatatgcttctaagttaaagaagcacgaagaatcacatgtccagctggaatacacagaagttatgtgctgtgagccaggctgcatgaagttcttttcaaacatggaatgcctgaaggcgcataaccaatcttgccatcaatatgttcagtgtgatatctgtggtacgaaacagctaaagaagaatttccagcgccatcatcggatgcatgaaggttcctgcgtcactgagagggttaaatgccacatcgaggactgcaaatgttcgttctcgaagaaatccaatttggacaagcatgttaaggcggtacatgagcagcgtcgtccttttgtgtgccaattctctgggtgtggcaagaggttttcttacaagcacgtaagggacaatcatgagaagtcaagcgctcatgtgcacactgagggtgattttgtcgaggctgatgagcagcggccacgttcagtaggtgggtgcaagaggaaacccgtatctgttgagagtttgatgcgtaagagggtagccgctcctgacgatgggcctgctcatgctgatgcaactgaatatttgagatggcttctgtcggtttgattggacgttcaagtgcactttgtgtagttggaaacatcagcgatttacttggcatgtataggaagatgaatgtctctagtatgttatgtaaatgtttatgtacggtatcagaaatacagatcattggacctcaattataaaggcaatatgctgtattggcaagatcttgaatgtaagagcggttgctcatgatcattagatctatgtgtcttcagcacagcttggcaacatgttttggtatgttcgcaaaaaaaaaaaaaaaaaaggccccta

SEQ ID NO: 3981 - DNA, 1295 bp, Zea mays
  Clone ID: TF_ZmC104_51
agggaattagttaatttcttaatgataaccaaattgctgtcagggaaccaacctaatcgtgggctctatagaatccgtttactaatggaattgtgagcacagaccaccatgggttttgggtgctaaactgttaaggcattgttcgtttgtatcggattgcacccggaatcgttccacctaatcaaagtttatataaattagagaagcaatccggttaggaattgttccgacccaccgatccggcagaaacgaacaaggcctaacggaatgtacaaactttctcctattccttccaagaaccaagactagtgtaagttactgctgctttgccttacttctttgctttcgcctttggacgcatgtcctgcgcttgtggcggctgaaatcagagacgaacctgaacgtctgtccgcacccaggttcaaggcaaacgtagggcctgtcgcccgtgtggaccctcatgtgctctatcctagcccatggccacttgaacgccatgctgcagcccttccacgggcatttcgtggacggtcgtcggcgtgaaccttgcgatgctgcagcagatacttgtgcgagaagaacttcctgcagcagcccttctccgggcagatatcattcttatgcagagacagtgcctgtttcgtgccgaaactcatggaacagccctcgatgtcgctcgcatattcttccttgcgttctggagaacttgggggagcccttcccctgtatctggattcctccgtctgctgcttttcttccgttttagcccccttcttacgtagagacagacgttgtttagtgatagaacatccctcagcatcatatgcttgctcttcttcatccttctgagaagctggactaggagcccttcgcttttctgctctagtttcctttgttttcttcttagtgtctgctttagtcttttgccttggtgattttgctcttgaacggccagcaggattatctttgtcgccttcagcctttggctttggagggttagctgagccattatcctcttcttccatctttgatttcctattggcaatcctagagctactgcggactaccatcccagctggtgcggggaaggaagcttctgaaggaccttttagtgcttctgaaaccttttcagtatgtttgagcttcttggtttttgctttttccacgtgttctttctccttcttgattgttttttctagaactgatctgctctttatcttccgtgtggaggcctcagcagtaccctctagtgatttggaattgtcctcttcagtaaattttggcggacgcgtggg

SEQ ID NO: 3982 - DNA, 2251 bp, Zea mays
  Clone ID: TF_ZmC205_2
gccggccgggctacctagccacgcatcactcttgtcctattgaacatacgctaactaatttctctatcaatccatcctttgcaaccttggtgctaaaacaacgtttgtcatgcatacctactatctctttctcacacaagtctcttctccgttttcactctcttgctagctcctctttgtccttcagatcagatctctcagaagagtagagtgcctgccagtgccatgtcgctgccagtcacacagcccattgcatgagcagaagggcaaggaagcttgggagggtgtaagctgaggatcggtgacgtgcaaatgcggccacggggaacctctctgcaacaaagctccgcatctgctctcggcgacggcgatgcggcgctaccgaagaagaagaggaaccggccaggcaatccgaaacctgatgcggaggtgatcgcgctgtcgcctcgaacgctgctggcgacgaaccggttcgtgtgcgaggtgtgcagcaagggcttccagcgggaccagaacctgcagctgcacctgcggggccacaacatgccgtggaagctgaagcagaaggaccccaaggacgcgcgccggcgggtgtacctgtgcccggagccgacgtgcgtgcaccacagcccgtcccgggcgctgggcgacctcacggggatcaagaagcactactgccgcaagcacggcgagaagaagttcaggtgcgacaggtgcagcaagcgctacgccgtcgagtccgactggaaggcgcacggcaagacctgcggcgcccgcgagtatcgctgccactgcaacgccctcttctccaggaaagacaacttcatcacccaccgcgctacctgcgacgcagcagttcgtgggaccgcccagaagccaccgctggtcgccggcctctacgtcggctcaggcagcgatgataggctcgggctctccgacgccgccgcccagatgcatggcttcgcagatcaaggccagtcctcttcagcagcagaagcctcacagtttgaccatgtcatgccatcgtactcgggctcctccatgttccgttctcaggcgtcagacttctcgttgtctttcttcctcggcggcggcactcctcttatcgaacaagacctgtccgacaacggtggtgatctctccgaaggcagccagggccctctgctccatggcaaggcgcccttgcatggcgtgatgacgcatctccccgagcagcagtatcagccaaacagcggcaacgccaacgttaacctcctggacattgggttcttctctggcaacagtggtggcacgtctggcagccagggccctctgctccacggcaaggagcccttccatagccatgacctgacgcaacttcccgagcagcagcaccagccaggcagcagcaacgcccgcgtcaacctccctaaccttggggtcttctctggcaacagcggtggatggcccggaagcagccatcaggacgcgcgccttgtcatccaagaccaactcaacggcggcagcagcagcaacaccgagcatggtaacgggatggcgtccatcggaagccacttcggcggaggcttcgtcccttccctgcacaactcatctccgtcggccgggctctcagcgacggcgctcctgatgaaggcggctcagatgggctcgacgacgtcgagcaccacccacaaccccaacggccccagcgcgctgctccgcgcagccggcttcgcaggcactgccagcgtccgggagactagtagcagggcagcggaagaagagaagtctcacgaggcatatttccatgatctcatcatgaactcactgccattaacgggaggaggcaccggcggcctctcagggttggcgggcgtggacgacggcaatgtgagcacaagggacttccttggcgtcggcagggacgacgcgacggcaccgcagggcctccacggcatgggcgccccgaatccgacccagatgaaatggtacatgtgatggatcaggtcggaaacgcgaaaagaggaagacaacaagaagatgcaagctaagaagggagtcaataaacagaacagaagatcgtgcactagctagtgagtggcgatcagagagatcgagaaaacttaatctagttttgtttcgtggattagttcacttttctcatatgccgcccgccatgattgatatggctaatagtaacagggctgcaagcaatgcagctgctgaacttgttcattgcttttatttcggtacaattttgtggtgtttttcc

SEQ ID NO: 3983 - DNA, 1655 bp, Zea mays
  unsure (1)..(1655): unsure at all n locations
  Clone ID: TF_ZmC3754_1
ggcatggcatccataggcatacatctcctcgcggagcctggggtggggcggtcaccaccatgcctaatcctatcgcaccaaggagtctgtctcgtgctcctcgtagtcttcctacccacccctccacccccccccccctttgcccccaatccctagccctgcccctctcctccagcgccgctcgccagctctctgcccccgccgcgcccagagatgcagatcccccaccgccgttaccgctgggtgaaggagtgggtcccgcaagatctggtcgtcaccggaggcccctgcacgctctacaagtgggtgcgagaggacagactagcagctttgaaggctaaggacaagaagcatgggggcagaatctgcaactcctgaacccaactctgaggttctcttcctgtgcagctacgaaggatgtgggaagacattttttgatgcaggggctcttaggaagcatgctcatgtccatggggagaggcaatatatctgtcactatgagaactgtggcaagaaattcttagatagttctaagttgaagagacattttcttattcatacaggagaaaagaattttgtgtgcccacatgaaggttgtgggaaggctttttcgttggattttaatttaaaggcacacatgaaaacacattctgcagataactatcatgtgtgccagtacccagaatgtggccgaagatttacacaagaatcaaaactgagagctcatatcagggcacaacatgagaaagctgttggcttgcagaatccaggtgcgtcatcaatgaaccacagtgcaattggaggtccgcaccagccccctaagccagcgaaggtctcagcagcacctccagctccctcagctgagcgcccttacgtctgcccctacgatggttgtgacaaggcatacatccatgagtacaagttgaacctccatctgaaaaaagagcatcccaaccactaccaggatggtggtccaaatggtgctgccgccccttcaaagcgcagcatctcgaagagttcccacaggagcaagctggacatcacctctaggatgccaccggccaacatccccaagcacagagggtatgcaacaccattgccagctgtggtgagcctccctgaggagcagcagttgctaaggaaagtggtgtacgaggatgacagcgaggagactgaagaagagggggataacaatggcgaggacagatggaactacaagagagctgctagcagcgacgacgaggaaaccgaagacgaagaatgagctgctagcagggattcatttttttttcttctgtagctgtgcatataccataatctatagactggtggttatagatttcaatacatgtacatttttaaaatacggctggcctatagtagacaagaggttgttgctgccatgccccttctcaactacacaggccatgagttcagaaaggataatggatcattgctcccgtctgcctgtgtttgtgccttttggtttgttgtcataaatgagttctcagttatcgtagccctgattgagtggatgtcaacagatctcgtcaaccgtacatttgtatgagcatgccatgtttactttgagaaatttatgcatccaccggtttcagaaaaaaaaaaaaaaaaaaaannnnnnaaaaaaaaaaaaa

SEQ ID NO: 3984 - DNA, 595 bp, Zea mays
  Clone ID: TF_jC-zmX700083408a1
ccttaacaaagaaacaggcaatcccactataagttggcagaacagttgtgcgatggatctcctagcaaataaataaatagaacatctacagtagcaagcacaaacttcactgctatcctaattctgtagtatcaagcaagcttttacctctgaggtttgcacctcctcctatgccgggtgaaatctgaaacaaacttaaacattttgctgcatccaggcgtcatgcatttgtaaggcttggccccagcatggaccttgaaatgctcagcccggtcccatgaccacttgaaagccatattacaaccatcccatgggcacttgtaaggcatatcatcgttgtgtgcgctctcgtggcgcctcaggtaactgtgggatctgaaatgcttgctgcatgagttgactgtgcacatgttcttcttgtgggcagcatgctcagcttttggcttgaatgtcatgtggcagtaatcaattttacattcaaatatatttctcttcatctttgtaaccttgcttgcagctgaaatatccataaggtctttcttatgtcggcaatgttacatctatggacccggctgttgacaagacactttacaac

SEQ ID NO: 3985 - DNA, 1603 bp, Zea mays
  Clone ID: TF_ZmC13313_1
gggtacctcgaccccggccgggcgtctccggcgccgtcaaccccgcgacgcgcaaaggtgagcttcgacccgaagccgaaccgatcgagaggcccagccgccgcaaccggaggagagagagaggcggatacacaaacacgaaaccctagcaagcaagccctccacgcacagtcaagaagggagggggaggcgatggagtacccggcgacggccgccggatcggggagccacaagtactactacccgcagcagcactcgcactcacagccgcaggcgcttcgccgcccgccgcgccccgccgctcggtgggtcaagcaatggatcccgcaggatctcgcgtcctccggcggcaaatgctcgctcttcaagtgggtcagagaggatgggtacagaaactccaaggacaaccccagagtgttagatgtagaagcccccaagcctgaacccaccacggagatcctcttcctctgcagctacgagaactgcggcaagacctttgttgatgtcagcgcgctccgcaagcatgctagcgtgcacaacgagaagcagtatatatgcaacgagcccaactgtgggaagaaatttgttgatagctccaagttgaagaggcattatcttacccacacaggacaaaaggattttgtctgtccacatccaggctgtggtaaggccttctcattggattttaacctacggtcacacctaaaaacacatgcattggagaattatcacatatgccctttcccagcatgtggcaaaagatttacaagtgacttcaaactaggagcacatgtcaagtcacatgaaaagactggaactcctattgcagtgcagcatgcgccagcgccaccagcagaaaaaccgcgtgtcgccccaaagcctccgactccagcaaccacaagctatgctgatcggccatatgtctgcccctatgaaggttgtgacaaagcatacattcacagttacaaattgaaccttcatctaaaaactcagcaccctgaacacggtcaagaggaaaacggtaaggtcggtgcttctggtgggcagcatgctgcgaacgaacacacttaccagtataactatgccgaggttggcgagattgcaccaaaccccaaaaggagcaagacgaatcatgggcacaaggtccactcatccaaagcctacaatgccaaggtttcgagagcaatgccttctgacattggcgtcaggaaccagtggccaggtaaagctacgtaccaagatgatagtgaagagacggaagaagatggaggcaacaacattgaagatggctggagatatggcaacaatgatgacgatgaggaaacaccagatgaagattgacctttatttaggtttggatatgtagatatatgagggtgatctgttgtcctttagtttcaatgcagtcatggggaagttcaagctttaaccttaggtagtagttcattcagatggtgcatggatatattgtactcagttacctgctcctaaatgctttcactcccctatcttccagagccacatgtattttagatagtttggatatgtttgccttggaataaattttcatttgaaatgttaaaaaaaaaaaaaaaaagcggcc

SEQ ID NO: 3986 - DNA, 288 bp, Zea mays
  Clone ID: TF_700017019H1
gtactgattcaaatgtgtgtcgagtatgcaaggagagtttctctaccaatatgcttctgatagaacatgccaaactgcatgaagaggatccctacatttgtaaatactgtgattataagacagtaatttttgagaacctcagccagcacattgcagacacccattttagtgatcacctctattggtgtgaacagtgtgatgtacagttctcctcaagcagtgaactctacctacatttccaggagcacagctgtgatgaacagtacttgtgtcagttctgtgaacatg

SEQ ID NO: 3987 - DNA, 1480 bp, Zea mays
  Clone ID: TF_ZmC22728_1
gtaggccgcgaacctttttcccattatctaaaaaatctatctccaagccatgaactgcaaaagtcagaagaagcagctgagtcagtaacaataacaagtaatcctgatctgattcccagcagaagcttctttctgtccctccaacggaatctgtccatggttcatcaaccatgcgtgctgccgtggcacggcgtcgactcggcgcgaatcgacgccgtctgcacttgcctctgtgcccaatcatcgtcgctactgcacgccgtagctgcgaatcgatccacataaaacaactccgtctccagcctagctaatactaacagctatagagctgagtgactgacacccattggcggctggactattagtttatgcttggcgtttgtaatgctcggcctataaatacgcctgctcagtgatctgatgctccttcattcagatatatacagataagattttcttgctagcctcgaatcgcgatcgagtagctcatcagctgattcacaagtgcaagcatttgatgaagaggtttgcagttcaggagagcgagatggcgcgcatgctggtgctcatgtcgcgctcgcacggccaggaccaggcgctgccactgtcggcctgcctcgccggcggccagcaaggcgaggaccggcaggcgccggagcgcgtgttcgtgtgcaagacgtgcaaccgcgtgttcccgtcgttccaggcgctgggcggccaccgcgccagccacaagaagccgcggctggacggggacggcggcggcgacccctcgctcgccaagcccaagctgcacggctgctccgtctgcggcctcgagttcgccatcggccaggccctcggcggccacatgaggcgccaccgcgccatgacgggcggcgtgccggcggtgccgcccgcgacgacgaggatcgtcgtcgacgagaagccggacggcgacgtcgtcggcatcatccgccacgaccacgtccacgaccacggcggcgtcaagcagccccgcggcgggctgtggctcgacctcaactacccgccgtgcgacgacggccgcgacgcggtggaggcggagtgtggccgcaatgccgccgccgccacggggatcacgttccatcagttcctcgacactgccaccatggccgtcgactgccttggctactagatagatagataccaccaagctccatgattcttctcccctgccgcgtactactggtgcaccggtctcttcttcttcttctttcttttcttttctggaatcttcttcctcatttgcttctgcgcggagggggagaaatccacattttgtagcagtagtagaatgaaggtgcctactgcctaatgcatgcatgggcatggctgatgtgcatgaaggttttgggatgtctttgagctgctcggtggataatctggaggattgattccaccaaagctagcttattttgccatgggtttcatgttattatggataaaaaccctttggtcc

SEQ ID NO: 3988 - DNA, 798 bp, Zea mays
  Clone ID: TF_ZmC119244_1
gtcagcaaacttccgtcgatctctctcgatggtcatgacgcttacgagacacgactcgggagagagcaaggagatggagggcctccgtgcgcactccgaggccgcgctgctcacgctgtcgtcgacgacgacgggcggcaccggcaccggcaccggcaccggcacggccgcggcggcggagggcgcgttcgagtgcaagacgtgcagcaagcggttcccgtcgttccaggcgctgggcgggcaccgcaccagccacacgcggctgcaggcgcggacgctcgtcggcgacccggccgagcggtacgacgacaggccggcggcgcgggtgcacgagtgcgccgtctgcggcctcgagttctccatgggccaggcgctcggcggccacatgcgccgccacaggggcgagggcccgccgccaccggccgcgcacgacgacgacggcgacggccccgcccagccggaccgggacatgcccgacctcaacctgccgccgttggacgacgacgatggcagccaagcaggttcacggcagtcgggcggtggtcgcggctccgggcctcagctgctcaacctgctcgtatagcgtgcgtggcgtgcacagattgtggttcggatcgagatgtaaatgaatcgtggcttagattttggaacctactacacgtgagatggaattcttcgatgacgagcttatttagttccataggttgttcctggttttagttggtttgctccttcgtgtaatgcctattgttcggttcaattcatttgttgtgagtaaaatatactctcacattagac

SEQ ID NO: 3989 - DNA, 830 bp, Zea mays
  unsure (1)..(830): unsure at all n locations
  Clone ID: TF_LIB4756-101-R1-K1-A3
ctcgaggccggccgggcctttctacgaatgcgcccgcacaataccgacaaagcgccaacaacatgtcatcgatggttgaccaaacgcccgagtttcctgcacacatgacatctatggagtctagtgcgagcgaagcggagccgcccaatggcagccaaaacagcgtgctatcggaccggtacatgagcaagccagcgtcaacgggcgccgagtctggcacatactcatgcacatatcatgggtgctcgcagcgatttgaaacaccgcagaagctccagaagcacaagcgcgagggccaccggagcgccaatctcagcacggctatgacgtcggcggctatcctagaacgcaactcgcaagcgggaccccacaagtgtgagcgcatcaacccaaccactggcaagccttgcaacactgtcttctcccggccatatgacttgacccgtcacgaggacactatccacaatgcgcgcaagcaaaaggtgcgatgtgcactgtgcgtcgaggagaagacgttctcacgcaacgacgcattgacaaggcatatgcgtgtcgtgcaccccgaggttgattttcctggcaagcatcgcagacgcggcggcaaccacgactgagcgagcgggctttgacgaggtgcgcggaaccgaccgaagaccgcggagaccgtgcccttgcagccccaggcctgcctgcctgcacatttcagaacagccgggaccgttggcctgcatgcagcccacgcaccccaacacagncaacgtgacgcacagaatcttcgatgggcatctcgactgcgaagactgtgtgatggctgcaggcatggctttact

SEQ ID NO: 3990 - DNA, 282 bp, Zea mays
  Clone ID: TF_700346018H1
atcagagagttcatacgggagagagaccttacgtatgtaaagaatgtggcaaatcttttactaagtgttcaactcttcaaacacatcaaaaaattcatactggagcgaaaccttacaaatgtagggaatgcaacaaatcctttacccaggactcacatcttagaacacatcagagagttcatactggagagagaccttacatatgtaaggaatgtggcaaatcttttactaggtgttcatatcttagagcacatcagaaaaatcatactggaagagaacgta

SEQ ID NO: 3991 - DNA, 1453 bp, Zea mays
  Clone ID: TF_ZmC97_1
attaccgcaaggaggtctcgggcggtcggggccggatcgcccacctcgcaccgtctcaccacagcgagcgagagcaaggcgcccaagcaaccaccgcgagaacaagtcgcagccaaacagccccgtctcccagcgaagcttgagcttgcattattctaccatgtcttccatggagctgctccacgccgtcgtcccggagaagcagagcgaggaggaggtcgcgcccgcagcgacgaccacgagcagcagcgccaccgccacgggcggggacgagggcgcccacgtgctccaggggtgggccaagaggaagcgctcgcgccgccagcgatcggaggaggagaacctcgcgctctgcctcctcatgctctcccgcggtggccaccaccgcgtccaggcgccgccaacgccggtcccgtccgcggcgccggccgccgcggagttcaggtgctccgtctgcggcaagtccttcagctcctaccaggcgctggggggccacaagaccagccaccgcgtcaagctgcccacccctcctcctcctcctcctcctgctgtaactgtcccggcagcagtgcccgtcccggaggcccccgccccgaccaccgtcgtcgtcccgccgctgccgccagtcgaggtcggccgcgagccggccacgtcatccaccgccgcgtcctccgacggggcggcctcgagcagagtccaccggtgctccatctgccacaaggagttcccgaccggccaggcgctcggcgggcacaagaggaagcactacgacgggggcgtcggcagcgccgccgcgtccaccgacgtcccggcggcgcccgccgagacgtccgccgaggtcgggagctccgccgcgcgtgcgttcgacctcaacctcccggccgtgccggagttcgtgttccggtgcggcaagcccggcaagatgtgggaggaggacgaggaggtgcagagccccctcgccttcaagaagccccgcctcctcatgaccgcgtgaaaccgctgcgcgcgcgggcggcggatctcatctcatcacccgtccaagattttggtccgcagctgccgagttcagcggtggaagtggaacacactattcgttcattcatttcgtatggtgccagtagcgctattgtttgatttttgtggctgctcctcttgtacagtaccgagtgcgagaaaagatgcatagtcatcgtatacataccaatacaataccgtacctataggtcttcctattcctgtggaagagtagaacttgtatccttattagctgtcagttcatacacacttggttctcattaccagagatcattggtgaattagtggttttgtatcataagcttattgtaaatgatggattggagattagtatggaatcagataccccatttgttccaaacctggttcaagtcccagacttttttggatgttcggtggaacactattcgttcgttcc

SEQ ID NO: 3992 - DNA, 831 bp, Zea mays
  Clone ID: TF_ZmC3585_1
ccctgctaaaccacttgctaaaccagcggaaacctaaccagctagcagcattagcttttcaacaagcctcgctcgcgcgccgtgaccgatagatggccatcacccacgacgactacgtctccctgtgcctcatggcgctcgcagccgcgggaggaggaggagggcacgctgcggctgccagtgccaggacgacgacgatgacgacgcaagagtgcgagctccgcttccggtgctccgtctgcggcaaggccttcgcgtcgcaccaggcgctgggcgggcacaaggccagccaccggaagccgccgccgacgctcgtacaggcggcgtcgtcgtcgtcgtcggtgacgacgaatacctcgtcggcgggcggcagcggcgccgggcaggggaggcacaggtgctcggtgtgccaccggggcttcgccacggggcaggcgctcggcgggcacaagaggtgccattactgggacgggctctcggtgtcgctcaccgcgtcggcggcgtcggggtccgcgtcgagcttgaggggcttcgatctgaatttggtgccggccgccggcgcggcaaggtggcgagaggaggaagaggtgcagagccccttgccggtcaagaagcggcggctgtcctccggtccttccaccgaacttagtttaacgatttagagttccttttggcgatctgaggcttgtagagtgttttcgttgcttcattcttttaaccgtattttagtttttgtgtttgcgcggtgaataaacgtgtatttaattttgtcgagccatatatacttgagataaaagccataggccatataggcatctaccaattgaggtt

SEQ ID NO: 3993 - DNA, 1489 bp, Zea mays
  unsure (1)..(1489): unsure at all n locations
  Clone ID: TF_ZmC1140_1
ttttggcttgttctcccactaacgcttggcgacgcacgagtcnagggtttctcgcctgcgcggcggctacctctctccacggcggcggcgggcgatcctgcagatcccgcggctccctccgcgattcgagactcagatgggggaaggcacagagagcggcggcggggcgaccacagcgccgcctctgaggtatataaggtgctacaagtgcgggttctgcgacgtggtccggtccaagaagtgcttgctccgcgcccacgtgcttgagcaccacaaggatgaggtggatgctttggggggttactgggaaggtggagatgctggtccgcgcaaagagatcagccgtgcgtgcgaacagtgcgggatgagcttcaagaagcaggcgcatctgaagcaacatatgcagagccattcgctcgagaggcccttttcctgcactgttgatggttgcccctttagctatagcaggaaggatcatttgaacagacatttacttactcatgaagggaaactatttgtgtgccctgtcgaaggatgtggccgtaagttcaatatcaagggtaatatgcagagacatgttcaggaaatccacaaagatgtctctccttgtgaaagcaagaaagaattcatctgtccaaaggttaactgtgggaaggctttcaaatatgcttctaagttaaagaagcacgaagaatcacatgtccagctggaatacacagaagttatgtgctgtgagccaggctgcatgaagttcttttcaaacatggaatgcctgaaggcgcataaccaatcttgccatcaatatgttcagtgtgatatctgtggtacgaaacagctaaagaagaatttccagcgccatcatcggatgcatgaaggttcctgcgtcactgagagggttaaatgccacatcgaggactgcaaatgttcgttctcgaagaaatccaatttggacaagcatgttaaggcggtacatgagcagcgtcgtccttttgtgtgccaattctctgggtgtggcaagaggttttcttacaagcacgtaagggacaatcatgagaagtcaagcgctcatgtgcacactgagggtgattttgtcgaggctgatgagcagcggccacgttcagtaggtgggtgcaagaggaaacccgtatctgttgagagtttgatgcgtaagagggtagccgctcctgacgatgggcctgctcatgctgatgcaactgaatatttgagatggcttctgtcgaaatacagatcattggacctcaattataaaggcaatatgctgtattggcaagatcttgaatttctcattgtgcagaaccacagcactcttcattccgatttgcagatgcacgtgaccaaaaaagataatttgcagatgcaccatgaacccgtggcaccagatgcccgtcagcagctggcacccgtccagctcgcgccggagagcctccaggcggaccagctccgccgccccgcggatcgattggactag

SEQ ID NO: 3994 - DNA, 266 bp, Zea mays
  Clone ID: TF_700582866H1
ccgatcttttcgtgatgtctaatcccatgagagaagtcacactggagagaaaccctttgtgtgtacagaatgtgggaaagccttcagttattatagctctttccatagacacagaagaactcaccagacagtaaccttgaacacagagcttgagaagacttcataacacccataagattgcatatggagtaaaactgtaaaagttaagcgagtgaaacacctggttctactcatgggtacaggacctttaggccagacatggtgtg

SEQ ID NO: 3995 - DNA, 1162 bp, Zea mays
  Clone ID: TF_ZmC3754_2
ggacagactagcagctttgaaggctaaggacaagaagcatggggcagaatctgcaactcctgaacccaactctgaggttctcttcctgtgcagctacgaaggatgtgggaagacattttttgatgcaggggctcttaggaagcatgctcacgtccatggggagaggcaatatatctgtcactatgagaactgtggcaagaaattcttagatagttctaagttgaagagacattttcttattcatacaggagaaaagaattttgtgtgcccacatgaaggttgtgggaaggctttttcgttggattttaatttaaaggcacacacgtgaacgctgtcggcagataactatcatgtgtgccagtacccagaatgtggccgaagatttacacaagaatcaaaactaagagctcatatcagggcacaacatgagaaagctgtttgcctgcagaatccaggtgcttcggctatgaaccatagtgcaattggagaacagcatcagccccctaagccagcaaaggtctcagcaacgcctccagctccctcagctgagcgcccttacgtctgcccctacgatggttgcgacaaggcatacatccacgagtacaagctgaacctccatttgaaaaaggagcatcccaaccactaccaggatggtggtccacaaggcgctgccccttcaaagcgcagcatctcgaagagttcccataggagcagaccggacatcactgctagaatgccaccagccaaggtctccaagcgcaaaggagggtacgcagcgccatcgccagctgtgaacctccctgaggagcaccttcccgaggagcagcagtggccaaggaaagtgatgtacgaggatgacagcgaggagaccgaggaagaagaggggggcaacaatgtcgaggatagatggaactacaacagagctgctagtagcgatgacgaggaaaccgaagacgaacaatgagcttctagcaggcgtccatctgttctgtagttgtgcatataccataaattttaaactttgagggttatagcttttgcatacatgtaaaattttaaaataaggcggacttgttgtagacagcataggttgtaggtggtctgccccttctcaatcagacatgccatgagttcagaaaggataatggatcattgttctcgt

SEQ ID NO: 3996 - DNA, 937 bp, Zea mays
  Clone ID: TF_ZmC205_15
ggaccctcgaggccggccgagatataggctttggaagggggcgcaggggtggaatttcgggaatcgatttgtagtggggcatgtaagcttgtgggagaggaaagcagcaggagacgaaggtagacaaggaaaagtatgccaaagaaaatgagagaacaaccttcttagcttctcctccagtctctctccaccaccgctctatctcctcggtaggaagaagagcaagcaagagaggagcaagctagctagcggtacaagggagagtgagcggcgaaggggacggacgaattgaagaacacctgccagtccgatcgagctggtggtgccgccaggataaatcgggaggtatatgatggcgtcgaattcaccggcggcggcgttctttggtgttagggatggggaccagcaagaccaccagattaagccgctgatatcaccgcagcagcagcagcagctggcagcggcactgcccagcgtggcgtccggccaaggcgcgccgacggcggcggcgcagccaccgcccaagaagaagaggactatgcccgacccagacgctgaggtgatcgccctgtcgcccaagacgctgatggcgaccaacaggttcgtgtgcgaggtgtgcagcaaggggttccagcgcgagcagaacctgcagctgcaccggcgcgggcacaacctgccgtggaagctgaagcagaaggacccgctgcaggcgcagcggcggcgcgtgtacctgtgcccggagccgacgtgcgcgcaccacgacccggcgcgcgccctgggcgacctgacggggatcaagaagcacttcagccgcaagcacggcgagaagaagtggaagtgcgacaagtgctccaagcgctacgccgtgcagtcggactggaaggcgcactcccagatctgcggcacccgcgagtaccggtgcgactgcggcacgctc

SEQ ID NO: 3997 - DNA, 878 bp, Zea mays
  Clone ID: TF_ZmC205_10
ccggccggcctgccgggatcgagctgagctgagcatatggggtagtgtgtgaggcgatagagaagctggtgctcataaccaaccaccactcagtcctcctcctctaccctttcccttccgccgcgttcctacttggtcctagagggagagagatctcgaactccaagggcgcatgctccggttgctagctacgataccgtgtgcgtagctgcggcagcccttgatcgatcgatcgatcgcttgtgcggaaggagccggatcgagtggagtcagctagatactccgtggtcgtcgttggacgtacgccagaagagggagctagagaagaataccgtgtacagctgcttccaacatggcagctgcctcgtctgcccacggcctgttcggactcggcgacgggcagatgcagatgcagatacagcagcagcagcaggcgccgcctcctcctcttgtgaacaacccggccgcgccgccgcccaagaagaagcggaaccaacccgaccctgacgcggaggtgatcgcgctttcccccaagacgctgatggcgacgaaccggttcgtgtgcgaggtgtgcaacaaggggttccagcgggagcagaacctgcagctgcaccggcgcgggcacaacctgccgtggaagctgaagcagaagaaccccaaggagacgcggcggcgggtgtacctgtgcccggagccgacgtgcgtgcaccacgacccgtcccgcgcgctgggcgacctcacgggcatcaagaagcactactgccgcaagcacggcgagaagaagtggaagtgcgacaagtgcaacaagcgctacgccgtgcagtccgactggaaggcgcactccaagacgtgcggaacccgcgagtaccgctgcgact

SEQ ID NO: 3998 - DNA, 838 bp, Zea mays
  Clone ID: TF_ZmC205_14
ccggccgggagtggctcataaccaccggccgggagtcctccttctctaccctttcccttccgcgttcctacttggtcctagagggagagagatctcgtcgaactcgaagggcgcatgctccggttgctagctacgataccgtgtgcgtagctgcggcagcccttgatcgatcgatcgatcgcttgtgcggaaggagccggatcgagtggagtcagctagatactccgtggtcgtcgttggacgtacgccagaagagggagctagagaagaataccgtgtacagctgcttccaacatggcagctgcctcgtctgcccacggcctgttcggactcggcgacgggcagatgcagatgcagatacagcagcagcagcaggcgccgcctcctcctcttgtgaacaacccggccgcgccgccgcccaagaagaagcggaaccaacccgcagaccctgacgcggaggtgatcgcgctttcccccaagacgctgatggcgacgaaccggttcgtgtgcgaggtgtgcaacaaggggttccagcgggagcagaacctgcagctgcaccggcgcgggcacaacctgccgtggaagctgaagcagaagaaccccaaggagacgcggcggcgggtgtacctgtgcccggagccgacgtgcgtgcaccacgacccgtcccgcgcgctgggcgacctcacgggcatcaagaagcactactgccgcaagcacggcgagaagaagtggaagtgcgacaagtgcaacaagcgctacgccgtgcagtccgactggaaggcgcactccaagacgtgcggaacccgcgagtaccgctgcgactgcggcaccctcttct

SEQ ID NO: 3999 - DNA, 711 bp, Zea mays
  Clone ID: TF_ZM4183.C11.o1.fg
atggcactgctggtcaagagccaccaccaaatgttggtctcctcctccacctcctcgtcgtccccttccgcgtcccagcagcggcagccaccgccaccacctccctcctcctcctgcctcaccgagcagcagccgtcccccgccaagcgcaagaggcgccctcccggcactccggaccccgatgcggaggtggtggcgctgtcgccgcggacgctgctggagtcggacaggtacgtgtgcgagatctgcgggcaggggttccagcgcgagcagaacctgcagatgcaccggcggcgccacaaggtgccgtggcggctcgtgaagcgggcgccgccgcctcctgctgctgctgctggcggcggcggcggcgccgccgacgctaataacagcagcggcacaggaggtggtgcaggcggcggcgcgccccggaagcgcgtgttcgtgtgccccgagccgagctgcctccaccacgaccccgcccacgcgctgggcgacctggtgggcatcaagaagcacttccggcgcaagcacggcgggcggcggcagtgggtgtgcgcccgctgcgccaagggctacgccgtgcagtccgactacaaggcccacctcaagacctgcggcacccgcggccactcctgcgactgcggccgcgtcttctcacggcacagcaaagtgcagtgggatatgatcgttacgggtggcgggttgcggtag

SEQ ID NO: 4000 - DNA, 1624 bp, Zea mays
  Clone ID: TF_ZmC7489_1
aatcgattggagactcatgatctgggtactggtccagtgaaactaaattcaagctttaatgagatgcacagtgctgatagacaatgccttgactcagctgatgttcctgcttcaactcagcctctgtcagtttcacctgttttgatgagtgatgagcagcatgtcgatgacgcccattctgctgtcaaggccattgagcacctgggcaataatctggctaacataaagcagaaatccctgcatatggatgtcctcatgttagaggacgcccaagttgcttccatggctgcagtccctgggcatgagggagaatctgtcgacgctggatcaaattcttttgatattttacttggagctctggctgaagagtccaaggcagcagatgctcctgggaaagatgaagttggcaaagcttccttgacattaataacactggctagcaatgagccctctgttacagaaggcagagttgtagacgtggtggaaacagacacaattttgggagcaggaaaagatgataaacaagttgatcaggcacatgacttccatttgtcagatctggtgtctagatgcatcgggagctcaaatagatccgatatcatatgctatgtcagacgcaaacacaaaaggaagagggattactcgtgtttcgtccgctctccctgtgagcgcttgaggccaaggtccaagcctgcagtagtcgaggagtcggaatggagcagaacagccgaggcttcttttgctaaaaggggtaagaggacacaagcagtgggatcatttcagtgtgatattgatctgtgtggcatggcatttgagactagggccgaactcaatgcccacaagcgcaatatttgcactgacgagtcatgtggcaagcgtttcagctcacacaaatacttgaagcgacatcagtgtgtccacagcgagatgaggccatttaaatgcccctgggaaggttgtaaaatgaccttcaagtggttgtgggctcagactgaacatgtcagagtgcacactggagagcggccatacaagtgctcggctcctgactgcgggcagacattcagatatgtatcggattacagccgccacagaaagaaatttaaccattactgacagcttctagttttccgagttattggccgcagctcggggcaaatctccagctgcttgtgtcggtgggccttgtttgttgtagtagctcagctcacgtatttattaacaacctgacagctgataggcctagtgaatgttccccgttaacaatgggctagtaatttagtcggtgtaggagttagaaattgttggggggtgaagtgcaacccccttctgttggtgtaggtttgcataagctgatcaccccccactgacacgtggccattcattatttgtttctcagatcagtgatgatgtatttaatccctgatgacaaacttcatgaacactgaaaccatatgatgtcggatgtcaaaatgatcaggggttgccaccgtcctcatgtaattcctgtctttgacgcattgtccaggtcctcattattctgtcatactgtttcagcggattacttgtatgcctttgtctacgcgaaatctaatcatttttaaattcagaaataaaaaaaaaaaaa

SEQ ID NO: 4001 - DNA, 550 bp, Zea mays
  Clone ID: TF_ZmC3270_2
gccaaaccactgcggcctgctgctttcacctccctctccctctcgggctctctcctaacatctcgagctcgatcgcaagccctcaccccctcagacactccttccccaccaccgacatacgtacatgaagcacccgagagacgccggcgccgtgccgctctccctcgcgctgtccctgggcggcggcggtggcgtggccaccaagcacggcatcagcaagaagccccggcgcgcggcgggcggcgagttcgtctgcaagacgtgcagccgcgccttcgggtcgttccaggcgctgggcgggcaccgcaccagccacctgcgggcccgccacggcctcgcgctcggcgtgcccgccgccgcgccggcgaaggaggataccgcgacgaagccggcagcggcggaacccgcgcccgcgagccacctgtgccacgtctgcggcctcggcttcgacatgggccaggcgctcggcggacacatgcgccgccaccgcgaggaagcggccgccgccgccgcgcaggcgccgcccgtcctcctccagctcttcgtgtag

SEQ ID NO: 4002 - DNA, 423 bp, Zea mays
  Clone ID: TF_LIB3068-001-Q1-K1-C7
caagaccttctaccggaactcgcagctggttttccaccaaagaactcacagccgggagacgtacttccagtgccccacctgccaaaaggccttcctgcggagctccagcttcatgaagcaccagcggatccacacgggggagaagccctgcaagtgcgactactgcgggaagggcttcagcgacttctcggggctgcgctaccacaagaaaatccacacgggtgagaagccctacaagtgccccgtgtgtgagaagagcttcatccagaggtccaacttcaaccggcaccagagggtgcacacaggtgagaagccctacaagtgcacccgctgcggcaagagcttcagctggagctcgagcctcgacaagcatcagagatcccacctgggaaagaagccccgcccgtagccgggctctctgag

SEQ ID NO: 4003 - DNA, 716 bp, Zea mays
  unsure (1)..(716): unsure at all n locations
  Clone ID: TF_LIB4172-013-Q1-L1-F9
cgcctgcggtttcggtccggaattcccgggtcgacccacgcgtccgaaccttatatatgttagtgagtgtgacaaatgctttacccaaccatcccatcttagtattcatcgtagaattcattcaggagagaaaccttacaaatgtagtgaatgcgacaaatgctttactgacaaaggcagtctgagagttcatcagagaattcatacaggagagaaaccttacaaatgcagtgagtgtgacaaatgctttactgacaaaagcagtcttagagttcatcatagaattcatgcaggagagaaaccttacaaatgtagtgaatgcgacaaatgctttactggcaaaggctatctgagagttcatcatagaattcatgcaggagagaaaccttacaaatgtagtgaatgtgacaaatgctttactcacaaaggctctctgagagttcatcatagaattcatgcagaagagaaaccttacaaatgtagtgaatgtgacaaatgttttactgacaaaaacggtctgagaacgcatcagagaattcatacaggagagaaaccttataaatgcantgaatgtgacaaatgctctacccgaaatcacatcttagtattcatcagagaattatacaggagagaaactgtacaaatgcagtgaatgtgacanatgctttacccagcactgccatcttagtattcatnaaacgattcattcaggagag

SEQ ID NO: 4004 - DNA, 1260 bp, Zea mays
  Clone ID: TF_700220213_FLI
ccctctcccgctcccgtccgagagatcccagttgtggccgcttccgcccaagagcaacccctggaggccgccaaggacgacggtggctacgaggtcgtggagctcgacgccgccgagctgctagcggagcacgtccacttctgcgagatctgcggcaagggcttccgccgcgacgccaacctcaggatgcacatgcgcgcccacggcgaccgcttcaagaccctagacgcgctctcccgccctggtcacggccagccgaagccgcccgttggcagcaacgtgcgcttctcctgcccctttgcgggctgcaacaggaaccgcacacaccgccgcttccggccgctcaagtcggcggtgtgcgcgcggaaccacttccggcgcagccactgccccaagctctacgcctgcgagcgatgtggcggcaagaagcgcttcgctgtcctggcggacctccgcagccacctccgccactgcggcgaggaggcacagtggcgctgctcctgcggcaccaccttctcccgcaaggacaagctcttcggtcatctagcgctctttgaaggccacacgccagcagttactaagccaaacaaggatgtggtgacagggcctacagagtccaccattgatgctatggaggaagggggatttgaagaaggcattcctgaccgggaggaggatgaagagggcggttatgatccagagttcttcaaggagtggatggatgagctcagaggtggtgctggtggctccaattggcctggaccagcagcagatggacattagcaatgttgcgagggttaataggaattattcggcaagccaaccaacctagttgtgatgttatgaatatgtcagcttgattgtctagcaagtcatcctcatacaaaaagtgtaagattcaggtgataaatattataattagtcctattgtggaagaatgtaaacaacaaatgagtctatgactattatcaagagagcagagctagtgctagaggatcccacatgagtggggttgagaggagggataaaccaaggcaagcctccccccaatgtggagagactgcttcgatcccgcgacctggtaactcagtgaagcagctctcaccagtcaccactacatcaggcctgctcctcaagagatgaaacttttttgttaaacttttgccaagaactctgactagaatgaacagcatgtagcttgaattcaatggtggctgcacttataagtgagtttcataaagtaatatttagtaggtttta

SEQ ID NO: 4005 - DNA, 1818 bp, Zea mays
  Clone ID: TF_ZmC587_1
ctcgaggccggccgggaaaaactatcttagcacagcagcaccaaagcgcgtcgtgtcgtgcaaacccaactttgataccactcgctgcctggttatggactccaccaggagcaaccaggtcgccggcagatgcagcagcaccatcgcgtcaagggctgccacggtcccgccgtcgctgaccatgccgcgcggcgaactcgctgacgccatcgtgggcggaggcggaggaggaggagcggacggggacccccgggccgccctcctccgtctgtctgctctcggggaccgcatggccgccgtccggggccgtatctccgcttctatctcgggcgaagcccggcctctctcctacgccgacatccaatctgtctcctccgagatctccgccgctgcccagctcgtcgtcctcaacgccgccgagctcctcgcttcctccgtcccctttcccgccccacctccacctcctccttccgccgctccctctcccgctcccgtccgagagatcccagttgtggccgcttccgcccaagagcaacccctggaggccgccaaggacgacggcggctacgaggtcgtggagctcgacgccgccgagctgctagcggagcacgtccacttctgcgagatctgcggcaagggcttccgccgcgacgccaacctcaggatgcacatgcgcgcccacggcgaccgcttcaagaccctagacgcgctctcccgccctggtcacggccagccgaagccgcccgttggcagcaacgtgcgcttctcctgcccctttgcgggctgcaacaggaaccgcacacaccgccgcttccggccgctcaagtcggcggtgtgcgcgcggaaccacttccggcgcagccactgccccaagctctacgcctgcgagcgatgtggcggcaagaagcgcttcgctgtcctggcggacctccgcagccacctccgccactgcggcgaggaggcacagtggcgctgctcctgcggcaccaccttctcccgcaaggacaagctcttcggtcatctagcgctctttgaaggccacacgccagcagttaataagccaaacaaggatgtggtgacagggcctacagagtccaccattgatgctatggaggaagggggatttgaagaaggcattcctgaccgggaggaggatgaagagggcggttatgatccagagttcttcaaggagtggatggatgagctcagaggtggtgctggtggctccaattggcctggaccagcagcagatggacattagcaatgttgcgagggttaataggatggtttgacaagggacatctgcttacatcaagtgaccaggaggatcaataaagactgaataaaggtgatagtaaagaaaagaggtgctttgggatagtttgtaggatttctctttaccattgtgtttgtgcgttcgttctaaccagtagcttgtatggtatggtgtgcgtgtgttgtttagttgctgttcactgggcctctcccttgccattctcggttgctttcatgttatcctgtgaatttgtgatctaccaggtaatacagtggagaaatgtgtcatgctctgtaagcgttctccttggctgtgtgggtcatggagttgccggttacggaggaagaaggatagcttgcaggaaaacggtggcaccagttccctgtgcgctgctgaggatgcgaagtattcgggggagttttagaaaaatactttggttttgtgaaacaatttggttttagagtgtcttgatgtgtttggacgcaacaaactttgtagttttgaaaatcatagtattgctaaattgtaggcttccttctatg

SEQ ID NO: 4006 - DNA, 266 bp, Zea mays
  Clone ID: TF_700352188H1
cgggaagcactttagcgcctactcttccctgatttatcaccagagattccacaccggagagaaaccctataaatgtaatgactgcgggaaagccttcagtgatggctcaatccttatccgacatcgtcggactcacaccggagagaagccatttgagtgcaaggaatgtggcaaaggctttacacaaagttctaaccttatccaacatcagagaattcacactggagagaaaccctataaatgtaatgaatgtgagaaagctttca

SEQ ID NO: 4007 - DNA, 977 bp, Zea mays
  Clone ID: TF_ZmC205_27
ctagtatgttccaccatcagcaggagctcctacaggcagaagctgcggcggcagatcgggagagcagcatgtccaacaacctcacctcctccgcgcccggcggccccaacgcggcgccagctgctgctgcggccaccggcaataataacaagcgaaagcggagcctcccaggcaaccccgaccccgaggcggaggtcgtggctctgtctccggcgacgctgatggcgacgaaccgcttcttgtgcgagatctgcgggaaagggttccagcgggaccagaacctgcagctgcaccggcgcgggcacaacctgccgtggaagctgaagcagcggggcgcgggcaaggaggcgcagcggaagaaggtgtacgtgtgcccggaggcgtcgtgcgtgcaccacgacccggcccgcgcgctgggcgacctcacgggcatcaagaagcacttcttccgcaagcacggcgagaagaagtggaagtgcgacaagtgctccaagaggtacgccgtccactccgactggaaggcgcactccaagatctgcggcaccagggagtagcggtgccgtgggccgtgtgcactttccaggcgggacagcttcatcacccaccgcgccttctgtgacgcgcttgccgaagagagcgccaaggcgcgggcggaggcgccttccgcggaggatgggagctcggcagccgccgtggttccgccaccggcacccccgattgcgccagcgccggcgccactgcgacagcaaccgcccccgcctgcgccgcaacatgcggagccacgtaatgagcctgacacgaatgcgactgaggccgtccagttcgcgccgccgactccgccaccgccgtcgacgtcgcagttacagctgccggtgctttcgcaagcttcggtgagcgctgctgccaacgttagcgccagcagcagcagcagcagcgtcgcggggacgtcgcagagcctgctcggcggtatgttcgcg

SEQ ID NO: 4008 - DNA, 1779 bp, Zea mays
  Clone ID: TF_ZmC9242_1
aattcggcacgagggcatggtggaaccctagagcttcacccctttttagcaccagcattccgccgcacgacctcgagtccggccgggactcacacaggtgcggcggcgcacactgctgcacactgcactccctccgtcccgcgtccccgttcggcgctctcggcacgaccgccggtagcccgggacgcacgtcgcacggccccatccctccctagcggccggtgacggcaccggcggccctttgctcggctgtgcccaagctgcgagggcgagatctacccccgcgtccgtgcatcttcgtcaggcccttctccggacgagcactcacaggatgtgttctgaagttcatgttgagggagatgcaagtgtcggacagaagggttgcaaggatataaggcgttacaaatgtgaattttgcacagttgtcaggtcaaagaaatgcctaattcaagctcacatggttgcacatcataaggatgaactggataaatcagaaatatacaactcagatggggaaaagattgttcatgagcaggaacataggtgccaagagtgtggctgttgtttccagaaaccagctcatctgaagcagcacatgcaaagtcactcacatgagagactctttatttgcccacttgaagactgccccttcagctataaaagaaaagatcacttgaaccgacacatgcttaagcatgagggcaaattgtttagttgcaccctggatggttgtgatatgaggttcagtatgaaggcagatatgcaacggcatgttaaggaaatccatgatagtaagaacccccatcaatttgtttgtaaggaggacggctgtaacaaggttttcaggtattcatcaaagctgaagaaacatgaggaatctcatgttaaattggactatgtggaggtagtgtgctgtgagccaggttgcatgaagatgttcagaaatgttgaatatctgagggctcataaccaatcttgccatcagtatgttcagtgtgagatatgtggagaaaagcacctgaagaagaacatcaagcggcatctgcaatcacatgacaaggtgccctctgatggaaggatgaaatgcacttttgatggttgtgaacacttcttttccaacaaatcaaatctgaccaagcatgtcaaggcatgccatgaccagctgaaacctttcaagtgcggaatcgttgggtgtggcaaggcgttcacctacaagcatgtcagggataaccatgagacatctggtgctcatgtatacatggaaggagactttgaagagttggatgagcagttgcgtgcccggccaagaggtggtcggaagaggaaagcattgacggtggaaacactgacacgcaagagggtgaccatctccggcgaggcttcatccttggatgatggagtggagtatcttcgctggttgctatctggtggggatgattcaattgattgtcagtagccggcgtctttttgctatcaccgctgctttgtacatgggttagattatgtaatgtaagttgtttggtagactacgatggtgttcatgacgcgtttgatatattgtcagcagtatggtagtgcagggctctcatagtaaagcttgccatttttgttgtatctttaacccacgtgggtccagatgatgtgtttattcctatgtatttacttatctacatgtatccacatgtgcgactttggcgtttgtttgagattataatttaaaaaaaaaaaaaaaaaaaaaaaaaaaaaaaaaaaaaaaaaaaaaaaaaaaaaaactcgtga

SEQ ID NO: 4009 - DNA, 1636 bp, Zea mays
  Clone ID: TF_ZmC13146_1
acctcacctcacctcactcccaggcaagtagccaagaagagagaagcaaagtagaaagagtgcgccggagcaagaaaccacgccatccatggaagacccctacacgagcttcctcaagaacccccactactactactgcacttcctccttccccgcccctccccccacccctcacctccctcctcccttcccaccttacgccgccctctaccccgccgtggccgcggctgcgaccgcagctcctcaccaccagtacccctcgttcttccagcaccagccggcgcagcccgctcatcactacagcacggcgcctccctcccctccgctccgggaggcgctccccctcctctccctctcgcccacgcccgccgcccgccctcgtgccgcccagcagcacgacgtcgccgacaccgattccgacgacgatgacaacgactgctgctaccacctgcagcaggaggtggcggcgggctcgaggacgacctctgcgcgcacaccgctcttcgccgacctcaactgcgtgccgtcctgctgcgacgacggcgacggcgacccgatggacgtcgaggcctcctggtccacgtccacggacgacgccgccgttgctctgcgcatcggcctgccggccgcggaagctgaccttctgtccgggctttcgggcagggccgcggaagaggacgaggaggaggaagatgattgcaagccgggaggcgggcacgaggaggttccgctagggttctcttcgtcggcgccgatcgggaggctgaccaaagggcagtactggatccccaccccgtcacagatcctcattgggcccacccagttctcctgccccgtctgctacaagacattcaaccgatacaacaacatgcagatgcacatgtggggccacgggtcgcagtaccgcaagggcccggagtcgctgcgcggcacgcagccgacggcgatgctgcggctgccgtgctactgctgcgcggcggggtgccggaacaacatcgaccacccgcgggcgcgcccgctcaaggacttccgcacgctgcagacgcactaccgccgcaggcacggcatcaagcccttcatgtgccgcaagtgcggcaagcccttcgccgtgcgcggcgactggcgcacccacgagaagaactgcggcaggctctggtactgcgcctgcggctccgacttcaagcacaagcgctccctcaaggaccacatccgggcgttcggccgcggccacgccgcctgcggcgtcgacgactgcttcgacgacgacgacgaccgcgacgacccgtcgtcatccgaggtcgaccacgcagccaccaacactactagtaacagcaccactactaccgctgccgccgccaatgctcaccaccatcaccacaccagctggaagccgccgccgccgccactgtcgtcgtcgagcagaggctccggcgacgaccgactactatagatcgacaagggtgagtacgtacggtcctactacatacatcctacacagcaaccagtcgatctgtagccaaatgcaaacgtatgcttgtgtgcgtgtgtgtataaccatgcatatcatccatctgtccgtgtcttactcagtgtttaaaatagcgggctaaggcatttatcctcggccttttttaac

SEQ ID NO: 4010 - DNA, 462 bp, Zea mays
  Clone ID: TF_ZmC1325199_1
atgaagcggctcacgcaggatgaggaccaagagcaggagcaggagccgggcgtcgtcgtcagcgtggcccagggggtcacgctgctgctcgcgcgcagcggcggcggcggcggcggcggcgagccgcgggcctcgccgcgcgtgttcgagtgcaagacgtgcagccgccggttcccgtcgttccaggcgctgggcgggcaccgcgcgagccacaagcgcccgcgggcggcgccagccaaggcccgcccgcacggctgcggggtgtgcggcgtcgagttcgcgctcggccaggcgctgggaggccacatgaggcgccaccaccgcgccgtggccgaggagtgcgaggcgcgggacggcgcggcggctagcgcccacgggatggacgtggacgacgccgaggcgaagccggaggaggaagcgacaggcctgctgcgctttgacctcaacattgccccatcatga

SEQ ID NO: 4011 - DNA, 795 bp, Zea mays
  unsure (1)..(795): unsure at all n locations
  Clone ID: TF_LIB4172-011-Q1-L1-C8
ggtacgcctgcaggttccggtccggaattcccgggtcgacccacgcgtccggaaatatgcaggagaaaagtctttgcataatgtagagcgagccgtggggctccgggagcggcgccccaaggtctggggccatgaacgcgagcgtggaaggagacaccttttctggatcgatgcaaatcccaggaggcaccacggtgctggtggagctggcaccggacatccacatctgcggcctctgtaagcagcacttcagcaatctggatgcctttgtggcccacaaacagagcggctgccagctgactaccacgccggtgacagcccccagcacggtccagtttgtggcagaggagacagagcctgccacccagaccaccacaacgaccatcagttcagagactcagactatcacagtttcagctccagagttcgtctttgaacatggctaccaaacttacctgcccacggagagcactgacaaccagacagccaccgtgatctctctccccaccaagtcacgcaccaaaaagcccacagcaccccctgctcagaagagactcggctgctgctatccaggttgccagttcaagaccgcctatggcatgaaggacatggagcgacacctgaagatccacaccggtgacaaaccccacaagtgtgaggtgtgcggnaagtgcttcagccggaaggacaagctgaagacgcacatgcgctgccacacgggcgtcaagccctacaagtgcnagacgtgncgactacgcgcggcggacagcagcagcctttacaagcacctgcgca

SEQ ID NO: 4012 - DNA, 788 bp, Zea mays
  unsure (1)..(788): unsure at all n locations
  Clone ID: TF_ZmC669707_1
gattcacccgcttccgagaaagaattaatagcactcgatcgatcgggctcaccacgtccagctctcggtcctcgtctttgctgctagcagctagctagcttcgcgatcgtgctcaagatcaacgacgatccatggcgtatggcaagaggtcacgccagaaggccgaggagatggtctggctgcccgacggcgccgatgtcgcgcgcttcctgctgctcttctcgggccaccagcactaccacggcgacggcatggcggcctcggcgcccgagcgggtgttcgagtgcaagacctgcaaccggcagttcccgtccttccaggcgctgggtggccaccgggccagccacaagaagccccgtctctcggacggcgtcgatgccgcagcggccgagccgcccaagcccaaggtgcacggctgctccatttgcggcctcgagttcgccatcggccaggcgctcggcgggcacatgcgccgccaccgggctgccgatcagacagacggcggcagcctcggcaccgggctcaccccgaaatacgacagcggcaagacggccgcatcgccggccgagctggttctggaccttaacgccgtgccggagctggaggaagagcaggatcacgccaagctggagctctccatcgaatntcccgtagcagtagttgactttcacgcacgctaagaaataacgtggnaatagattgaatccttctcggtttcatttttccattattatttacataaattacaaaaatacacattaatcaaaaaaaaaaaaaaaaaggcccct

SEQ ID NO: 4013 - DNA, 746 bp, Zea mays
  Clone ID: TF_ZmC1140_3
cctcgaggccggccgggatctctctgtggttgtttttggcttgttctcccactaacgcttggcgactcacgagtcgagggtttctctcctgcgcggcggctacctctctccacggcggcggcgggcgatcctgcagatcccgcggctccctccgcgattcgagtcagactcagatgggggaaggcacagagagcggcggcggggcgaccacagcgccgcctctgaggtatataaggtgctacaagtgcgggttctgcgacgtggtccggtccaagaagtgcttgctccgcgcccacgtgcttgagcaccacaaggggtaacacttatggggtgtgtgtaggatgaggtggatgctttggggggttactgggaaggtggagatgctggtccgcgcaaagagctcagccgtgcgtgcgaacagtgcgggatgagcttcaagaagccggcgcatctgaaacaacatatgcagagccattcgctcgaggctatttgttgacatatgaatgcgtgaagcattggatcccaaagaactccaaaatgcgataaggccttgaatggactagtatcaggattgggagaccatcctgagaagctccatcaagcatgccttgttcacgcgtttcttaagaggcccttttcctgcactgttgatggttgcccctttagctatagcaggaaggatcatttgaacagacatttacttactcatgaaggggaaactattttgtgtgccctggtcgaaggat

SEQ ID NO: 4014 - DNA, 679 bp, Zea mays
  Clone ID: TF_ZmC66749_1
cccacgcgtccggacgacgaccacctcgccgccgcccatgtcgtcggtcccggactgggccgacgccatcgtccccaacagcaagcgacggcgccaccggtcgccgcccgccgcttcatcctcctcctcgcacagcagcagcaccacacagaaagaggaactggaagacgaggaggaggacatggccaaatgcctcatcctcctcgcccagggccccgccgccattgaggcagctagagtaatgccggcaccccgtagcaggccaaagagcacggggagccgcaggttcttggccgccgccgaggccagaggtggtgtgtgcgtgtcgtacgagtgcaagacgtgcaacaggtgcttcccctctttccaggccctcggcggccaccgcaccagccacaacaagcatccgcgacggccagcagaggaggtgctggcggcaatggccatcaccaccacgcttagcctagcggcgacgaggcccgcgcacgagtgctcgtcatgcggctccgtgttcacgtccggccaagcgctcggcgggcacatgaggcgccaccggccgctcaccaccaccagctcgtcgcccgccacggggaccgaggaccaacaagacagcagtagcaagctgctgcaggagagtagaatcaacctggagctggacctcaacctgctgccgtcgacg

SEQ ID NO: 4015 - DNA, 1874 bp, Zea mays
  Clone ID: TF_ZmC795_1
ggtaccctcgggccggccgttgttggctgaagaaatggaatttgagtatgattggaaggatatttttttcgaagaggccactattgtggatagggagacgatacaggaagttgtgcaggatgaggaagcaataccggctcgaggtgattgggctgtaaaactgggcattaatctgtactatagtgctaatcttgctaagtctcctttatacagtaagcaagttccatacaatagagttatctatgaggcatttggctgcggttctcccaatgactcaccagtgaagctgaagacttattccagaaggcaatgcagggcgaagaaaatagtcttggctggcaggtggtgtggaaaagtatggatgtcaaaccaggttcatccatacctggctgacagaatcaaaaatcatgagccgaaagaaatcgatgaaacatttccttctgatcagaaatcccatgctgaacctgttgaaaattcaagtagagaggcagcctccacaagaaagagtagcagcagaacaattgaaggaaaaacaagcaagagggagaaagaacagttggagaaagctaatgccaagaagccaaaatttactgaagaggacaactccaaatcattggagggtactgctgaagcctccacacagaagataaagggcagatcagttctagaaaaaacaagcaagaaggagaaagcgtataccaagaagctaaagcatactgaaaaggtctcggaagcactaaaaggtccttcagaagcctccttccctgcaccagctgggatggtagtccgcagcagctctaggatcgccaataggaaaatcatgttgaaatcaaagatggaagaagaggataatggctcagctgaccgtccaaagtcaaaggtcgaagacgacaaagataatcctgctggccgttcaagagcaaaaccactaaggcaaaagactaaagtagacgcgaagaagaaaacgaaggaaactagagtagaaaagcgaaaggctcccagtccagcttctcagaaggacgaagaggagcaatcagatgatgtcgagggacgttctaccactaaacaacggctgtctttacgtaagaagggggctaaaacagaaggaaaacagcgaatggagaaacccagattcgggggaagtgctcctcccccaagctctccgaagcgcaaggaagagtacgtgtgcgacatcgaaggctgctccatgagtttcggcacagagcaggcgctgtccctgcacaagaacgacatctgcccggagaagggctgctgcaggaagttcttctcgcacaagtacctgcagcagcaccgcaaggtccacgccgacgaccggccgctgaagtgcccgtgggagggctgcggcatggcgttcaagtggccgtgggccaggacggagcacgtgagggtccacacgggggacaggccctacgtctgcctcgagcccgggtgcggccagacgttcaggttcgtctccgatttcagccgccacaagcgcaggacgggccatggcgcgtccaagaaggcgaaagcgaagaagcaaggcaaagcagcagtaacttagtactagtagtttagcacccaaaaccaatggcgcccttctgaaatgagtagccttggaagggacaggaggaaaacttgtagattccattagcagtttagcacccaaaaccaatggtggtctctgctcacagttccattaattgctagttgaacgggttcgttggagcccacaattaggttggttccctgtgagtaatttgggtaatcattaagacattctcgtacagtttgccttttgcttatcgttcgtttatcttttgctggatgatgtcttgcttatggtaagcacctgtctagctccttttgccttc

SEQ ID NO: 4016 - DNA, 3247 bp, Zea mays
  Clone ID: TF_ZmC6856_1
caactttactacccgtctcgcgcgagacggaacacattccgcttgtcctctctcgccgctgctccgacgagctcgccggcgccgactcccctcccgtcggaccagcccgccgaaagcggccggacgaacgagaggcttccctcccctcgcacttgcctgcctcgtcgccttcctgagcctctttctgcgcccggccacgggctcgcggccccacgcccgagcacgtgcagcaggcgccgaacccgcctcctgtgccaccccatcggagctcgccggccacgtggagggattccttttcctggcagcattcctcgtcgccgacggcttcgtcgtgctccaggggttggattggcgtggagcggagagcagtgcaaacctgggattgaattctggtgtagatggattccacagctcttcaatatgaaaaccaaaaattggtgcaacaactggaggtacagaagtccgaaatgcatgcattggagcgcaagttcaaggagcttagtgatgatcaatgttcttatgacaagactctgatttctttgaataaactgtggaatcagctgattgatgatttggttctgcttggagtacgggctggtggggatttggataatttgcaagcacttgaccatgaagagttatcagaagaatctttggagtcgtgtccttccgaggagatatttctcttaaggctcttgaagacaaacaacatcagagataatagtgacactagcttgttgaaatttgttgaagaagctcttgcttttcggtcttcagcaactgttactttgatgaagtccctgcaagagactatttcttcgcagcaagctagaagtgagtctttgtctttagctttgaatggacaaaagtcaaatgaagatgttattgttgcccttcgaaatcataatgattgcttgaaagaggtggcagagaatgcgagtcaagccatctctattatcaacgagaagcacaaaaggtatcttgatgagattgaggcttttaaaagcaaccattcaagggagctacaggaaatcaagcgtatttcaggtgagctagaggaaagcattgcagagcttgaggaaagtcaaaggaagttggttgtgctccagttgcagaggcatggttctgtaatggatgcatctggggcaaatgctgtgaatggtggtatttctactcataaatcttcagataaaagtatgagctggcaagacctcaaagatgctgttgacgcagctaagaccctcgcaggaaaccgtctattagaactccatcagactcaagaggataatctgatactatccaaggagctgggagatcttgaggggcaattgaaagatgagaagtatgtcttggtatccaaaccgtacatgattcttaatgataaactacaacatttgaatgctgagatagagcgttatagagggttggttgaagttttacagaatgacaaggaccagctcatgcaaagggagaaagaaatttctgcaaaagcagaatcgctcgacagtgttaaacaaaccgagacgcctatatatcaaatatcgagacagttggtcaagcatatgaagacatgctaacgcaaaatcagcatcttcttcaacagcttactgatagagatgacttttaacataaagctagtatcagatagtgtgatgatggatcaagcttgtagtccccttctctctgagggtatgatggagaatcagttgagtcgatcaaaggatgcagcttctgaagcacttgcattgcgtgagcaagctgaatcattaagatcattggtagctaaaaagattgaggaacacaagaagatttcggataaatacaactcacaagtaattgagatcaagtccctcaaggcattggttgaggagttggagcaggaaaagcaggagctggagtttattgcagatatgtacgtgaaagaaagttctgagtctaggacaattgctgatattgaagaatcagaaacccgagctcgcaatcaggctgaatatttgaggagcaatctagaggagcatagtcttgagcttcgggttaaagcagcaaatgaagctgaagctgcatgccagcaaaggctttcctttgctgaagtggaactagaagagttaaggaccaaagtagatgcatctgaaagagatgttgtggaacttaaggaggcaataagaattaaagaggctgaaggagacgcctatatttctgatatcgagacagttggtcaagcatatgaagacatgcaaacgcaaaatcagcatcttcttcaacagcttactgatagagatgactttaacataaagctagtatcagatagtgtgaagatgaaacaagcttgtagttcccttctctctgacaagcttatgctagagaagcaactccagcaagttaacacttcactggagtcatctaaactgaaaattgcccgtggcgaagagcagatgaagacttgtgtagcgcaagctataaaaacttcagctgaaaacagacatcttactattagcctggaaaggattgcgctggagttatccaacacagataaggaactcaagtggcttcggtcctccgttggatcctctgagaaagaatacgagcaaactcagcaaaagatatctgagctgagagcgttactggagcacgagaggagtgagaggcggcggcttgaagaacaatatgaagaggtgaaaaatgaagttatggagctgacctctgagactgaagagactactgtccggaaacttgaggatgaaataaaagaatgcaagggtattctcaagtgtggtgtatgctttgaccggcctaaagaggttgtgatcaccaaatgtttccacctattctgctcgctatgcatccagagaaacctcgagattcgccaccgaaaatgtcctggctgtggaaccccattcggacaaaacgacgttagggaggtgaagatatgaacctcaccaaagtgacagtgacaaaaccgacttgcgtgtgaacagcagcaacaaactcccttgtgaatatcgtctgttatgttggcgaacatctagatctaacttgctttattactgggattaaaattaggataagaactggaagaagtgaagttcctaatttatttgctatcgtgtgtgctatgtatgattacccttggcagcgagtggtgtatctgctgggtgtcaatatgctcgaattctagctcctccctgctagcgggtgcatgccagttttattaaggctattccatgtacatggtgtcaccctctttaat

SEQ ID NO: 4017 - DNA, 2096 bp, Zea mays
  unsure (1)..(2096): unsure at all n locations
  Clone ID: TF_ZmC6856_2
actcaaanagctgttgacgcagctaagaccctcgcagtcggcacgtctattagaactccatcagactcaagaggataatctgatactatccaaggagctgggagatcttgaggggcaattgaaagatgagaagtatgtcttggtatccaaaccgtacatgattcttaatgataaactacaacatttgaatgctgagatagagcgttatagagggttggttgaagttttacagaatgacaaggaccagctcatgcaaagggagaaagaaatttctgcaaaagcagaatcgctcgacagtgttaaacaaaccattatcacatatgagaaaaaaattgaagaactggaaactcaaattcagatactcttttctgaaaagaatgatctcgaaaccaaggttgaggagactttgcaagattcaggtaagaaagacttcaagaatgagattcatgttatggctgcagcactctccaatgaactgggtatgatggagaatcagttgagtcgatcaaaggatgcagcttctgaagcacttgcattgcgtgagcaagctgaatcattaagatcattggtagctaaaaagattgaggaacacaagaagattttggataaatacaactcacaagtaattgagatcaagtccctcaaggcattggttgaggagttggagcaggaaaagcaggagctggagtttattgcagatatgtacgtgaaagaaagttctgagtctaggacaattgctgatattgaagaatcagaaacccgagctcgcaatcaggctgaatatttgaggagcaatctagaggagcatagtcttgagcttcgggttaaagcagcaaatgaagctgaagctgcatgccagcaaaggctttcctttgctgaagtggaactagaagagttaaggaccaaagtagatgcatctgaaagagatgttgtggaacttaaggaggcaataagaattaaagaggctgaaggagacgcctatatttctgatatcgagacagttggtcaagcatatgaagacatgcaaacgcaaaatcagcatcttcttcaacagcttactgatagagatgactttaacataaagctagtatcagatagtgtgaagatgaaacaagcttgtagttcccttctctctgacaagcttatgctagagaagcaactccagcaagttaacacttcactggagtcatctaaactgaaaattgcccgtggcgaagagcagatgaagacttgtgtagcgcaagctataaaaacttcagctgaaaacagacatcttactattagcctggaaaggattgcgctggaggtatccaacacagataaggaactcaagtggcttcggtcctccgttggatcctctgagaaagaatacgagcaaactcagcaaaagatatctgagctgagagcgttactggagcacgagaggagtgagaggcggcggcttgaagaacaatatgaagaggtgaaaaatgaagttatggagctgacctctgagactgaagagactactgtccggaaacttgaggatgaaataaaagaatgcaagggtattctcaagtgtggtgtatgctttgaccggcctaaagaggttgtgatcaccaaatgtttccacctattctgctcgctatgcatccagagaaacctcgagattcgccaccgaaaatgtcctggctgtggaaccccattcggacaaaacgacgttagggaggtgaagatatgaacctcaccaaagtgacagtgacaaccgacttgcgtgtgaacagcagcaacaaactcccttgtgaatatcgtctgttatgttggcgaacatctagatctaacttgctttattactgggattaaaattaggataagaactggaagaagtgaagttcctaatttatttgctatcgtgtgtgctatgtatgattaccctttgggtagagtacccttggcagcgagtggtgtatctgctgggtgtcaatatgctcgaattctagctcctccctgctagcgggtgcatgccagttttattaaggctattccatgtacatggtgtcacactctttaatacataccacataggatgaaaatctgatgtgacatgtgattgaaac

SEQ ID NO: 4018 - DNA, 1732 bp, Zea mays
  unsure (1)..(1732): unsure at all n locations
  Clone ID: TF_ZmC25442_1
tgaagtcaccaaggatgcggatgctggacttgaatatggaaaagtatcttccnctgaactggtacaagcggtccatgatatgctttcagctgcaggagtaaggatggatgctgagaaggaaacactctttgaggctactctttccttgcaagatcagcttaaagaatctcaagttgctctcttggtagagcaggagaaggcggaggcggctgtaaaagaggctgatgtcgccaaagcagcatgggcatgccgtatctgcctgaatgctgaggatgcattaaggattgtgatgatcagcgtaaccaatcatttcccttcatttgaagcccttgctttggttcagatagaacggacactagaggatatatcacagaaactgcaactggttcaacgtctccatactcgctttctcttacttcccaatctccaagatgttacaagaaccatccagcatccttctattcatgaatggtcaagcaatggaatgcaccgaagcatttgtttcgtcaacaaagctacgggttatattctaatcgcagagcccccaagttttttgacgatatatgatgttatcgcaattattgttagtcacaggttaggggcaccaatgatcttgccgattgcctcagtgtttgcatgcccagatggttcagagaaagaagtccttcaaattcttcacctgggttcagactttggagtttcaaaacgtgaagggagatacgacgcttcccttggagcagaattgttatctcaggatgctcggcaggtgcaattccttccattaagaccgttctatagtggtgaaattgtggcatggaagacaggcaaagagggggaaaagctcaggtatggtagggtccctgaagatgtaagaccctcagctggccaagcactttacagatttccagtagagacagctcctggcgaaattcgcatgatgctttccagtcatgtttactcatttaaaagtgtttcaatggctgatcttctatctgcaccttcccaagtgaatggtgatgtggcattaggtggccaagagaaactcttggccaccaacactggcactgaagtcaccaaggatgcggatgctggacttgaatatggaaaagtatcttccactgaactggtacaagcagtccatgatatgctttcagctgcaggagtaaggatggatgctgagaaggaaacactctttgaggctactctttccttgcaagatcagcttaaagaatctcaagttgctctcttggtggagcaggagaaggcggaggcggctgtaaaagaggctgacgtcgccaaagcagcatgggcatgccgtatctgcctgaatgctgaggtcaacatgaccatcataccatgcggtcatgtcctatgtaaccgatgctcaagttcggtttcgcggtgcccattttgccggacgcaggtggccagaatgatgaaaatattcaggccataaaaaacattgaaggacgtttggtctgactaaccgcttcagcttgtgaatgtgttacgatatcggggctcggctcccttctggttgtgcgctgcattcctttctggtctgatgcatctcattattctccatcggtgatgattggtaatccgatatggggggtgcaagtatagttacgttgtacaggaacgatgcattgcagtgtacagattccaaaatgaaatcattttacacacttcgaagggcataaatgtctgaagctggttttctcgtgctata

SEQ ID NO: 4019 - DNA, 878 bp, Zea mays
  Clone ID: TF_ZmC49155_1
cctcgaggccggccggggacgcgattaccgacggcaggtgagtgtgactatatattactttgccacggaaggaaaggactgtagtttttcttcagtatacccagaattacagacgccaacaaagatacccttcgagaaagggttggcccaaaggtttatccagccctctggatctggtgttgacttgggattcttttctcttgatgagctttcgagttcatcaggggaagtattcccacttgttgtttatgcagaagcatatccatctccagaggaaggtggcccgtcagtaaacgccactcgtgcacagattactcttgctgttttggagaagcacaacaacgaccttcaagtcaaagttatgaagcaaatcttgtggattgatggcgtgaggtatgagctacaggaaatttttggtcttgtcaactccactgaagcggatgttgctgatgctgatgccgatgacacggggaaggaatgtgttatctgcttgtcagaaccaagagacactgctgttatgccttgtagacatttgtgtttatgcagcgaatgtgcaaaaactctacggtttcaatcaaataaatgccccatatgcagacagcctgttgaaaaactaatggagatcaaagttagaagtcctgggccataaaggagagtttgctgatatcgttgctgctgcactatgttatgtaattgtccataatcctgtaacaacatcgatcttgaagtgtatagttctgttgatggttgtgaacttgtgatgatgcggtctagaaatgaactgtgaagacctttgtttggcatttgataaaaaaaaaaaaaaaaaaaaaaataaaaataaaaaaaaaaaaaaaaaaaaaaaaaaaaataaataaagg

SEQ ID NO: 4020 - DNA, 1660 bp, Zea mays
  Clone ID: TF_ZmC64108_4
cctcgaggccggccgggctcgtggaagctcacggtcccccacgcccacgagcgcctccgctgcgacgaagagatcatcaggcgcccggggacggcggcgggggcggggccgcggcctgctcaatctgcctggatgcggtgctcgcccgcagcgctggtcgctccgtcgccaagctacaatgcggacacgagttccacctagattgtattgggtctgcattcaatgcaaaaggagcgatgcaatgccctaactgtcggaagattgagaaaggtcgctggctttatgcaagcggacatcgcgcctctgttgatattgatatgggtggctgggtgaccagtgacaactatgatatcacctccgagcttccttttggatttcaatggtgcccctttagtggattcacccggctagcatccatgtttgaggagcgtgaagctgagcttacttatcacacaactggagatcgctcaagtgctgcaagcagttcacttgtttgcccatatcttgccctgcgtggttttctgcatcctgttcatgtgccttctacatctaatcctggtgctgaaagcacttcatttcgtcggcatgcaactggcttggaaggccatgccactcttgatttgaataatgctcaacttttccatgcgattgagtcaataaatcatgacagtgagcacagacatttgagtaatcttcctgtatcaggaattcctgagtattctatgactccatttggtataggactaccaagatatgacagtggcagccaacagagattcagatcatatgcacatcatcatcccctaatccataggccagctcctcgcagtgggagcaatttggtggcaccaccattggggtcgattccagctgtggtggcagcggcagagacagcaagaggcagccacatgtaccaacactcgtccgtgcacggaagcccgttccctcctaccaccactagaagggtgaggccgagagccttgacgatcacatcgttcatcgcagcgacgtcctcaggtgagatcggaggcccccatggattctccgctcctggagccaccatgaacaggagcgtctctgacgctgagggcatctctagacccattgaccggccgtacaatgcatggggccgggagggcttcgctccgttcccctggatccccgctgaaggcgagtctcactggtggggcaccttcaaccccgtgcagaaccatgcgcatggaggctttagcagaaggcctgctggggagcggatgccgccgcagagccaaagccacccggagaacagctatcaggctgtgccgccgtcacagaggatgccgccgttcttgtgattcgacaaggctgttcctacgtccgatcgctgtatataaaaagaagtattcggttcgggatctgagagagcacattgagcgaagatcgactgcactgcagtctccagcgttgggacctgtgtgatgtttatgccgctggtatttcagcgtttttctttttccctccggcccagcactctggtttcattgagcgctgtagactgtctgtcctaactgatgtgttgcgttgaggaggacgatttggaaacgtgagccgaagctgaactgcatctctggtcgccggggctaaaaaatgccgtttgctgctatgaaagttgtatcgattt

SEQ ID NO: 4021 - DNA, 3095 bp, Zea mays
  Clone ID: TF_ZmC106180_1
atctcccctttctctcttcgacattctcatcgcgctggcttcgcttggctgctaaggtcaaatagccatgctgctgcgcaatccgccacttggctttctctttcctctttaacccccctacgggctccggtctcagggcgcttcgcatggccatggcctccgcggtggctccggctcctccccttgccagcgacgaccaaaccgggcaaaagcgccgccaaatctgcatctgacctccccaccaccaaatacccaaccagcaccacccaccgccttctgctttctttctttctcgctccttacagcaacacatagcgctcagctcacacctcacagtcagctcaggctcatcttctcagcgagttagcagcagcagcttgaggcccagccgcggctgcctgcgcgcaagcataatggagagcagatggcggaaggccaagatgtcgctagggctcaacctctgcgtctacgtgccccggacgctggaaggcgacgacgcggccagctcgcccgacaccgcctcctccacggcggcgctcgtgtcgccggtggcctcctcctcgtccgccgcgacgagcaccaacaccacccccacggccgcttcggcggaccagagcagcgccagcggcaaggtgctcatgcccaccacaccgacgccgacctccgccggactccgcctctccaaatccggcagcaaatcattcaagaaaacatgtgccatatgcttgaccacaatgaagcctggtcagggccatgctctcttcacagcagagtgctcacacactttccacttccattgtatttcggcaaatgttaagcacggaagcagcagctgcccagtgtgtcgtatcaaatggaaggagctcccatttcgaggtcccttgcctgctgaattacctcaaggaaatgcgaggattaatccagttaatgggtaccaaaatggaggccatatgaacatattgcgtccacttcctcgtgcacgctcttctggccggcttcatcatctggccacgttgctgcctgacactgaccctagtactttcaacgatgatgaacccttggacttgtcgtctgaagaggctaatgacaatcatcagggctgtttgagaacagtagagataaaaacatatccagagttcactgaagtacctgaaaatacatcagaaagaaacttcactgttctgattcaccttaaggcaccggttgctcagcacctgcagccatccagcaatctcggagatggcaacgggctaagtacagcccgtgcccctgttgatctcatcacagttcttgatgtcagtggaagtatggctggtaccaaacttgcattgttgaagagggctatgggatttgtcattcagaatcttggatcctctgaccggctttccgtcatcgccttctcatcatccgcacgtaggctcttcccactccgtaggatgactgagtctggtcggcagcagagcttgctggctgttaattcactgacgtcaaatggagggaccaatattgcagaggccctcaggaagggctccaaggtgatcgaagagcgacaggccaagaatccagtctgcagcatcatcctcttgtcagatggtcaagatacctacacggtctcaccaactgctggcgtacacaaaggagcaccagagtattgcgcgctcttgccgtccactaacggcaaccagcaggtgcccgttcatgtcttcggattcggcgccgaccatgactcggtctcgctgcactccatctcgcaaacttctggcggcaccttctcattcatcgagacagaggccaccatccaagatgcgtttgctcagtgcattggcggacttttgagcgtggttgcacaaggtctgcatgtaaaggtggagagcctccaccccgacgtgcactttggctccatcaggtcaggcagctattctagcagggtttcagatgataagaggaatgggtccatagatgttggggacctgtatgctgaagaagagcgggattttcttgtgtctgtaaacgtcccaccaggctacggggaaacagcactcctcaacgcgggcggcgtctacaaagacccactgatgaaggagaccgtgaatatggctgatgtgcaagtgaagatctccaggccagcattcgtctcggtacaaagcgtgtcgatcgaggtggaccgccagaagaaccgcctccatgcagccgaggtgatggctgaagcaaggttttctgcagagcgcggtgacctgaccaccgctgtttctctactcgaggactgccggaggatgatcatggggtcggcgtcaggacagtctggtgaccgtctgtgccaggcactggatgccgagctgaaggagatgcaggatcggatggccaaccggcagaggtacgaggcgtccggtcgagcatatgtgctctcaggcttgagctcgcactcatggcagagggcaaccgcccgcggggactcgacggacagcgagagcctgatccaagcctaccagacttcgtccatggtggacatgctgcttcgctcgcagacaatgagccgctcatcgactcctcgaccaacgccacagatgaggcacgctaagtcattcccggcacgcccgcagccaaggtaactgctatttggtgtcaccaaggatttgcctgaagcctaatttgcttgccgatgggcgtagtagcgccctctaaattcttagttttgtggcgggaggacgggaccagggtatagtttgtgtgggtacaaggggatgtaatggtgtaaatttgatctggggtggtggaggtaaatggtgagaggggtaaggtattttataattgagggggtcggggatggtatacgtcctggggagaattgggcaggagggtggtgaactggtatactctagtattgtactagctcctttgtgtggtgatgtacataagggaagggtatacatttgtggactctttgaggagggatggatacctaatcctgatcccgatccttgcaatgtttgtttcctcagcctggaaaaggactaaggtttgttgcctctttctggaaatggaattgatgatgatcctgggtattttatcaaagtgcctagccggcccttttaaag

SEQ ID NO: 4022 - DNA, 812 bp, Zea mays
  unsure (1)..(812): unsure at all n locations
  Clone ID: TF_ZmC77550_2
ngttctcctcttatgcagatgtcgttcatatataggaagaaatagcacttacagtgttgccactagtatttaatgcagttatttgttttggtactagcatgaaggtgattctcaatgttcttgtttgcaaccacaaaccatttctcgttgccattggttgattgaggtgtggcttgtctacatttctgacttcgtcagttctcttgatttcagaagatatgtgcaatttgcctcaacgccatgaggtccggccgcggccgagcactgttcactgctgaatgctcccacaagttccacttcaactgcatctcctcaaacgtgcagcacggcaacaaaatctgcccaatctgccgtgcagtatggaagcagctgccttttcaggggcctctggctgcatctgctgcccatgggtcagcgagagtaaacccagcgatttggccccagatgagcatgctgtcggtgaatccgctggacgagctcccagtctttggcaatccggagccagttgttttcaatgacgatgagcagatacttcttcagcctgaaacagcagttggcggcgaggagggtgacgaggttccccctttgcttgagatcacgacatacaatgaattcccagccacccaggagtccgtggcgcaggaggaattcgccatcttgatccatctcaaggctccgcatgtgccgtcgtgggtgagcacccgagcgccgctggatctggtgactgtgctcgacgtgagcgggagcatgtcgggccacaagcttgcgctcctgaagcgcgccatgaggttcgtgatcgaaaacttgaccca

SEQ ID NO: 4023 - DNA, 2407 bp, Zea mays
  Clone ID: TF_ZmC25728_1
gagacagggcattccttatggctggagtggacattactcctagccggccgggtccgggtgtgtgacagcattcccaattcctcaccctcaccgccgccgccgcgccgccgccctcgcagccaccaactccaccgaatctgaagccatagctgccgactgcggccgcctcgaggagcggtgcccctatgcgccgaactccagcggtttctttagcctgttcgcgcgggccccgcgccggggcctgccatggtggggcggagctaggaaggcgtgagcttcgcgaccgcgccggcggaggaagaggcgtgagagcgcgctacaattaaggcgggcgtctcgcccgccggatggccgccgatgacgcggcgcggagcagcagacggatggatctgaacctctacctcggtctcccccgggccccgcgcgccccacgccccgatctcggctccgacctcgcgctcggcaccccgatgctgtcttcgtcgtctccctcgtcctcggccgcctccgcggacgcgccgccgctggagacggatccgctccacccgccctactcgccgtcccgtgccgacctgatgcgcccgccgaccccggcgcacgagccctacaacccgttcgcgcccgaggcgcacccgccctacgtgcctccgccaccactgccggttgcaggggctttacctgtgctcgctgatgagcttgagtttggtttttctgacgcgcaccttggtctggtcgagcgtttagaccggccttcgtcatcgacggcatcctcttctttccgcccggatcttgccgagcgctaccgccacttgatgtccttgggcgggtcacggttcttccggccaagacggttccggtccgaccttccacctctcagctcagagctccctagcctggagaatgaggctgcagcacaaccgcctgaaccggaagaacctgtccgtgatactgtgaggagaacaaggtggctgctgagggtgcagttgtgggtgtctcagaggatgatggaacagagcatggtaagagtaccgcaatgttcgagtgtaatatctgttttgaaatggctgatgaaccagtggttacctcctgtggccatctcttctgctggccttgtttatatcagtgacgcggggtccactccagccacaaggagtgccctgtccgcaaaggagaggttactgaagggaacattactcctatctatgggagagggaattcaggttcggaaatggagaaaaaggttgcagaggatggaaaggcatctggccccaagattccaccaaggccacatgggaatcggctagggagcttcaggcagcagttccaccatttgcgacccatatctagaaggcttggtgaggcacatggttttttgtctacgtggaggcgcattcttgatcggcatttagcgaatagcatgagtagatttgaagggcctcctgaaccatctgtttcagaaactgctcggcatgcaagcagtcttggtcgaatgactactaggttgagagcaaggaggtggcaaagggaagcagaaaaccctacatccattgattcatctacaccagatagtgggcagcctgtaaacaatacattcgatctgccaaggcgctcttcaaacccatttccctcagaagggatggatttattgcgacacattgccttcgctggtcttgaagactcagagaggtttgcgactgctgtcagtgaacttaggcgtattgctaggccaagcccttacggggcatcaacttcatcaaacccaccaaatcctgagcctattgatggaactcatattgccatggcactggctgcagatcaagcttctaattcgagcaccatggctgtcattcaggaagatgcagcttttgctgaaagtgctggagaacctagtaatgccgggtcttcaagatccctgagaagaagaagaggaagtggtgccttaggttctttggatgtggatggtggggacctacatcagaataagagaaggcgtctgaactaagctgaagacagctaaaatcaagccagcaggttgcagcgatattctaatttgctcggtgtgctcttctcagttaagcaatgttctaatgaagctagtaggtaatatctgctgtgtggtatgaagttgtttctctggtactagtttactaggcagctcctggttcgttgccttaattccttccggcctgttcaatttatgcgatcactcaagacatgtatactgcggaaacctggtggttgtcatcagatgtattttccttgatagtaaattgtatgtgcagatctgtaattttcttcatagtaaattgtatgtgcaaatctgtactcagtgaatttggtctctagctgggaaataacacatgagcggacaccagggcttatttgtggatagcttctgattccaccg

SEQ ID NO: 4024 - DNA, 1391 bp, Zea mays
  unsure (1)..(1391): unsure at all n locations
  Clone ID: TF_ZmC492_1
cccacgcgtccggttctagatcgcgagcggccgcccgcgatctagcggacgcgtggggctttctctctacttctgtctgagcccttctgtcaactttcactggttaaaaattattcaatgggagaaagttgctcatctgctcagcaatctggcacaagccaaagtgctgagttgatgccagattcagacaagacagtgcatctaagagaggaactttcagacttaatcgagttcccaacatctgaacttctcaaaactgnatctgacagctcgagatagggttgatgtattcattgcctggtcattgttgctgtcccacctgcaaacactaccagcatcttccagtatcaagggagatgtgcttcaatacatacaagaaaaggtcagtccgtgcatattggattgcattttccagcatatcccagtaaaggccgctgcgccgagtgggaagaaaaaggacaccgagctagcgcctgaagcagaagctgctgccaaagcttcgaagaatgccatagctacttgttctttgcttccgtacttggagtctctttggcccatcgggactttgcagatggcctcacttgcaggctcactgtacgggatgatgattaggctgctgccttcttttgtgcgcacatggtttactaccttgagagaccgttcattgtcatactcaatcgagtccttcaccaaacaatggtgcagccctcctcttcttctagatgagttttctcaggttaaggagtccgtatacggcgatgagaatttctcggttagcgtcaacaggtcggctttcgagatcgttgctacatacaaaaaggaggagacaggaatcgaccttgtcatacgcctcccgagctgttaccctctgcgccacgttgatgtcgaatgcacgagaagtttgggtatcagtgaagtcaagtgcagaaaatggctgctttccctcacgtcattcgtccgcagccagaatggcgcgatagcagaggcgatccgcacgtggaagagcaatttcgacaaggagtttgagggcgtggaggagtgcccaatctgttacagcattctccacaccagcaaccacaacctgccgcggctggcgtgcaagacgtgcaagcacaagttccacggcgcctgcctctacaagtggttctccacgtccaacaaatcgacttgcccgctgtgccagactccgttctagtcctagctctagacacatgcttgtttgttggcaccacaccgttcgatccttcgatgtaaatggcgtgtgtacgcagcgcagtgttcagcgttttggctgttaaatactctcgaaacaggacgggacctgcagagactgagttcagaggtcttataatctacagttaccgtgaattcaatagattatttttgcggcc

SEQ ID NO: 4025 - DNA, 1454 bp, Zea mays
  Clone ID: TF_ZmC2252_1
ggcagatgaatgaaggcgttgcctcgtatagacctatccaatgcaacgacggatatcaccgagtggcgaccgcctgacgcgcccgtgtcggcaagccgccgacgacttgacgtggggcgggggaaacaaaacaacgcgggcagcgccacggcaagcgcgtcccgggctccctgccacggcgcggacacagagagtggaaaccggaaggggggaagagagatggattcctccacctcggcggcggcggcaggggaggcggccgtgccgccggaggacgacgtctgctccgtctgccacgaccgcttccggatcccgtgccaggcgaactgctcccattggttctgtggagagtgcatcatccgcgtttggaattatggacctcctgtacaggcttgcaagtgtcccatttgtcgccgccttataaatctactggtgcctgctgcattatcagggcaggaggatggtccacaagctcaacgtattctaggagagattcagcactataactgtatatttggtggagcaccacgcagcctaactcagaggttgcaagacctacccttcttcatccgaagactgttcagagaactaatggacccccagcggaccctcccactcgtgttcagggcgcggatgctgatgatggtcgcactgagtgcaatttatgtgctgagccctgtcgacattcttcccgaaagcatgctgggcctctttggattcgtcgatgacctgctcatcctgctgatcgtgttcctccacctcgccgcggtgtaccggtcgttgctcctgtaccgccacgggggccagtagaagtcgctgtgcataaaccgtttgtttagctggtttccatgtggagttctctgagatcgcagcagcggatttggaagatcgccgactcgccgagtagatggcaacgtcacggacggcttagcctgtccctgctctgtaccattctactacgcctgtttttctgagactctgacacggtgaactgaactttggttggttgatgcaagtgaatttcccttcgttttactcgtcaggaaaagaaagggaaagagtttgcgttgcgtttgtctttgtttctgctctttggaagttggaattgaaactgcactgatgtttgcgtttcaggaactgcattgacgtggatcctgctcagttctcttagcatttacttatgggccaagtttgtagaagtttagtgggctgtagacccattggctgtcatgttgggccaccgcgacgaggaaagaagaggtaggggatcgccctggccgggtagttggctcttgcgggagggatgagatgggaatgggatggcgacgggcgggcgtgtgcggctgcaggcggctcggaaggggcacggtggagacgcagcggagccctcgcctcttctcctgctcctgctgcccggtactcgccgagggagacgctgctgacctgacgagctg

SEQ ID NO: 4026 - DNA, 1218 bp, Zea mays
  Clone ID: TF_ZmC13982_1
ctctgcttcgactctcttctccaactccgcctcggcgtcgtcgtgcgcttcgatctttcccatttccaaccggaggggaggcgtcggcgcaataataggaggcgcctttgtttcgcccatcgccggcatggggaactagcttcgtggctgggccccacgccatgcaaaccagtgagaccaccgggaccgcatcgccgccggctgttgagccggaggccgaggacaaggtggaagagggggcgcgggcgaatgaggaggcggcggcgaaggtgggcggcgacgacgaggatgactgggaatcggagcatgaggggaggagaggcaggcggcagcggtgccggcgaggcggtgcggcgggggacagcgccgtggccatggtgaagcgggagctgctcacgcgctgcttgacgtgcccgctctgcgaccacctgctccggcaggccaccaccatctccgagtgcctccatacattttgtagaaagtgtatctataaaaagctcaatgatgaggatctggaccactgtccagtatgtaaaattgatctgggctgcactccagtcgagaagcttagccgaggtcgaaataagctgctgcgggcagaccgtgaaccctgggcaacctgtgcgcaacttggtggagcggtggctgagggttggcccggcgcgcccgctgcacacggtgatcggctcctccgggggagattatgtgatggtgataagctatgggcggcccaagtccgcgtcctgttaaaaccatatcaccatcgacggcctggcgaggtcgattcctagttcgaacaagggttggtgccgccgccgctgccgccgccggggaagaggccgtcgacagataaactcaagcagcggtagcgggctgctctgccgcagcagctcgtcctctcaccggcgtgttctttaaggatctgttcgttcgttcgttgttgtcatacatgcacatgtgatggaagtcgctataatttggtagtacttggtaggctgtgagtgagaactgacgtttaggttggaggcgagatcgttaacctgagcttaagtgttgggggcgatgagtccgccgtgtatgggagaggcgctgctggttcagttctttttcctccgttttttttttcacttcttgaagggaaaaacacacacaaatacataatgtacctccgtttatttgtcctgaactaatatccagccgtgactgattcggatcgtt

SEQ ID NO: 4027 - DNA, 2036 bp, Zea mays
  Clone ID: TF_ZmC13982_2
gtctttccatttccaccggaggggaggcgtcggcgcaataataggaggcgcctttgtttcgcccatcgccggcatggggaactagcttcgtggctgggccccacgccatgcaaaccagtgagaccaccgggaccgcatcgccgccggctgttgagccggaggccgaggacaaggtggaagagggggcgcgggcgaatgaggaggcggcggcgaaggtgggcggcgacgacgaggatgactgggaatcggagcatgaggggaggagaggcaggcggcagcggtgccggcgaggcggtgcggcgggggacagcgccgtggccatggtgaagcgggagctgctcacgcgctgcttgacgtgcccgctctgcgaccacctgctccggcaggccaccaccatctccgagtgcctccatacattttgtagaaagtgtatctataaaaagctcaatgatgaggatctggaccactgtccagtatgtaaaattgatctgggctgcactccagtcgagaagcttagagctgatcataatatacaagatgtgaggtcaaaattttttccattcaaaagaaagaaggttaatgctgaagaagccgaatctcctattatgctgcctgttaaagttaaagagaggtctatctcatcgttggtggtcaatacacctagagtaaccccagcagctttgacagggaggcgaacaagagcggttaccaggaaggctgccgcattgcgtggccttggtcctatcattgtggatcctttaaaaaaggacaacgataacccaaataagcaaactgataattcaagcttgctagatagcttgaacaaaatacctcaaacaagaagacagttattgtcgaatggggacacaacaagtcatctctctgttaaagataaagcaggtgataataaggacctggataagtccgagttctggaaacctttgaattgtcttgtagaagctgcaagcaaaacaaagcccctgacaagtgcaccaaggccagctttgaagggagataagcccagaaaatctccgagtagtgatagcgaacattctagcagaacaaagactagggagcctcttcagaagtccaaagctgaagttgacaaaagcgatcccgggccaatagtgatgcttagaaagagagggcggcctggccggaagaggaaaaatcccctacctgaaacaaatgcagattccactgctacagctatccaggccaggaaggcattgagcccaatatggttttcattgattgcctcgtttgaccagaaaggtgtccctcctttgcctcagatacctgcgcactatttgagaataaaggatgggagcatacccgcgtcatctattcaaaagtacattgtgcagaagctcagtcttctaagcgaatccgaggtcgaaataagctgctgcgggcagaccgtgaaccctgggcaacctgtgcgcaacttggtggagcggtggctgagggttggcccggcgcgcccgctgcacacggtgatcggctcctccgggggagattatgtgatggtgataagctatgggcggcccaagtccgcgtcctgttaaaaccatatcaccatcgacggcctggcgaggtcgattcctagttcgaacaagggttggtgccgccgccgctgccgccgccggggaagaggccgtcgacagataaactcaagcagcggtagcgggctgctctgccgcagcagctcgtcctctcaccggcgtgttctttaaggatctgttcgttcgttcgttgttgtcatacatgcacatgtgatggaagtcgctataatttggtagtacttggtaggctgtgagtgagaactgacgtttaggttggaggcgagatcgttaacctgagcttaagtgttgggggcgatgagtccgccgtgtatgggagaggcgctgctggttcagttctttttcctccgttttttttttcacttcttgaagggaaaaatacacacaaatacataatgtacctccgtttatttgtcctgaactaatatccagccgtgactgattcggatcgtt

SEQ ID NO: 4028 - DNA, 476 bp, Zea mays
  Clone ID: TF_jC-zmXLIB3526025da05a1
actttataaaatagattagttaattgacgtcacggtagctatgacaaggtacattttggagtgaacaaagctacagctacagggacacattcacacatattgacaacaacgacacatttttcagtcaggcgattacttgctggatcatgtaaggactcgttggtccatgacataatctctttctctctctcactatataatttacaaggtgctcttctggaagccacacacacgcccaaggcaagttgctgtctcactatacatcatggaagccgttgtgattcaatgtcgtttcctaccctcctgtggctgtcgcggcgcccaaagccaatggctggaggagcggtcctcgggacgacgtcgatctcagctttgcagagtgggcacagcgcatttatcttgagccatttgtcgacacagtccttgtggaagaagtgcccgcaagggagcaaccggagatcatcgttatccacgta

SEQ ID NO: 4029 - DNA, 764 bp, Zea mays
  Clone ID: TF_LIB4704-006-R1-K1-F2
gaccctccgggttggccgggacttcacccaaaacccaaatccgttccacccgcaaggactctcttctgggaagagtgggacggatcgagctcgaccccacagaggtccgtccagaccctcctctccggcatagaaaggagacgaacgctctttggggtaatggcgccggcgtgggagcgtgccaggcgcgcgctcaccgccaggttctgcatgcgctttgcggcgaggcgcgtggtcgtcgaggacgcgccacgtgggatggtcgacatagaggcgccttttccggtggcggtggcggaggcggagcagcagcaagagcagccggaggacgagagggagatgttgctggccgcggtgtcctccgaaccggtgtccgagcagctggcgtcgtcgaggtctgggagccggagttcagcgatatgtgcaatttgcctcagcgccatgaggtccggccgcggccaagcactgttcactgctgaatgctcccacaagttccacttcaactgcatctcctcaaacgtgcagcacggcaacaaaatctgcccaatctgccgtgcagtatggaagcagctgccttttcaggggcctctggctgcatctgctgcccatgggtcagcgagagtaaacccagcgatttggccccagatgagcatgctgtcggtgaatccgctggacgagctcccagtctttggcaatccggagccagctgttttcaatgacgatgagcagatacttcttcagccctgaaacagcattggcggcga

SEQ ID NO: 4030 - DNA, 2462 bp, Zea mays
  Clone ID: TF_ZmC77550_1
ggccgcttttttttttttttttttggagaaaatagatgcctttataagttcacttgattgattgcataggacattctcctcttatgcagatgtcgttcatatacaggaagaaatggcacttacagtgttgccactagtacttaatgcagttatttgttttggtactagcatgaagatgattctcaatgttcttgtttgcaaccacaaaccacttgattgaggtgtggcttgtctacattcctgacttggtcagttctcttgatttcagaagatatgtgcaatttgcctcagcgccatgaggtccggccgcggccaagcactgttcactgctgaatgctcccacaagttccacttcaactgcatctcctcaaacgtgcagcacggcaacaaaatctgcccaatctgccgtgcagtatggaagcagctgccttttcaggggcctctggctgcatctgctgcccatgggtcagcgagagtaaacccagcgatttggccccagatgagcatgctgtcggtgaatccgctggacgagctcccagtctttggcaatccggagccagctgttttcaatgacgatgagcagatacttcttcagcctgaaacagcagttggcggcgaggagggtgacgaggttccccctttgcttgagatcacgacatacaatgaattcccagccacccaggagtccgtggcgcaggaggaattcgccatcttgatccatctcaaggctccgcatgtgccgtcgtgggtgagcacccgagcgcccctggatctggtgactgtgctcgacgtgagcgggagcatgtcgggccacaagcttgcgctcctgaagcgcgccatgaggttcgtgatcgaaaaccttgaccccagcgaccggctctccgtcgtcgccttctcctcgtcggcctggaggctgttcccgctccagaggatgaccgcctccggacagcagcagtcgctgcaggctgtcaactccctcgccgccgatggcggcaccaacatcgccgaggggctgcggaaggctgccagggtggtggaggacaggcaggccaggaacccggtgtgcagcatcatgctcctctccgacggcgtggactcccacaacctcccgccgcgggacggctcggcgccggactacgggccgctcgtcccgcgctccatccttcccgggagcgagcaccacgtgccgatccatgcctttggcttcggcatggaccacgactccagggcgatgcacgccgtggcccagatgtccggcggcaccttctccttcatcgacgtggtggggtcgatccaggacgccttcgcgcagtgcatcggcggcctcctcagcgtcgtggcgcaggagacgacgctcagcgtcgagtgcgccgaccagggcgtgctgctcacgtccatcaagtcgggcggctacgccagcggagcggacggcgacgggcgcggcgggttcgtcgacgtcggccgactctacgccgacgaggagagggacttcctcgtcaccgtgcgcgtcccgcagtcacgcgggaccatcgcgctcgtccggccgagctgcacctaccgcgacgcggccaccacggagatggtgcgggtggggggcgacccggtgacgctgctccgcgcggcgagcccggtgagcgcggggatgtccctgcaggtggagcgcgagtggcaccgcgtccacgccaccgaggacatagccgcggcgcaaaccgccgcggaggagtacgactacgcgcgcgcggcttcgatcctggaggcccgccgcctgctgctggagtcgtgcgcgtcgctgtcctcggaccagcaaacgcaggcgctggtggccgagctgcgggagatgcaggagcgcgtgctgaacgcggagctgtacgaggggtctggccgcgcctacctcctgtccgggctgagctcccactcgtggcagcgtgccacggctcgtggcgactcgactgagctcacgggcctcgtccacagctaccagacgccgttcatggtcgacatgctcaacaggtcgcaggcgctccagccggaggtagcggaggcgctgagccggtccccgacgatcgcgtcgtcgcgcagctcggccccaactcccgcccctgcctcctccggctcgccgtggacgcgacgcgggcttcggtcgttcaggccggcaaagtctttcaccgggctgtcattgtgagtgcaggactgcaggttcgctgattccattcacaatgcatgcaaactggcatcttgcagtagcagtagctaggaggagcgcggaagaaaactatcaccattgattcgtttcttcgatactctattgtcgtagagaggatttggtattactggtttgtactgctgtttgtccgtggattaatcctgagacatgttgtttgaccatcgattcgggtgtttttgttctataaacgtttgtgctgtttgtcgattgttttttccatatagtagctgtttggccc

SEQ ID NO: 4031 - DNA, 1801 bp, Zea mays
  Clone ID: TF_ZmC49468_1
ggaaaaccgattccccgcctcggtgccgggggaccacaaagctgacctgcggaagcgcgaggaggacgaaagggaccggacgaagctacgcgctgcaccgaccgaccaaaccctaggcgttcggcgggcgtcaccacggcggcgaagaaagggtgcctcgcgtcgccttggtgtccccgaagtcgtcgacggtgcagctcgatccgcctcgtcgagcatgtcgaggagggtcccttgcaaattcttcttgcatggagcttgcttcaaaggagattactgtgaattctcccatgactgcaatgatcaaccagataatgtttgcactttctaccagaaagggacgtgcacctttggtagccgttgcagaaatgaacatgttgaagttcattgtaactgcccccaaccagcaaccactgtagcgcgtgcatcctccaattcttctcagctagttgcttcttccagagatccccattgcagcgaatgccaaacggatttatgtgaccaaacacagcagatttgcaagtcaacagcagcactttctgcacatcaacctgcatgggttgttgattatcatgaccatgacactccagatgatactacaagctggccgttgcaccaagctgtgcaaaatcaaacatcacaatatcctgttcatctgccaatttgctcttctactgctgatggcacttgtccttatgggaaaggctgttctcagatgcatggagatctgtgtgcattctgtgaaagacagtgcatgaatccttatcaatctgatgaaaggggggtacatgtcaagctatgcaagaaaaacaatagagttcttgaggccatgagaagaagtgaagacatagaatgtggtgtgtgcttggaccgtgtgctttcaaaacctacggcagcagaaaggaggtttgggctgctatctgactgcgaccattccttctgtatctcatgcattaggaattggcgtagcacctctcctacgtctggcatggatgtcaactctacactcagggcttgtccaatttgccgcaaattgtcatactatgtagttcctagcattacttggtactcctcaaaggaagaaaagcaagaaattgttgaaggttacaaggccaagctcaggtctattgattgtaagcactttgacttcggaaagggcacttgtccatttggaagcagctgtttttacaagcatgcctacgatgatggccgtttggaagacgctttattgaatcatcatgatgccgacgatgcaagcgcagcgattgccaaacttatgaggttgtcgtacttactgactcggctgcatgtgtaaggaaactcaaacgtatctttgagcaaacattgctgagttcgattggagttcgttgaccgagcaggcaaccttggatttcgctttgtaatggatattataaaaaacatccaaaaaaaagagggcagtcatttctgaattttatcttttcgctgaatgttcaaatcatcagaaggaagcagtcccaatcgtgccacttccacttggaagctagcattttctatccgggttggtacctgattggtggttgtgaccaaacttaactatacccaatactggtgatcctcgtttgttgcagcatctctagcatttcgtttttccagccccgagaaatgctctattgctctgtaattgaagagtggagaaatgttaatctcgatctttagtgctgctcgcctgctatggcgcgtggaactaagttcagttaaccccagctatgggtattctttaccacgaaatattcatctcttttattgagattgagagaac

SEQ ID NO: 4032 - DNA, 528 bp, Zea mays
  Clone ID: TF_uC-zmroteosinte084d10b1
tctgattaacaatagagttcttgaggccatgagaagaagtgaagacatagaatgtggtgtgtgcttggaccgtgtgctttcaaaacctacggcagcagaaaggaggtttgggctgctatctgactgcgaccattccttctgtatctcatgcattaggaattggcgtagcacctctcctacgtctggcatggatgtcaactctacactcagggcttgtccaatttgccgcaaattgtcatactatgtagttcctagcattacttggtactcctcaaaggaagaaaagcaagaaattgttgaaggttacaaggccaagctcaggtaagtacttgatttgaaaatttgttttatccttaggcacatcgtttatgcgattttcaggctgcccagactaataacagcaactcatctgtagtgattaatttgcttattgttgaggcatagataaaacttctgttgtatttttctgcccaagcagaagttaattcactagtctgatatgttatgcaagtctattgattgtagcac

SEQ ID NO: 4033 - DNA, 402 bp, Zea mays
  Clone ID: TF_LIB3356-061-P1-K6-D8
gcacgggttccacgtcgcgtgcgtcgacacctggctgcgctccaactcctcctgcccgtcctgccgccgccccatcgtcctggacgacccggcgccgccgaagcggtgcctcaagtgcgaggccgtcgtcctggaggccgtcctcgcatcctcctcctcctcgtccgccgccggcggaggccgcggcggtgggggattcttgccgtagcatcagcagtagttggccggttgtttgtctgtgtctgacgggcggggccaggccaggcaggtcctgggtagttgagctgctcccatcagcccgtgaggccatgacccacatgtcattagcgcagcgagtagaagaagatctctctttttgaaaggtagtgaaaacgaagaataaaactagaaagaaactagaaa

SEQ ID NO: 4034 - DNA, 847 bp, Zea mays
  unsure (1)..(847): unsure at all n locations
  Clone ID: TF_ZmC285028_1
gtgtcattctgccgctctccatagtccatccggtcgcggcgaagctcggccagacggccaccccaatgccgtcacggtcgggctcccggggcaggcggccgcggccggccccagaggtggctgctcccacggctgtacaagtgagctcgtccggctcgagtgaggaagggagcgatgaggaggaggagaggagcccgggcggctctgccagcaagtataaggcggcggagagtgaagccgaggcggaggacccatgccttcccagctgccccatttgtatggtcgtgtggaccgctgatggtgcgcatcgcgtgagttgcatcccttgtggacatgtctacggcagacattgcttagagatgtggttactgcagtacggcaagaaaaaggcaccgtgtcctcaatgtggcaagagatatacacagaacaacatcatcaacctctatgtaccagagattgttgttcccaataatgatcttgaaaatcaagtattgtccttgagagagagaaatgaatatcttgagaagcaacaagcaaaattacttgaggagataaaagagcataaggtaccacacagatgaaatattgtctcagtaaccgaattgaccaatttctctgaggaaacatgggtgactccttctgataggcagattatgttgcaacaaaatgtaatatatgaatcaaacaaaaagagacagagagtggcagagcagtcatcagatggaatactangggctgagctaattgcctcacatacaaaggacattgacccacagcatctgtcaagttttgctcttcagaatgagtttttggtcgatggagctcgggtcatgggtatagatgcatc

SEQ ID NO: 4035 - DNA, 2091 bp, Zea mays
  Clone ID: TF_ZmC130770_1
ccattccaggatcggttcccccgcgggtcctcgagggggaaagggaaagcctcaaaaggcgacgcgcaagggccgaggagagaaaggaacctgaggaaggcacaccagtttcaagcaatccctaggccgtggcgacgtgctgggaaggattcaaatcaggggcgaagcctaggtgacggcgctgttagtcgcctctagtagctgcgcgacgcgggctggcttgtccgatcggtttgcctcggccatgtcgactaagaaagttctttgcaagttcttcatgcatggagcttgcttgaaaggagagtactgtgaattctcccacgactggagtgatcaagcaaataatgtttgcacattctaccaaaaaggtgcatgctcgtatggtagccgttgcagatatgaccatgtcaaagtttctcgtaaccccacagtgccaccaccacgcccaacgtcaagtacttcaagacgtgcatctacttctcttcaactttcaagttacaatcatccacctcatatggtgcaccaaacagattcaagcaaccaaagacatcagatatctgtggatgtgttggcacattctgccagtaagcctgcatggagaaatgattttcagcatgatattgtttcagatgatggaattgactggtcttctaatcaaaatttgataaaccagacatcattgaaacctgtggatctccctatttgttcttttgctgctgctggtaattgtccttatggggaagggtgccctcaaatgcatggagatctgtgtgcaacctgtggaaaactgtgcttgcatccttatcgtcctgatgagagggaggagcatatcaagttatgtgagaaaaatcacaaacgccttgtagctctgaaacgcagccaagaaatagaatgcagtgtatgtttggatcgtgtgctttcaaagcctactgctgctgaaaggaagtttggactcttatccgaatgtgatcatcctttctgtattgaatgcattagaaattggcgtagcaattctcctgcatctggtatggatgtgaactcagcattgagggcttgtccaatatgtcggaaactttcatactatgtcattccaagtgttctttggtacttctcaaaggaagagaaagaggagatcactgaaagctacaaatccaagctcaagtctattgattgcaagtacttcgactttgggactggctcatgccccttcggaacaagttgtttctataagcatgcctacagagatggccgcttggaagaggtaatactgcggcatcttgatgctgatgatggaagtacagtaattgcaaaaagtatcaggttatcagacttccttggtaggatggatctttagggaccagcagctgtattgatatcaaatgcattctgggatatcgttatccaccaattatttacaatattctgaagatcagtttagcttgaggcatcttcggaaagtacagctttgtctccattatctttagggaccagcagctgtattgatatcaaataaagtttgaagatctccatggtcctgtagatgctgggattaccttttcagagcactgttgacctgagggcgacggaaacaagtctgacaacaattgtgcttgaatatcaaaacagaagtaatactcgtatttatagacttcactaagtgtggctctatgtatcaattgctggtcttctaggccaccagataatagctgaacatttcctggccgacaagtgaaaggggcagccgtataaatttgcttccattccacctgaatgttctcttcatattgtggaagggtactgcaccaataggtccaataaggccatttgtttgctttacttaatatacaaaaaaagtatagcagatgaaatgcaatgacaactgtaatgcagcattgttgaatgtgagcgtgagcggtggttttttatcgatgacctgctgaggaaggtcctcttagtaggcaggtaaactgagaacatttttttgttatatatatacagcataattgtacgagaaaaatagcaaatgaaccgagaatgatcattaaatgcagtcgtcggttgtatggttgtaccatctcaaaaccatcagtt

SEQ ID NO: 4036 - DNA, 995 bp, Zea mays
  unsure (1)..(995): unsure at all n locations
  Clone ID: TF_ZmC13088_3
gttcttcggccctgttggtgttaccctgcacacaccacatgaaaaaaaaacccatctcgtctgtcgacaggtgcagcaagactgtgcgaactgcggagcatgtctcggcaaatacttctgcgcgaaatgcaacttcttcgacgacgataagtgttccctcttctgttttctccggttttgttgtcgcgttccctggcatttcaggtgtcgaagaaccaatttcactgcgatgggtgcggcatatgcaggactggtggcgcagagaatttctatcactgtggcagatgtggatgctgctacaccactacgctgaaggattctcaccgctacgtggacggagctatgcatcacaactgccctgtctgcatggagtatctattcgactcgatgaaagctatcagcgtgctccactgcggacacaccatccacctggaatgcctttacgagatgagagcgccncagcagttttatgccccggtgtgcctgaggtctgcctgcaacatgtccgacatctggcaaaagctggatcagcaggttgcagcgtccccgatgcccagcgatcntatcagaagaagatggtnttggatcctttgcaacgactgtggcggtgacgtccaacgtgcagttccacatcttggcgcacaagtgccctggatgcagctcttacaacacccggcagacgagggggcgatccagccgcatgctttagagtttgagagcaaataaaactgcagtactgcactgcacataaactcgtggggttgtgcggtcgatcgataggtagcttgcatggaggaaattaaagactaccattgcgcatggacacgattggtgccggcagttgagtacgtgtattaggcctgtcatatgtagatgtatcatatgctatgccttcgcaaagaagaatttggcgcagcggacagggtatatatttttttgttgctatatatacacacatatttttgttgcgcggtgcttgtgccaatgagtggaga

SEQ ID NO: 4037 - DNA, 2427 bp, Zea mays
  Clone ID: TF_ZmC3546_2
ctcccggccggcaagcaggatcaggggcccgggcgtcccggatccttgcaaccgttccgtttcccgcggccgggctggcttacttctgcggcgctcgttgccatttcgggccaaatttgttgcgtgaagcggggggatttggattgaatggcgcgcgttgcttccaatctacgccctcttgggaattcgttgagaataggaaatcgccgtatgagaaagtttgttgggtgggtcgccagatcggggcaactccgtcgttcgttgtcaacagcatgccagcgagatcgaggagttgctagcgtgtgccgcctcgaggtacaacatctaatgctacaatatataatattttgctcagtgaattgatcaagtttggcgcacgagtgtcatgctcctaggttttgtactaattgaagaagtagcaaatgtagttcgtggtggtggtttaagtcatgtctgatgaaattgatgcttatataagaggggttctttgtgctttcgaaagaattctgcaggaaaatcgactggcatttgttgttcttgggtacacaatgaaagatgggaaggcatattttcccccacatgacagtatctatacatattgcagttgaaatggaaataattgaaatacaaggtatgtgcaggtgcagtctattatattggagttaagagagcgctagcttgcagtcacactcgatgaagttcaaggggaggcgggggagatacggccggccggggaattgtttaatcccccgtcaccggctcctatcgccatcaccccacccgtcccccttggtccaggcgcaggcgcgagcgcgacgtccggcgtccggcttcggcggcggagtggagcgattccgatccacacagggaattccatcgctgtcatggcgtttggtggcgctcctcccggccgtcaagctggatcaggaaatcgcacggaggtgagaagaaacgggtgtggaactagagctaggcgagcctgtctggtacctcgcggaggagatggacgagaacgccacgatggagagcaagctgggtcccgcaggtgtgttgggatatcaagggcgtgcaggtggcctgtgccgatggccgcagcatctgcctcgacgccttctgcgacagcaacccctccacgatgaccaagtgcaagcatgactaccatcttcagtgcattcttgtatggtgccagagaagctcccagtgccccatgtgttggcagcatatcagcatgaaagttcctatgagccaagagctactagaggttgttgaacaagacgaggaacatccgagctaatccttcacgtaatactcgctgttttcaaccatcaaatgactggggaattttgagatccctataggttcagatgatgcagcaacttgaagaacgcattattcagcacttggctgccgcagctggcagtgcgtaggtcacaccgtcatcataatagaagagatgggcaccagagcagatcagaagcaagtagccacccacagtttctggtgctctcagcagacgagcgcacaatctcaggtcaagaaggggactacgaacaagcatctgctgtagcttctggccgccctttacgtacacttgttgaacaagaacgcactcgagggttagcggatgcttccagtccatctctccgttgttctactcctgctgatagtactggtagatcaaacaataggatttctgggatcgaatctacacctgtggatcaagacggaactggaccatccgctgtacaatcaatggtacagggatttcataatcaaagtgcaagtggatggagggagaggtggttttctcggagcaactctttactggatcttggttctgaggtgaggagggaggtcaacgcggggattgctgcggtgtctcgcatgatggaatggcacgatgcaagggacgggacgggagcggggccttctcctacctctgcatcaagatctggttctcagtgaaacactctgcacttgaaaggaccgatgcaaatgtaaagattaaggtatgtgctcatgctgtgctaatgaaagccttaaattcagtgttttgttttttttctggtggcgtactgtcactgttgactggcctacggatctgagtttttgtgtaattgtttggaagcaattccattgtcgccgaaatggcgcggtagtttctctgactgctgctgctaaatactaggaactttagttttcttcaagtccaaagggtcagagttgagagcacctgagatccggcgatgcttcatggccacggtcccccagaggctattcgcaatagttgactctaaatttctctctatatatcagttttttgtgtcacattatcaacatttcataccttactttttttaggagcagctattgtttgaggagcactttaggaagacaatcacctgcaacttctctagcatatatgaa

SEQ ID NO: 4038 - DNA, 842 bp, Zea mays
  Clone ID: TF_ZmC11832_4
cgtcggtgctccgctgcggccacaccatgcacctgcagtgcttccacgagatgttgaagcacgacaagttctcgtgccccatatgcgccacgcccatcttcgacatggacaagttcttcaaggccctcgacgcagagatggaggcaagctacttgtacacgggaaaggtcagtgcgccttactgccagcctgatgctgtcctgtatgacccaatgcaaccaaccttcccagttctggtctattcttcccttcttctgtagaacaaagtagccctctcgtcttctcgtataaatggcacagatccagagagaggagacttggaagcggccggcgccggccccggcccccagacgccaagacgctcggcaacaagatccgccgtgtcagtggctcagtgcccgtgctgatcgatgctcgtgtgtgtgtgtgtgctggtgcagggatgggtcgtgtgcaacgactgcagggacacgacgcaggtcttctccggcatggcgggccacaagtgctgccactgccagtcccacaacacctgccgggtggcaccccccgtcctcccgtagccaccaccaccaccacatcattgttgttggaattggatgcagccagccaagatacccccggccccagcagctacgctattattaccagtagcgcctgcgcttttacgcaccgctccgttccagtccatgatgaactgcataatttcgtgccatgcaggtatgtacgtacactgttattggagatcggaagatttatccgactcgggacgcattatttgtaccacaacaaaacacgtgttacactattgtaataccagatctggatacgaaacttttttt

SEQ ID NO: 4039 - DNA, 1595 bp, Zea mays
  Clone ID: TF_ZmC17724_1
aatactacttccgtgaagctgtttcaaattcggcacgagggagctttggagggaaccccgaacccccgtcgtcgtctcgtgctcggtctctccggctggcggcatggagagtgccgtgctcgcctgcgaggcgccaaccgccgccgccgctgcggcgcctggagcgggaggggacagaggagccgagggcgtggtgatgctgaggcggtcgggcctcgcggcgtgcctcacgtgtccgctctgcggccgtctcctccgcgacgccgccaccatcaccgagtgtctccacaccttttgcaggaagtgcatatcagaggagtttgtaaataaggaagtgtgctgctgccctgtttgtagcattgacttgggctgtgctccactggagaaactcagaattgatcatagcctacagtatgtaaggtcaaaggtatttccttctaaaaaacgaaaggttgaggatccagaagtcacatcgccaattacatcacctataaagacgaaagtacggtctttatcttctttgacaaaacatgctcctcaaatgtctatgcaaaaatgcttgagaaagaggagaacaaaagcttcatgcttacaaaacctccctttgcactcaaccttgcggggcagtagtaatatcacaaaaaaatctggggggtggagacctttagggtgtcactttcgagcagctaaaaagaaaaggtctcttagacctaaatcagacgatataaagacagctggaaaaaggactgatgatccagttgatgtaactcttgccagtcaagcaaagactaggaagcaggttacaagacgtggaaatctggagaagagaactggaaccaagaaagtattgattttaaagggaaaacagaaaaataggaagacaaagaatacgcctaataagaggagattgccagcattatggttctaccttcttgctgcttttgaccagaaaggacatcctcctctgccgcagataccatcaaaatttctgaggatcaaggatgtaaatttgcctgcttccttcatacagaaatacctcgcgcagaaacttaatctttcaagtgaaactgaggtggagatattctgcggtggcagaccagtgagcccagggatcaccctgcacgacctagcagaccactggattggcaaacgatcgaagggccgagtgcggtcatctgtgggcacgcccgccgctgaattcgtgctgaaggtattttacgccaggtcaggagcgccccttccaaaaactgaaagcaaccaagactgatggagagcttcgagcttcccttcgtttcagaaccagcagtgtatcgtttgactcgtaggaccaattgattaatggtatcttagtaacatgtacatagatgttagtgtcacggattagaagctcccatgggcttactgttatatatatccccctagttcagtgcatttttaccgcttatatttttactgacaaagtgtgtagtatctaggctgtgtaattaaaactggatgagatgtcgagatagagtcaaatttcaagttgcactggttcagctggtatgaatcctggctgaaccggttttaaacctgctccaaaaaaaaaaaaaaaa

SEQ ID NO: 4040 - DNA, 4448 bp, Zea mays
  unsure (1)..(4448): unsure at all n locations
  Clone ID: TF_ZmC6175_1
ctctngaactgcattggttactcttctctctggctgggcatgcaaaggtcgtctggaggacacgtccaaccctggaaagttcgtatgcttggcatcaggagcggtcagttgtgcgtcagatggaaatggtttcaaaacatgccagtcactctgtccatgttatgtaagtagcaatggagctttttcaaaaccagttaagagagcaagtcaaggagaatctagcacaaatactgacagaaatcatagctcacacgatgctgctactgaagcatcgccatgtaacaacagagcctgttacattcccaggttaagagtagaaagtagctaccttggtgttcattcatctacccctacaaaatcctttcgccctctgtctttcaattatgttgcaccttcattatattcaagccttttctcatgggacacagatacactagtatctggcccagataacatttctaagccaattgataccatattcaaattccacaaggcaattcgcaaggatttagagtttttggatttggaatctggaaagcttattgacggggatgagtcttgccttagccaattcattggaaggtttcgtttactgtggggtctatatagagcacacagcaatgctgaagatgagattgtatttcctgctcttgaatcgaaggaggcattgcacaatgttagtcattcatacactcttgatcacaagcaggaagaaaaattgttccaagatatatccactgtactatctgaactttctcaactacatgatggtttgagctatcctcttgatgttgaagctggaacaaatgatatttcaagtagtgagattgattgggctagaaagcgtaatgaacttttgacaaagcttcaaggattatgcaaatctatccgggtcacgttgtcaaatcatgttcatagagaagaacttgagttgtggccattgttcgataaacatttttctgtagacgagcaggataagattatcggtcatataattggaactactggtgctgaggttctgcagtcaatgttaccttgggttacatcagcacttagtttagaggaacagaacatgatgctggatacatggaagcaagcaaccaaaaacaccatgtttgatgaatggctaaatgaattgatgagattctgtattggcacaatgctgttctgagagaactgagtgatatagcggaggagaatttcggcacgcggcagtctggagatttttctgacatagcaggatttaatatgaggctgcaatttattgcagatgtgtgcattttccacagtattgccgaggatcaagttatattccctgcagtggatggtgaattgtcctttgtgcaggagcatgctgaagaagaacggcaattgaataaatttaggagtttaattgaacaaattcaactagcaggagccaagtcaactgtagttgattttcattcagagttatgctcacaagctgatcaaataatgcagaaaatcgagggtcacttcaatgatgaggaaataaaggtacttcctaaagctaggataaagttctcacaggagaaacagagggaacttttatatcagagtctatgtgtcatgccactaaagctgttggagcgtgttctaccatggtttatagtgaaactgaatgatgcaggcagtgtcttttcttcaaaatatgccagcaccttcctctgaaactgcattggactcttctctcatgcgtctcctggagacaagtgtaaacctgccaggtgtttaggcttggttggaagatcagttttttctgttgacggagtgagctcgatgctgagctcacgcgctcgccgcctaggagcattcacgttggcggcgggcggcggctcggttcctctcctccaccgcacctccaagaatccacctccacgactgagctgacggctcggcggcgccatggcagttcaccggctccaaccttccccatccggcctacagtgctccaccgcccggtcgccagtgctcctccatgggccacggctgacgggtgcacgcaccgaccgatggttgcagtaggagaggtggatttggtggacctagattcgatgtgcagagagcgacttggaggtggctgacatcttcaagcactgcatcatgcagttacaactactgttggccatacagggaaatgctgggcctattataccaattgttcaaagcatggaccttgtatagttacatgtttttatcatagatagattaatttctgaaatgcccatagattggtatatttgtggaaatttatttgccaactgtaagcccgtcgtgatgcacagaacatttgtggtataagatttttctgttgatgtttgcaggttatttttccagcacttgacattcgagtgaaaaatgtcgcagggacatattctcttgaacataaaggagaaaatgatctcttcgcacatcagacaaggcttctactctttcagaagaaagtcattttcaggagaatcttgaacaaaatgaccagatgtttaggcctggttggaaggacatttttcgaatgaatcagagtgagctcgaggctgagattcgaaaaggtctctcgagattctactcttgatccaaggaggaaggcctatctgatccaaaatctcatgaccagccgttggatagctgctcagcagaaatcaccacaaccaagcgtcgaaggacataatggatgtacacgacgacctggatgtgttccttcgtaccgagacccagggaaacaaatatttggctgtgagcattacaaaagaaactgcaagcttgttgctgcatgctgcaataagctattcacttgcagattctgtcacgataaagttagtgaccatacaatggacaagtatcttcactccaaccattcattttatcgtaacacatttcctgctgagggatgctttcaaggatttcattttaacatcgaaccaatatcaattaagcatggcatttaatttggaaatagaagtttgctggggtgtcatggatgtgtgaagccattcacttgcagaatctgtccgataaagtaactaaggggccacttttgactctatgaccatgtaattggtgtttatacaactacattaacatgtaaaggttgtagatctggaaggtcttgatggtctaatacctatctatgagtacggaagaaagaagtcggtctctgcagcatcgaaaaatcagccaattcccgaggaaatcagtgatggagatgatgtgcatgcaatgtctgaatgttcaacctgttggtccaaattgtcaatccccttcttgcaatggactgtccatggccaagtattattgtagcatatgcaagttcttcgatgatgaaaggagtgtctaccattgtcctttttgcaacttgtgtcgccttgggagcggattgggcactgatttttttcattgcatgaagtgcaattgttgccttggcataaagatgatagaacataaatgccgggaaaagatgctagagatgaactgtccaatctgctgcgactttttgtttacatcgagtgcaccagttaaaggccttccttgtggccacttcatgcattcggcttgttttcaggcatatacttgtacccactacacttgtccaatctgctgcaaatccttgggagatatgacggtgtattttggcatgcttgatggtttgctggctgcagaacagcttcctgaggaataccaggaccggtgccaggatatactgtgtaacgactgcgagagaaaaggcaggtcacggtttcattggctctaccacaagtgtggtttctgtggttcttacaacaccagagttatcaagactgatacggcagagtgttctcgccctctataatttcttttatgcaatccatttgtatatatatcgacggggtagaaaccttgtgaccgtaggtgtgatagtttttttatagagtgaactgggggaggaaccccacctggatgtattatgaggaaaaagtgactgcacatgaggagtctgagaattactcgctcccgtcccaaactaactgtatttctacgatttgaaatatattcgctcatatattcaaaatatagttgtaatttatattttggcatgcacgaaacaggtgtatttattcatttttgaacgaaattttatgtcaaaacggtcatataattggaactactggtgctgaggttctgcagtcaatgttaccttgggttacatcatcacttgggggggggggagcagnacatnatnctnnatacatggaagcaagcaaccaaaaacaccatgtttgatgaatggctaaatgaatggtggaagggaccttnaactttatttgacccataagacaaggcttgtactctttnagaagaaagtcatttttaggagaattttgaacaaaatgaccagatgtttaggtctttttggaaggacatttttcgaatgatttatagtgagctaaaggctg

SEQ ID NO: 4041 - DNA, 1916 bp, Zea mays
  Clone ID: TF_ZmC24792_1
cccgggtcctaggccagcaaaccccctctgtaccctccgggcaatcgggcatgaatccacccatccgcgatgctacatggagctcagcaagcctcggcgtcgtcgaccgcaggcccgcgccccaagagcactgctatcctgcagtctgatcagccacctcgcgccgccgccgcgcgggaggggggccgcggcggcacgggtccggagtcgcttgtgcgcggctcggtcgtcgcgccgtgcgtcagctgcggcatctgcggcggactcctccgtgacgccaccgccttcaccgagtgcctacacgccttttgcaggaaatgcatatatgacaaggttgcgaaagacaacataaagtgttgcccgaagtgtggcatttttatgggaaatccgttggagaagctcagacctgatcatagcctggaacacatcaggccactgatatttcctgctaagaggcgcaaggttgtcaccatgaagaagaggaaggaaagggtgtcctctgaatcaacccttccttcagtggtgggtaccactgcagaagaaagcactgcactgatacctgctgcttcagaaagtaaggcacaaaaggatcttactcctgtcggaagagatgctttgtcacgaattaggggtcgagactttgactcagcatgtggtcttactgaggatactggagccttgattgtatggcaagcaccacctattctagaggagacggctgcccacaatcagttagactccaagcaggacccagatagtttcaggcctccggcgacctctgatattgagtaccagcgacaaggaccaactgcacaaatgaccaatatttcgtttatggttgggaactcatcccatgcaaggccgactgaccaggatgatgaaaacatgagaggagatattctcacattgatcaatgagagcaatgcaagaatcatggaaatgtatgatgcccacatcagcaaactgaaggcagggaacataaaactaatagagcaactggaaaatgaaagagcagctgcacttgagaggacaagaatccttgaagagaggctccagcaagagttggaaaacgaaaggacagttgctgctgagaggacaagacttcttgaaaagaagctccaaagagaactggaacatgaacgagaagctgctattgagagaacaagagttcttgacgagagactccaaagagaatctgaaatcgcacgtactgctgcaagccggaatgaagctttaaaagaggagattttcaaacttcaggaggaattggaacatggaagagcatacaaccaggctctgatgtcagatattttggagaaaagcgaggaactcgctacgctcacatattattctaacctgcttgagtcagagaagacatatctagaaaaccaagtcgaccatcttaacgaggagttgaagtgtactaggaaagagcatgcagcatatgtccgtaaggtcttggacgcagcaagagccatccctaacgacttggagccgatcaactcggcaactccgatgctctgccgagatcgcggtgcacgtcggggatctgttagccagccacaggctggccatggctaacggccagcccccacaggcagctgatccttaagagtttggacctaatcttatttctgatagccctttaggacttctttgactgaacctgtgggcggtgttgagcgacttcccagctcgctgtccaggtggtgataattggcgttttattttgtctagcttcaggtgatgttttggactgtttcttcctcaggttgcagcagtacagtatagtgtcgcttccttctgttcagttgtagcttgcttcttagaaggtggtcggttcgtccgttctgttgtgtactctgctccgttgggcgtatcaagataaatgtaaattccattctgcttgcccaccc

SEQ ID NO: 4042 - DNA, 839 bp, Zea mays
  Clone ID: TF_LIB4738-122-A1-K1-H3
attgggacctcgagccggcccggccgccgtccctggagcaacgatctggacgacccgcaattcatgtgctgcgtatgtctggatcttctgtacaaaccagttgttatatcatgtggtcatatgtcatgtttctggtgtgtccacaaagctatgcatattttccgggaatcgcattgtgctgtgtgtaggcagccctatatacacttcccgagtatttgtcagctcttgcatcatttgcttctaaagcttgaaactaatgattacaaaagaagggaaaaagaagtactagaggaagagaagcgcatgcaaacatactctccccaaatcattgagttcttaaactacaagactaacgttggaagctataaggagaacagaaatgaagacagtaaagctagacctccacaagaagttccattgaatgacagcgttccagatgagcatttgaagaaaattaaattggaggatgtttcatgccctctctgtatggagatgctgtatcaacctgctgttcttaattgtggtcatggtacttcaggcagaaaaggaagcactagggcactgcatgctgaagacccgtcaaatattcacattggagtaggatgcgactcatgtggggtatatccgatacgtggtaagagatacaaatgccaggactgcactgagttaataggctttgacctttgcgaagcctgctacaactccagttcaaagctcccaggacgctttaaccagcggcacacccctaatcacagaatggaagttgacaattcagcactcgtgcataggatactgagacaccatggcataccccgaggaaggccctgaggactgatgat

SEQ ID NO: 4043 - DNA, 796 bp, Zea mays
  unsure (1)..(796): unsure at all n locations
  Clone ID: TF_LIB5117-058-A1-PF1-C8
acttgtgcaacaaacgaattcaagcaaccaacggttacagatatctatggataagctggcagtttctgaaagtaagcctgcatggaggaatgaggtccaacttgacagtgtatcagaggatgggattggctggtcatccattcaaactgcgcaaaaccaaacttccatgaaacttgctggtatgccaatttgttcttttgctgctggtggtaactgcccgtatggggaagagtgccctcacatgcatggggatttgtgtgcgttctgtgggaaaatgtgcttgcatccttatcgtcctgatgagaggcaggagcatatcaagctatgtgaaaagaaccacaagcgtctcgaggctttgaaacgtagccaagaaatagaatgcagtgtctgcttggaccgtgtgctctcaaagcctactgctgctgaaaggaaatttggactattatctgaatgtgatcatcccttctgtatttcatgcataagaaattggcgtggcaactctcctacatctggtatggatgtgaactcagcactgagagcttgcccaatatgccgcaagctttcgtactatgtcattccaagtgttctttggtacttctcgaaagaggaaaagttggagatcactgaaaactacaaagcaaagcccaagtcaatagattgcaagtacttcgatttcggaacgggcacttgccccttcgggacaagctgtttctacaagcatgcttacagagnatggccgcttggaagaagtcgtactgcgacatcttgattgtgatgatggaagtacacttattgc

SEQ ID NO: 4044 - DNA, 1515 bp, Zea mays
  Clone ID: TF_ZmC21544_3
cgaccgaacaaacaacatgtatgatttcacaagccgcccgctgaaaccaaagccttttgccctgtcgtcaggggcgaggtttcatcaacctcagtacctcaccctcctctcccggagagcctctcgcctccgctccgctcctctgccctgcccttccccgccacaccaaccaaggcgccaaaaataaacgccgcctgtcacattgcttgccgcgcctcgtcttcgcggaggcctcgtcgcgcgacgatatggagctcgccgaggcgccggcgcccgtgcccgacgaggacgggctggacgaacgcggcgtcgcgctgcacctcccgaggctgctggccggcgtcgtctccggcgccctcactggcctcttcgctctcgctggagctctgaccggggcagtcaccggcgcggtggcgggcagggcttccgacagcggcggcgtcctgcggggagctggactgggggcggtcgccggagctgtcctctccattgaggtccttgaggcttctcgcgcttactggtgctcgtcggaccggctgggctcgcacggcggagcatcgtccatggctgatttcattgagcagcttcttcgtgcccggtttgtgcaagagcaatttactgcttcaggatatgcatcatatcgctggcagctcagcatatcatattttggtcaggatgacctatacgacatctttggggacatttcatctgaagggctctcgcaagagtcactgaagaaactaccacatcatgtggtcagtgaccagacgcgggacttactcggcgaaatcctgtgttgtcctatctgtctacaggtacggtctgagcaagcgcgatcctaccactacagagtaactgtcaaagaaaccttctgccacaattaatacagtatgcactttgttttggttaaaaagtgttacgtacgttcaaataagagagagaaaactatatgctaaaaagtaagtaatcagcaattttctaggctacaactggtttcttcaaaaatggtttccgagcgagatagtagatgagaccatgaatgcaagtccaggcgcacgcaatggttggacaacgagacaatgaatgcatggttggagtgcaatcagagatttccaggacatcgtagccggcgacacagcaaggaggctgcccagttgctcccacactttccaccacccttgcgtggacagatggctcgtggatcgcggatcgtgccccgtctgcaggcaggacgtgtgagatagccagataggtgatcgctgagtttagatggagcaatagctgggtgatgcgaaatgtttgctcctacactaagttcatatatatatatagctactagagagaagatacgtactgtggtgtaaattagcagagaatctgcctgttctgttccactaccagccagcgtaaacggccgtgcgcatcggacttcgtttcttgcacccggttccaacgtgtaatgaaataataacactgctgttgggaagcagtactaaaaatttctaaacaaaaacc

SEQ ID NO: 4045 - DNA, 712 bp, Zea mays
  Clone ID: TF_ZmC60532_2
acctgtagccatgctatgtgcattaaatgctatcgtgaatggaggtcaaggtcccagtcctgtccgttctgccgcgacagcctcaagagggtaaactctgctgacctgtggatatacacggacagcaatgacatcgtggatatggcgacagtccgaagagagaacctgaggcgactctttatgtacatagacaagctgcccaccgtcatcccagaatctgtatttgacgtctacgactcccatgtaaagtgacgcagttgagcacgtctgccagttgttttatgtatttgctacgtctactggtgctgattcctgggcctctggtgctgttgtgcctttttttaagagtttcgaagcaactgggagccgaggaggctaatttgtatacactgaatgtacgtagaacttgttctatcatcttgtgccatgcgatttcggcctgtatggtggtttagggtcctagcatttgacgctgtatatgtcagtggttatggcaagaaaggtataggcgttctcctgatgcatattctgatccatgattttttgctcatggatggatggatggactttgtttgaaggtcaggctatgcaaatgtgaaatgtacccatcttcatacttatattcaaacttacattgcaaaacagtataaaaacagtgttatgtgacgttacttgctaaaaaaaaaaaaaaaaaaaaaaaaaaaaagcggcc

SEQ ID NO: 4046 - DNA, 1703 bp, Zea mays
  Clone ID: TF_ZmC9088_1
tgctgacatttgcaaccttcttgagagcaaaaaggtctcaaagtctcttgagagtgactttagcaataaaatgaaccagctgttgctaatagttctgcaaaaacaaaggcaacaacagatgatggatggttttggaggatactatgatgaatgcatgtactggagacaaaatgatgaaattcatgatgctcataaggaggcatctgctccatgttcatcagctcctgtctcacatcttggtgctcatcagcaagagtgttggcagcactcttcatatggaagtcaacatcacgataaccaaaatttacttgaaatggaagtcagggtaaggggtgaaatgtcccagattcaacatgaaatatatgaactgcagaagttggtggaaagttgtattgcatcccaagtaaagatgcagcactccattaaagaagaggtgtgcagtgcacttcgtgaggcaggcttgatgccaaaccaacccgacacaacagcagcaaaagggggtaattgctgcattccggaaacaatgggtgatattgagaatcataataatccaattcaattcaatgaccgcccctggatagagtcccctaactcgtggagatcactatgtgttgtcacgcaatcagactgtcatgctctgtcacacaatgctgacatttgcaaccttcttgagagaaaaaaggtctcaaagtctcttgagagtgacttcagcaataaaatgaaccagctgttgctaacagctctgcaaaaacaaaggcaacaacggatgatggatgactttggaggatactatgatgaacgcatgtactggagacaaaatgatgaaattcgtgatgctgataaggaggcatctgctccatgttcattagcccctgtcgcacatcttggagctcatcagcaagagagttggcagcattcttcatttggaagtcaacatcaacaccacgataaccaaaatttacttgaaatggaagtcagggtaaggggtgaaatgtcccagattcatcaggaaatatatcaactgcggaagttggtggaaagttgcattgcatcccaagtaaagatgcagcactccattaaagaagaggtgtgcagtgcacttcgtgaggcaggcttgatgcgaagccaacccgacacagcagcagcaaaaaggggtaactgctgcatctgccatcgaatgcaagttgactctctactttacaggtgtgggcatgtgtgcacctgttttgactgcgccgatcagctgaaatcgagcggcatgagctgcccaatctgtcaatctcctattgatgatgttgttctggcgcggttgaatttttgagcttagaatttaggaaaggccaagagaaaaagagccggcactcccagatttagacgtggagtttgcgaagccctggttttgaggcggcttcttacctttttgcttaaccaccactaaagaaatacgagctagttcttggagaaaatgtaaatatgtttttttggcgcaagagcggtgtgcttgtatcgcactaaaggaaaacagagttctaattaaaatgctggttgtattccccgtatgtaccacatcacttgttcacggagagaatgtaatggttctggttctatttgcgcgataggtttgaactcacagcattgatactcttcactcaggcctatttgaacaaattcaacgccaactaataatatgtttggtttgagga

SEQ ID NO: 4047 - DNA, 237 bp, Zea mays
  Clone ID: TF_jC-zmX148004Q1E1F9b1
ttggttacaacaacctcgaccccagcccgggggccgcggaacaaaagcggggcgagaacaaaacagcacggcacggaacgccgaccggcaaaaaggaggccaaggaagcaatgccgacccaagaaatccccagcagcaacgatggggacgacgcggccagctgcccggtctgcctagaggactacgccgccgcagagcacccccgccagaagccctgcacgcacacgatccacagca

SEQ ID NO: 4048 - DNA, 554 bp, Zea mays
  unsure (1)..(554): unsure at all n locations
  Clone ID: TF_LIB3957-008-Q1-N6-G3
gcccaagtaaatcaaatgtcattngaataaattttaaatcccaaatctaagattgaaaaaaacaaaggataaaactccatggtctacagccattggcttcaggcaagtgccatgtaccacctatagtatagattcccacatgtatgttgatgatgggaaaggtgtaacatactttgctagtcatgggagggtgtggttagatggcaaccacttgccctgccgctaccggctttttcctaaggaaaaaggcagccatgtttttaggtgtccagtgctgttttcttgcagattgggcacaggttttttataaccagccattgtttgatacatgcggtgtggaagtcatgaccacaatccagcctgcccaggtcctcgccttccacatagtcttcctgcaatgttcaaggtcaacaatgttcagtaatgccaatgagctacagctgatctctggaagtaaatgagtaataatgctgagccagaacaataagcccgttctaagcaagagcagtaaataaaacaagagatgctccccaaaacaattattatattaacgc

SEQ ID NO: 4049 - DNA, 1791 bp, Zea mays
  Clone ID: TF_ZmC64108_1
ctgtgactctcgagggtggaggggccgggattccgttcgggtaccttgctcgaggccgggtggccgggcaccgtctcgtttctctctcctcccctcgcccgtcttccctcttgtgcgagctcagctcacggtcctcccacccccatgagcgcctccgcggcgaggaaaagataatcagcaggcggagcggggggcgcgccgatggatctggagaggtcgccgccgccgtcgccggcggaggcggccggggccgcggcgtgctccatctgcctggatccggtgctcgcctgcgtcgcgggccggtccgtcgccaagctgcaatgcggacacgagttccacctagattgtattgggtctgcattcaatgcaaaaggagcgatgcaatgccctaactgtcggaagattgagaaaggtcgctggctttatgcaagtggacgtcacccccctgctgatattgatatgggtggctgggtgactagcgacaactatgatatcacctccgagcttccttttggatttcaatggtgtccctttagtggattcacccagctagcatcaatgtttggggtgcgtgaagctgagccaacttaccacacaactggagatcactcaagtgctgcaagcagttcacttgtttgcccatatcttgccctgcgtggttttctccatcctgttcatgtgccttctacttctaattctggtgctgaaagcacttcatttcatcggcactcaactggcttggaaggacatgtcactcctgatttgaacaatgctccagttttccatgctaccgagtcaagaaatcatgacagtgagcacagacatttgagtaatcttcctgtatcaggaactcctgaatattctatgactccatttgggataggagtaccaagatatgacagtggcagccaacagggattccgatcatatgcgcatcatcatcccctaatccataggctgacccctcgcagcggaagcaatctggtggcaccattagggtcagttccagccgtcgtggcagagactagaggccatggccatggtgcaccgggccatatgtaccagcactcatctgtgcagggcagcccgttccctcctaccaccagaagggttaggcccagagccttgacgattacgtctttcatcgcagcgacttcctcagctgagattgcagggccccttggccacgggtttcccgctcctggagccgtgaacaggagcgtttctgatgccgagggcatcgaccgagcgtacacatggggccgggagggatatgatctgttcccttggacccctgctgaatggggcaccttcaatcccatgcagaaccatgcgcatggaagctttaccagaaggcctgctggggagcggatgccgcagagtcgccccgagaacggataccagccgcctgtgcccacttcacagaggatgccaccgttcttgtgatcagacgaggctgcctctccaattgctgtgtataaaattatttgattcggggtttggcagagaacaacgagcgaatatcgaccgcacggcagcatcgaaactggtcggctatgggacctgtgtgtgtgtgatgtttatgatgatgccgctcgtatttttagcgctttcggtccagcggcgctcaggtttcgtcgagcgctgtcgtttgtcctgactgatatggtgttgcgttgaaaaggactgttaaaacagcggccgtttctgaactgcatctctggtcgccggggctaaaaaatgccgtttgctgctatgaaagaaagttgtatcgatttgcggccgctctag

SEQ ID NO: 4050 - DNA, 1329 bp, Zea mays
  unsure (1)..(1329): unsure at all n locations
  Clone ID: TF_ZmC64108_3
cactactatcatttgccgtcttccccctccttccattccgttcggatacaccgtctcgtttctctctcctcccctcgcccgtcttccctcctgtgcgagctcagctcacggtcctcccacccccacgagcgcctccgcggcgaggaagagataatcagcaggcggagcggggggcgcgccgatggatctggagaggccgccgccggcgtcggcggcggaggcggccggggccgcggcgtgctccatatgcctggatccggtgctcgcctgcgtcgcgggccggtccgtcgccaagctgcaatgcggacacgagttccacctagattgtattgggtctgcattcaatgcaaaaggagcgatgcaatgccctaactgtcggaagattgagaaaggtcgctggctttatgcaagtggacgtcacccccctgctgatattgatatgggtggctgggtgactagcgacaactatgatatcacctccgagcttccttttggatttcaatggtgtccctttagtggattcacccagctagcatcaatgtttggggtgcgtgaagctgagccaacttaccacacaactggagatcactcaagtgctgcaagcagttcacttgtttgcccatatcttgccctgcgtggttttctccatcctgttaatgtgccttctacttctaattctggtgctgaaagcacttcatttcatcggcactcaactggcttggaaggacatgtcactcctgatttgaacaatgctccagttttccatgctaccgagtcaagaaatcatgacagtgagcacaggcatttgagtaatcttcctgtatcaggaactcctgaatattctatgactccatttgggataggagtaccaagatatgacagtggcagccaacagggattccgatcatatgcacatcatcatcccctaatccatagttcatcccgagctgctgcattggccccaaggggcgtccatcaaacaaaccgtcctcaacatctatgacagcatccaatgggaagccctcaacatctatgagatcctcncccatggcctttggagtcttcgatggacaagaggcagccgtagactcgatcgactatatcgacgggtcttcatggtagcccttgtgaccttcggcgaaccgtgcatccccaacagctgtgttggcctcaagatggcagtaactgatttgttttgttagggactaggtgcatctgcacccatatgggacgatagactgtggcgctgccttaaatatgaaaaaactgatctgcttgatggtttcattggttagtccatgcgtactgaaatattgtctgttacgaatc

SEQ ID NO: 4051 - DNA, 627 bp, Zea mays
  Clone ID: TF_LIB4979-013-A1-K1-F5
atgtcaacgccatccgtaccattctcatgataaggacccggacctactcatcacccaggggggcgtacctagctccatccggcggaagcgcatcagctcagagacgacgacggagcagcagcatctcgtcgatcgcagctgcagcgccgccgccggcggcatggccgctgctttcgagcccacaccgaatatctcagaacaaccggagcaccgcccggcgaccaacaaaggcacgctggtcttcagctacacctgcgtcggcctcacgggcacagcgctcgtcgccgacctcctcttctactgctaccaccagctgctccgcagacgggcgccagtcaccgccgccgccgccgccggagcagcagccgagaccaataatccaccagggtcggaaggacaccatgtcgggggcgtggacatcagcaagcttcctggcttcgcgtacgccgcgacgtcgtcaaggcgcaggagaaacggcggcgacggggcgcactgctccgtgtgcctcggcgcggtgacaagacgcgagatgctgcggcggctgcccctgtgcaagcacctgtaccacgtggagtgcatcgacatgagtctggagtcgcacgcgacgtgaccgctctgccgatctga

SEQ ID NO: 4052 - DNA, 649 bp, Zea mays
  unsure (1)..(649): unsure at all n locations
  Clone ID: TF_LIB4765-009-Q1-K1-D9
ccggccggggacaaaaacgactctcggcaacggatatctcggctctcgcatcgatgaagaacgtagcaaaatgcgatacctggtgtgaattgcagaatcccgcgaaccatcgagtttttgaacgcaagttgcgcccgaagccttctggcggagggcacgtctgcctgggcgtcacgccttccccggcagacggcagtcgcatcgcatcccctccgcctcgttccttgctcggctcgccccatacttcgctgccggccgccngccgccgcattcccctcggctactcgctcctcgtcgctccccggtgatgtctggcggtaacgcatggtcgccactgccttcgcacggatttggatccgagtctagcggcatggcgaatcgcgccggcgagcctgtggcgaggaccaacagcgatggcggcggcggcggcagcaaggactcgggcagcttcgagtgcaacatctgcctggacctggcgcaggnaccccgtggtcaccctatgcggccacctcttctgctggccctgcctctacgagtggctccacgttcacgcgcactctcaggagtgccccgtctgcaagccgtcgtcgaggaggggaaactcgtccccctctacggccgtgngtggcagctccgccgtaccccgtgc

SEQ ID NO: 4053 - DNA, 822 bp, Zea mays
  unsure (1)..(822): unsure at all n locations
  Clone ID: TF_ZmC163039_1
gtgcatcggcgcgagccgggacgccggcgacgccatcacgtcgacgctttggaaaccgtcgccgtcccaccctcgctttccatctccatggctccaggtcctccacggttcgctcaccttcccctccaaacccaaccaagccaagccaagtctcgtccttcgcgatcccgcgccgtcctcgtatataaagtagccgcgctactaatccattcgaattcccaacaccggcacgagcgccaaaacatttattgccttcaagtggagaggcttagcggcgcgaacgtcgaggagctttagcctccagggtaggctcctgctgatcggccaagcgcaatctcgttcttccaagcagacgtacagagagagagggtcgcgggggcggttgagggctcgtcgtcgacccatggccgtgaccgcgacgacggtcgcggcggcgatcacgatgctggcggccgtggcggcggttttcctcaccgtgctgctctgcttctacatcgtcctgtgcgccaagcaataccggggcgaggcgccccgcgcgggcggcggcggcggcgccagggcgtggctgctgcgcgccgtgttcggcggcgggggtgcggacggcggcggcggcgccaccgagtggtgccacgagggcgggctcgacgacaaggccatggcgaggctgccccggcgggaggtgggcgcgggcgaggcgctggactgcgccgtgtgcatcgcggaggtggcggccggggaggcggcgcgcgtgctgccgcggtgcggtcaccccttccacgtcggctgcgtgnacgcgtggctccgctcccactccacctgccc

SEQ ID NO: 4054 - DNA, 1570 bp, Zea mays
  Clone ID: TF_ZmC33545_1
cattgggtacctcgaggccggccgggagcactctccgctccatttcgaactcctgatcggccgaccgttgcttccaaccagccccgcctcaggcccccaacggctaccaaatcgccatcgccactttagagagagggagcgagggagctaggatggcgtccagagatgcgggcgccagccccagatccgcgccgcatcgccctggagcggtggcgcccaaggacggcgccgacctgctcagcccgcggttccgttcagccgccgcgctggccgggtgggacgaggagtccgtccttctcgccgcgatggtcgtcgaggacactcccgtccgcgagtcccgtcgcaagaggcgggcctccacctcctccgccggcggcagcgccggatccagcaccaggaagatgaggccgcgtaggcagtctccggccaagatcccgccggtggttctcgcgctcgacgatgacgacgacgacgacgcggcagatggcaaatcgatagtgaatgctgccaccaaggaggaagagaaagttgtcgttgtgggcgacaaggaggcgtccggatctggcgacaaggcggcgtccggatctggcgacaaggcggtggccacgggaaacctgccgtgcatggatcgcctccgggaggagctctcttgcgctatttgcctggagatctgctttgagccgaccaccacgtcttgtgggcacagcttctgcatgaaatgcttaatacatgctgcatccaagtgtggaaaacggtgtccaaaatgcaggcaattcatcagcaactcaagatcgtgcaccatcaacacagtgctctggaacaccattcagctgttgtttcccggtgaagttgaggcaagaaagaattcgacctcaccatgcgataaggacgcgagccgcagcccactcagagctaataggctatcacaaggtggcaatggtatgagaactagaactaggagcaggagcagcagcaccgaagctagaacaagaagcagctacaggagcttcatggaacccggcagtacaacaagcaccaacactggtgcgaacttcatcagcgcacaagtcaacacaagaagcaggaggggcttcgtccaggcctcgcagctgctgttgcctaagaggagcgccagtaaggttggaccaatccgaagatgctgcgttggcttacaggttgcaacaggaggagttcatgaatgcctttgaggagcctgagcaggagaggcagcagccacggaacgccgtgtccacagcacgagacactctgagagccatcgcctcccgagccgtccgcctccgtgctcgaggctggcatgtttaatattattctttcgtcaactactttacacaaacctcttgtttgttattctactgtgtaattttttttaaagtaggctgacccaaatttggatggccatgatcataatcctttggcgcatggaacatttgctgttgtacacagtactgttcaacacatagccatttgtcccatttttttgtatttttgccctttttctagaaaaaaatctgacatttagactccaaaagaaaaaatcagatgaagtgca

SEQ ID NO: 4055 - DNA, 907 bp, Zea mays
  Clone ID: TF_ZmC285028_2
tagcgagcggccgtggtcgtttttttaggtggctgctcccacggctgtacaagtgagctcgtccggctcgagtgaggaagggagcgatgaggaggaggaggacgggaacaagggatccggtgacggtgcgaggagcccgggcggctctgccagcaagtataaggcggcggagagtgaagccgaggcggaggacccatgccttcccagctgccccatttgtatggtcgcgtggaccgctgatggttcgcatcgcgtgagttgcatcccttgtggacacgtctacggcagacattgcttagagatgtggttactgcagtacggcaagaaaaaggcaccgtgtcctcaatgtggcaagagatatacacagaacaacatcatcaacctctatgtaccagagattgttgttcccaataatgatcttgaaaagcaagtattgtccttgagagagagaaatgaatatcttgagaagcaacaagcaaaattacttgaggagataaaagagcataaggtaccacacaaatgaaatattgtctcagtaaccgaattgaccaatttctctgaggaaacatgggtgactccttctgatgtactctattacaaattaaattgagcaatactttctgtgcataaacccttacacgctcagtagagggtcatgttcagtcctttatgtttcctaatatcacctgcaaaggcagattatgttgcaacaaaatataatatatgaatcaaacaaaaagagacaggtaagcactagtatcacttgattttaacgattgatcgttgtaatagatgctttattgttaacatttttacaatcaactgtgaagagagtgacagagcagtcatcagatggaatactaggggcagagctaattgcctcgcatacaaaggacattgaccacaa

SEQ ID NO: 4056 - DNA, 652 bp, Zea mays
  Clone ID: TF_ZmC2252_2
ccctgccacggcgcggacacagagagtggaaaccggaagggaggaagagagatggattcctccacctcggcggcggcggcaggggaggcggccttgccgccggaggacgacgtctgctccgtctgccacgaccgcttccggatcccgtgccaggcgaactgctcccattggttctgtgaggttgcaagacctacccttcttcatccgaagactgttcagagaactaatggacccccagcggaccctcccactcgtgttcagggcgcggatgctgatgatggcatgctgggcctctttggattcgtcgatgacctgctcatcctgctgatcgtgttcctccacctcgccgcggtgtaccggtcgttgctcctgtaccgccacgggggccagtagaagtcgctgtgcataaaccgtttgttaagctggtttccatgtggagttctctgagatcgcagcagcggatttggaagatcgccgactcgccgagtagatggcaatgtcacggacggcttagcctgtccctgctctgtaccattctactacgcctgtttttctgagactctgacacggtgaactgaactttggttggttgatgcaagtgaatttcccttcgttttactcgtcaggaaaaaaaagggaaagagtttgcgtt

SEQ ID NO: 4057 - DNA, 588 bp, Zea mays
  unsure (1)..(588): unsure at all n locations
  Clone ID: TF_LIB4172-012-Q1-L1-A3
gacgcccgcggatccggtccggaattcccgggtcgacccacgcgtccgctcagccaggatccagccacaggacactcctcctgaagcagaagaggaggtcatcagagctgcaccagctagaggccgagagcaactcaacgaggacgagcctgccgctgggcaggacccatggaagctgttgaaggagcaagaagagcggaagaagtgtgttatctgccaggaccagagcaaaacggtgctgcttctgccctgccggcacctgtgcctgtgccaggcttgcactgagatcctcatgcgccaccctgtttaccatcgcaactgcccgctctgccgccgcagcatcctgcaaaccctcaatgtctacctctgaggactccctccctgcctgcccgtcctctgcgctccacacactgggacagcatgaacactttgcctctgggttctggcctgagtcttctttgcccccgaaggcggcgactctgccaagcctcaagccatatatccaggacgtgtanctcggaatactgcggaagactccagtctgggtgggacagacgaacgctttctctacgccctgcgcgncgccct

SEQ ID NO: 4058 - DNA, 580 bp, Zea mays
  Clone ID: TF_ZmC3359_2
agaaaggccaggggcatgagtgccctgtgtgcaaggtcggggttgcggtcggccagcgcgtcaagcggctaccgtgctcgcaccgctaccacgacggctgcatccccacgcgtccgcaggtgcgcaactcgtgcccgctctgccgcttcgagctgcccaccgacgacccggagtacgagtcctggaaagccggccggaccgacgccgcgtgaaccggccaaccaggcagtggctgcatgctcttatggtatggttttattgatagtgttgtatgtatgggttgggtttgaatcgggtgctttggttacaaggttgctactcagccgtatcaaaggcaaagtatagaggcactagatgcagagatggtttttgatcggtttcctttttctccttaaagagggactcatgaagtttttccaaatgaccgaggttggcatatacttgttagttgttactacgtattcctgctgtatttattctaaaaatccagagaggttagctggatatcttggtgcagggtagctgtatatcctgatgcaatgggacgatctacttgctagatattatgatgttacatttt

SEQ ID NO: 4059 - DNA, 2683 bp, Zea mays
  Clone ID: TF_ZmC2094_1
cggacgcgtgggcggacgcgtggggctgccgcccgcgcgcgggacgctcaaacagccggactcccaaccaaaaggcgcaagaaaactcgtccccgccgctcaaaaatctcccgcctcccgcggatgggatggcatccagtttcacagaccacacgcccacccgctccgccgctcgcgcccaaaaattttcgttcagccggctgcctgccccccaccaccacttccctcccgttccgaaaccccgattagccgccgacccgccgtctccccacgtatttgactggtgctagagccagcgcccagatcaaccttcctgagtccatcggcaccgcatctgcctcgcgatccgtctctctctctgtcccctcacggccgtagaccttttcgagggcgatatcggagggaggagagggggaggcgaaggcgggagtagtagaaactaggaagggccgttcgtgtcttgcggagaagatggagaacctgaggaggttcctgaacccgctggtgctcaacctgcagaagatggagctggagctcacctgccccgtctgcctgaagttgctcacctcgcccacaacgctgccgtgttaccacacatcctgcagcaagtgtgcccttacaccgacttcaaaaggctacagctgtgccatttgcaaatcaggctattgttctcaagatttaaggccagcttctcaccttgagtcgatagtgagcattcataggagcctcagctctaccgtcagcaccatgattgaacaacaggattctcaaattaacattcatgttgcaaaggcagcatctcatggaacaccagaatcaggaaacagaagtggggtggaggagaaatctgaccagatgaaatcttacaaccctgttgcttcaaagctagtatataaccaaccaactggacctgcatttgggaacattgatagtgttcaagcaaaagatcctgcatttgagaacaatgctggtgccgcagctgttgcaccaatggcttttgtacgaaagggtcattctgggtcacaatcttctgatggccctggagatttggactgtgacagcaatgacctcgaaggagaactgatgacaagcctatcacctcttcaaactgcattgaaacgagaggcaaatgcaatggatgatcataccagagaattgaagaagcaaaaatcaaatgatcaagttcaaagacaaacaaacatggccagtgcttggaaatgtgagttctgtcattcttcccaagttactgagtgtactggccctttgtcacattatttgaatggggagccagtagaagctgatcaagcttggaaatcaagtgttcagcatgtccatgagaaatgcattgaatgggctcctcaagcattctttactggtgacaccgcaaacaacttggggcctgagttggcccgtgcttctaagatcaaatgcagtgtttgtggcttaaaaggcgcagcacttggctgccttgtgaagagctgccgcaaaagttttcatgtcccatgtgcctacaacgtcaaaggctgcaaatgggatcaagagaactttgttatgctgtgtcctacacattcgtcaaaaaagttgccttgtgagagattaaagccaaaaaagaaggccaagctgcagcaaccatcttctgacattgatggtccgatttcaccctctccgatgcaaagggctgaactttggactgcctcaccttttctgactagtgaatgggtgatatgtggatctgcgctcattggccatgagaaggaaatcttggatcagtttgagtgtcacactggcatcacagtaaccaacacctggagttcagatgtgactcatgtgattgctaatacggatgaacgtggggcatgtgcacggacactcaaggtcctcatggctattttagctgggaagtgggttctcaatgtgaattggctgaaagcctgtatggaggctagggaaccagtcccagaagagccctacgagataaggtgtgatgttcatggctctgtcgacggccctcgctcaggaaggctccgagcgatgcagcaggcaccaggtctgtttgctgggttgaccttctacttcagtggccatttcatgccgggatacagggccaacctcgaagatttgatcgccgcagcaggggggtccgttctggagaaggccgagctctctagcacgtccttgatcctctacagcatggaggcgccgccgccccacaacaacctagacgccctcgagaccatcaacaagagattagccgaggcccaggaactggcgaccacggctggctgcaaagccattcctcatacatggcttctggactgtatcgcgtcgtgcgcggttgagttgaacgtgtcgtgttctactgcctaggttcaaacataggaatgtgacatctgctgctgtttttttttgaaaaaggagattaagagacgattggcttgttgtcttgatccaaagtatctttagacgttgtagcatgaaagcggaatttagtcggaataagcctgtgtatcttagtcaacgttactgtcggtgatgtcatccacatgtttcacctactgacaggtgcagtttgtctgatttttttcttcttgatttgtatctaaaaaaacataaaaggatgcactcaggtcaggtttactccatttttcttgaattgacgttggaaaaaaaaaagagatttacc

SEQ ID NO: 4060 - DNA, 737 bp, Zea mays
  Clone ID: TF_LIB5117-040-A1-PF1-A1
gataaccccttcttcctcgtcgttgccctaggcttcttatcctctccagccatggcgaacgccggcgatcccgcctccctccccccctccgcctctcccttctcatccacccgcgcgctcgagtcggtccccttctcctctgggaacccccgcatcgaggagacccgcggcgtcgtcctcctccaccccgacccacccaccgctgccgcggccgcctcctcctcgtcatctcatcttccggcagagaggaagccgcaggtgttcgtacctgcggtgcccaaccacatgacctacgcggacttctgccgcttctgcggctccttcgtcccccacatgctcgagatgcgcatcgtcaggattgatggagcggaggaccagtatagcgttctcataaagtttggcactctgagctccaccgatagcttctacaagcacttcaatggaaagcagttctcatcactggagggtgatgtttctcgtatacgttttgtggaagacgtgcactacactcaattgatcgagcatgcccatagctcgattacgagctcagctgagcagcctacttgcccagtgtgtctagagcgacttgaccaagatcctggaggcattcttactacaatatgcaaccattctttccactgttcatgcatatcaaaatggacagactcttcctggccagtttgtaggtattggtcagcagcaacctgagaaatcaatgggttccgtttggggaactt

SEQ ID NO: 4061 - DNA, 378 bp, Zea mays
  Clone ID: TF_LIB3060-112-Q6-K6-F6
cctctcctctcactttctgaattccccgttgctctcccgtcttccctcctcccctccccaaacccccaccccaacgcccagatctaccctccccatttacagctttctctccggccctgcgccccagggcaccgcgccgcccgaaaccgtcggcgccggcgcgatgcgcgtgcgcggcggctcgttatgcaacgtcagatatgacgaggaggagcggacgccgctgctcctccactgcggccatggattctgccgcgcgtgcctctcccgcatgctagcggcagcccccggagccacgctgccgtgcccgcgatgtcgccatccgaccggcggaggggggtcagtctctgcgctgcggttgtacttccccattctatc

SEQ ID NO: 4062 - DNA, 615 bp, Zea mays
  Clone ID: TF_21210563
gcacgagagacggccgaggtggatccagcaacagcaacgacgatggcttgctggaagagtatgatgtcctgggggctgggctgagcctactgcttcagcatctggccgagaacgacccgaaccggtacggcacccctccggcgaagagagaggcggtcgaagctctgcccactgtccagatagcggaggccgtcagctgttcggtctgcctcgacgatcttgagctggggtccccggcgaacaaatgccctgtgggcataggttccactcttcttgcatcctgccatggcttgagctccacagctcttgccccgtgtgccggttcgagctgccgtctgaagagacgaaagatctgaacgagcctagcgatgtgcacagaagaacagaaagcgcccgagaggaagtcagggccgatgaccctgagaacgacagcgagagcggtaacagcgcgtggccccttgtcccttggttcttcagcgggctgttctcggtacctgaaccgcacactgacagaggcactctcaccaccgatcaacagagcccttccaccaacccaaatgctggaggaaattgatttcgtcatcctttgtgaataatgctcatacatctgagaat

SEQ ID NO: 4063 - DNA, 533 bp, Zea mays
  Clone ID: TF_LIB3900-009-Q1-N6-C9
acagaaacaggaactgctccgacagcaatcttattccattgccattacatgttggaaccggggtgcaagaaacgaagtgagattgccagatgcgcacggtcgtttctcttcactccacgtctatctacgtacacagacacaggtcgcctatatatcttttacacgcgttgcctgcagacggggcacgagccatggccgacgagccatctgtccacgcaaggctggtggaaggcgtgagagcagccgggcagcctcctcgctgtctcaccggccacaatgtcctgcggcaagacgaaggacgctagccattaggtcggccgtcggcgttgataataataataagaagaagaagaagaaaaaaggtgccagccaaggccagacgctgcatttagtagcaaacaaatttcggtatgaaatctctgattgcactccaaccatgcattcattgtctcgttgtccaaccattgcgtgcgcctggacttgcattcatggtctcatctactatctcgctcggaaaccatttttgaagaaac

SEQ ID NO: 4064 - DNA, 608 bp, Zea mays
  unsure (1)..(608): unsure at all n locations
  Clone ID: TF_LIB3592-049-Q1-K6-H11
gnagnagaagtggaggctagtacacaaaaggaggatccaatcagatcacagcagcgtttgcttgtccaaatgcagattttgatctcagtgctccaaatcaatgatcctactgctgcttttagcgcgcaaaaagccgatctttttttttactcgtgctcttttcttcctttctttggggagcactccatcttgttttgtttgttcatcattctcctgtctttgcagaatggcgtccgtgctgatgagttggtttggtttctctctcttttccgtacgtgcagccccggtgcggtgtgtgttcgcgtggcgtcaagagtggcggcagctcggcggtgttcacggccgagtgctcccacgccttccacttcccctgcatcgccgcccacgcgcgctcctcctccgccaacggcgtcctgtcctgccccgtctgcgcctcgccgtggcgccaggcgcccttcctcgcctccctccgcctccactgctccttccacgacgacaagcaccgaggaggcggagacggccgcaagacgtcgccgctcgccaagctgtacgacgacgacgagccgctgctggcgcccaaggccacggccaacggcggcggcttcaac

SEQ ID NO: 4065 - DNA, 1084 bp, Zea mays
  Clone ID: TF_ZmC73469_1
cccacgcgtccgcccacgcgtccgggttgcgtcgactcgccgcctgcactgcgcagccaccacccatgactacaacgtgttcagcttccacccggacaactcgccgtgccacggcttcgaggaggtcctcgcctgctaccgcaagatcgtgccgcacctcaagctttccgggccgacgtcgttcgcgcccatcgtggaggcggccgtcgacatcgtggaccggagcggggggcagtaccacgtgctcgtcgtggtcgcggacgggcaggtgaccaggagcgtcgacaccggtgacggcgacctcagcccgcaggagaagagaacggtggactccattgtcatggcaagctcctacccgctgtccatcgttctggttggggtcggggacggcccctgggacgacatgcgcagattcgacgacaagctccccgcgcgcgacttcgacaacttccagttcgtcaacttcaccgccatcatggcccgcgccgcgacggcacagcagaaggagtcggcgttcgcgctcgccgcgctcatggaggtccccatccagtacaaggccaccatggagctcggcatcctgggacggtccacggggaacgccaagcgagtcgcccccgcgccgccgccactgccgcacgcgcagcggcaggcgtcgtcgctgaggaggggcgccagcaacgtcggcggcgccgccgcggcgccgagagatgaccaggtgtgcccgatctgcctgaccaatgccaaggatctggcgttcggctgtgggcatatgtgctgcagggagtgcggggaaagcctcaccagatgcccgatatgccggcagccgatacggtcgaagctgaggctatattcaggatgaagtggctatgctacaacagaggccacgaagaggaaaaaggatatatagcttactcgccgttaaaatgtacatgtgaatctgtcaaaacgtgtaagaaggaaccaccggtcgaggtcagtcctgttcgtctccaaatttggatgaaccgatgttccattttgtcacttctaaaggatgccaagctttacagtacgacggtgcgatgacgtacgtgcatcagctcct

SEQ ID NO: 4066 - DNA, 828 bp, Zea mays
  unsure (1)..(828): unsure at all n locations
  Clone ID: TF_LIB4969-018-Q1-XP1-A1
ctgtgcggcgctcaggcggcgggtgcgccgtctaacctcatcataatcacagattcacagggcgctagggaggagagagggctagggtttcgtgctccctcacgcaacgaatccgagccggatcggggggtgcgcggagtcaccggcggcccggcgttgcctgggctgtgatacagttgcaatggcatctgtaactgatgagacagctaagattgagggtttgacatctgctgcagcctttgtggagggtggcattcaggacgcatgtgatgatgcatgcagcatttgccttgaggctttctgtgagagtgacccttctgcattgactggctgcaaacatgagttccatctccaatgcattcttgaatggtatgtttctagctctaatatatccatcctacatgttacaatttttacaattttttatattattcccacctttcgcatgaacagtacctagttccatcagcaattcatctgggtgcatgagttatggttatcactaagcacacattttagaacatcgaataccttaggtatttgtgttgtttagttaaccatatctgtcaccttagactgtaacatctgattgtgactggaaaggcttcagtatgggttttgcacatgaaaattttgtccctgaattgatgtttgacttctctatcgtgtgcagctttctggacatgggatggtatattattgaactgtactgtcttggtactgagtactgacaaaatttagtgataacatcatatgctncaacagcattttccttgctggcgttatgaacagttgtagtcaaaatgcttggacttttattatcatatc

SEQ ID NO: 4067 - DNA, 637 bp, Zea mays
  Clone ID: TF_ZmC1202668_1
tttttttttttttttttttttttccgggttctttctgagttcaataattatcggttgtgtgaagtaatcttatcttatatacatcctatatacatgtggaatacatctgctacaccggaggctgtgggtcgttcgaaggcacttccttcgtaggcggaaccgtggccctacacagaggacacgtggagtgagagtgcagccacatgtcgatgcagcagacatggaacaggtgagtgcacgccggcagccgcctgacaacctctgccttcctgcacaaggctcaggcacaccgcacactgcgcccacccgcgcccgctgccgctgccgctgccctcgccacggccggagccgccgccaaccggcaggcccctacggaacacgaacgacggcagcgtggacaccgcggaggggctcagcccaccgtcgccgtcgtcggtggtgctcggcaggaagaacggccgggccgccacgtacacgacggttccccccgggccacggcggcggcggcggcagcacaggcattcgcagaggacgatgatgaggacggagacggcggtggcgcagaagccgatggcgaggagcacaagcgtgtcgtgcgtgctgtatccgcccttgtccgtggagtatggcatcgagt

SEQ ID NO: 4068 - DNA, 1541 bp, Zea mays
  Clone ID: TF_ZmC25188_1
gcgcgggccgcccagacccgcggtcctccccttaacgcacctcatcgagtaggggtcctatcatcgagtcatcgttcagagacagaggctggtcgatcgtcggtgactgatggcgatggcggcggcgcaattggaggcggaggaggagctgcggctggaactggaggcggtggcggcggtgtacggagacgacgtccgcgtgctccgcgacctcccaccgcacctcttcgtccacgtgcggccccgcaccgccgacgacacctcgcagcagttcgtggagctctttcttggcattaaagcatcttcacagtatccgaaggaaccaccacatatttatgctgtggaaagtaagggccttgatgagaaccgacagatatatcttatcaccagcatccagaacaaggcaaacgaactttcaaactgtccaatgcttgtgacgttatgtgaggaagctggagagatcctctcgaacatgaatcatccagcaggggattgtccattgtgtctatatcctttaatgggagaggataaggttggctcggagttgccatttatgaagttgatgtcatgctaccattgcttccacagtgactgcattatgagatggtgggaatggctccaacatggtgacacaaacccaaaggagcccaatactggagacaagcattataatgtgaatcagccaagaggattttgtcctgtttgccgcaaagtgttcgatgagaaggatattgagcatgttcgtgatttgttgggtgacaatacttccaggctggcatcactaacagttgaccttggtgaagatgaaaaggaattgctccattccgaggctgagcaaaacaggagaaaaagaatcgagtcacttgttaatctgcagcaagaactaaacggcctgattgaaccaaagaaagaccttgccatacaaccaggaatgtacgtttccgttcctcccagcacgccagacacagctgaagaagagaatgctgatcccagccaaggcacggctacttcgacctcagaaactgagcaacgtggccaggcaagcaacgccagcagcaacaagccgaagaatccaggccatcgaaggagaaacagagctaatgcatcaagacgacagcctcatggccagggccagccagctaggcagcagtggcagaggaaagaagcaggcacttcacaccaataaaagaacatcgaagcaacgaggaggatgtgacctgtgagttgtttttgtcggctatgtacatcaatgtcgtgccttgctttcgtctcataataattgcgagccatggtatgacaatgttttggcgtatgacaatgttttggcgctgctatggaagttccatgcaagtgatactctggaaagaaccctgcaccggattctatgggagtagtaagtatcaagcacatgcatgcttggctagtacatacaatatctgatttttttttttgtgtgtcattgccaggtactatgttcaaactgattgtccgtagtcagaaaagcaactgattacactgtttgttaaaaaaaaaaaaaaaaa

SEQ ID NO: 4069 - DNA, 2128 bp, Zea mays
  Clone ID: TF_ZmC1254_3
gtaccctccgagtctgccgggatccttgctcctcctttccttctcttccttattccattctcctcctcaactccatcgcattgctattccagtcctcacagagaagaatcccgcgagcgagcgagcgagcgcgcgaggcggcaaggacgaacccaagacgtacgatggcgaggaggctggcgtacacgacggcgctgaccacgctcttcagctacgggctgctcttcgccttcggccagctcagggatctcttccgccacctgctcggctgcttcagacccaacaaggacgacgacgtcaagcaggggtacgcgccgatctgcgtcggcctggaggatttcttcgtgcgacgcctctacctgcgggttcaggattgcttcggcaggccaatcgctagcgcaccggactcatggttcgatgtggtggagcgtacctcagacgacaacaacaagacattgcagcgcacctcaaagaccactagatgcctgaacctgacgtcctacaactacctcgggttcgccgcggccgatgagtactgcgtcccacgcgttgtcgactccctcaagaaatactcggcgagcacctgcagtgctcgagttgatggcggcacgaccaagcttcacaccgagctggaggagctggttgcgcgttttgtcgggaagcctgctgctgtcgtcttcggcatgggttacgttacaaactctgccaccattccctgcctaatcggaaagggtgggctgattatcagtgactcactgaatcacaactcgatcgtcaatggcgcaagaggatccgatgcgactgtcagggttttccagcataactgccctgctcatttggaagaggtcctgagagagcagatagctggtggtcaaccactacaacacatgtgaccttctatgacatttagattacgtcaccaacaatggggctggacgagaatcaaactacgaagagaggctaggcaggcatgacagatgtttgaggaggctgaagatgctattcacagggatgactctagtgatgatgatgaaataggagacgggcaactatgtgttgtgtgcttaaggaagagaaggagagcagcttttattccatgtgggcatcttgtctgctgttccgaatgcgcattaacaatagagcgtacacctcatccattgtgcccactgtgtggtcaagacatcagatacatgatgagggtttatgactcttaagtatgacaaaatggagatgtgaagcgtggacaatcagttggcactgcagccattggtggtccattcaagcctctgaatcatgatggaaaattagaaactaatttgatggtacaaaatggcattctagagaaggcaaatttgaccacgaccttgatgttgtaaatgatggtgacaaacagttgtttgatgggagtaaaggatgcagagatgacagtgcatagcagccaggatgttgcagcggtagtgaagagcagacacagcagaccacgatgaggcctgctactcagagccaggatgaccgtgaggcctgctactcagatgacagacacagatggcagacacagcagatcacgatgaggagatgttggtcccgcatcaggatgacattaaggctgcagccgatgaaacaccttgccgcggtgatagcgccagaacagccgtcgacggcttcaagctcctgcgtgtgtttatttgggcaacagaactagacgtggatcacaagcagccgcattgtttatttgggcaacagaactagacggcattgggccatgttgcctgggttcccaggttcgacggcttcaagctcctgcgggctacctgacgtttgggcaacagctagccgcattgtttatggacctggacgtccatgcacctggacacgtcttgccattgggccatgttgggtcgcttctaaaggcagtaaaatcattcaccaaggagtcgacgacacagctagctgatttgtctgctctgacgtgtatgtaagcaaatgttgtatcaggtcatgtttgtaaggtgtgggaaatgaagtctaggcttatgtagtgccacaagtgttacaacaaaaaacgtagcatgcgctcctctgattcgtcgacattatattatatattatatttattcatcgtcgttat

SEQ ID NO: 4070 - DNA, 2766 bp, Zea mays
  Clone ID: TF_ZmC2195_2
gggacgctcgcctccggcccggccggggtttccgctcgcaggcaggcacagcgccaagcggcgaccgagagtccgagacccattcccatccacgcgaccacgctgccgttctctccccttcctccccgtcgcttccattcccgtccctcacaatctcacccccgccagccgagccccaaccctaacgaaatttacacctgcttcgttggcgtgagcggtcttaggcgtcgggcgtcgctgctgtccagcggtgtcggatccgggtcccgcgccgttaggtcgaggtttcttcggcgacggtgcagccgctggatgttagtctggcagatcggggccgagctaggcagtgttgggttgtaacatttgtatcgcatgaatgaactcagagcatctcaatgttaaaactgttaaggggcagacctggtgccagaggctcccacatgagtgggttctagggaagggataatccgaagcaagccttccccctgcaaatgcagagatgcggctttgaacccgtgacctggtgactcagtgagacacctctcaccactgcaacaggcctgtccttcctcatcgttaaaactgagcatattaattcttcttcttaagcaatatgggagctaattgctgcattgctgcaaaggagaggacacagccgtgcatcactcctatagaagtatcggcatataggaatgtgaggcgctcgccatcatggaacattcgatgggacaatcgcacacatatagaagacataatggacattcctactctgttctccaatcatagtagtggaagcattcatcctcatacaaagagtggttccgttgctccaactgaagggttctctaatgggaatagccttggaactagcccttccaatgtgttccatggagcaaagtggcacaaatctgataaaaaaatggaagcacgcaaggttacaaagtctgattctcgagctaaccgctccacagcaagtaactcttctcctgagacaaagctttccaggaaatcactgcattggtcacctcgaggccggccgggaaggacttcattcgtcttccatgctatcagtctgcagcaatgacttgtcagcagcaggatcctatgctgagtcatctgatggttggtcaatgcgcacattttctgaaatggtcgcaacatcccaaagagagaggtggtcacttgatagcgaactcttgggatccatttctagtaaagtgacaagaactagtgcttcaaattctactacacttccccctgagcaagaggtgtgcaagctgtgcttgaagctgttgaaggagagatcaacatggaatgctcaggagctggccgttgttgctgttctgttgtgtggacatgtgtaccatgctgactgtctggacagcataactacagaagctgacaaatacgatccgccatgccctgtatgcacgcatggtgagaaatgtacagtgaagctatttgggaagctggaatccaaggttaagaacaagataccaaaaaatgtggcagctgatatcaatccagatgggaacagtaataagcaccagaagaaaggtagaagagagcccaggttaggtacaagctcaagcatgaaggtcccattcagtcgcccgtttttgaggagacatttctccattgggtctcgaccgcctcggtcagtctcagaaaccgattcgacgagaaagaagggattctgggcaagacattggagggagtagaatagcctccaattgccattaggtgggctggtttccattagtgtgttttggaagggtcttcgagaggaggtgaactccccagcatgcaagctcacggagttcagactggcacaagggctgccgtcctggcgggcaaccaacatatttggaagtttctcccagccataatattcggatactggtgcagagcgcacgctagcgccggtcccagcagatccattatagtagaataacaaggttttttataccatgcgagatacggttgttgtaggccctggttgcagcttagtaatagtagcaatctaacagaaacggtgtggccttcatggatgtaaggcccaatgctgggttacacaaccagcttgctagattatttattgtactcgatgttttttaatgatgattgactaaggtacttcgtattgttggatggaatgcgtttaatccgaagtcttcagtggtagccgagcaaccaacaaatttggaagtttttctcaaccatcgtattctgaaacatggtgcagagcgcacaacaaggtttcttataccatgcgaggcagggtcgttgtaggccccgcttgcatctaagtaatagtagaatcgatctaacagaaacggtgtggccttcctggatttaaggcccaatgatgggttataagattacacaaccagcatgctagattatttactggacccgcagtttttttaattattggctaaggaatttgttggtggttgatggaatgcgtttaatttaaaggctttagtggacctgaagaacttttcacccagattggctgcacttttcatccttgcgttcacatatactaaatctagacgcacgaaaaatctctctagttgatcacatatgacaagacgggtctcgggcacggctcccccaccgaggacggtatcatccactggtccctcagggaggctagaattcgggccaatgctcgcgaagagggtcgattcggaccatatggtcgcgaagtgctgctctattcagcatatctgaaaacaaagctcatcagtgacagcaaca

SEQ ID NO: 4071 - DNA, 529 bp, Zea mays
  Clone ID: TF_LIB3637-254-Q6-N6-D1
agttctgaaatagcgaagtcatgttcctcgccctccataacaactgaaattcagacatcagaacattatcatgagtaatacaggatcatttgcgtgatccctctctacaatctacatacacacaaaagggtgctttctaagctatactgctaccagcctccactcgcacacaacaccataaacctctctgagcgacacaacacaaaatattcaggatattagaaattacatgtcgccataggagcaccggattaactggcatgcccacaacagcgaattttacaacagtgaaactccatggtggttataagcttattctgaactaagggtttgtcgtcaggatcgtgaccgtatgttcgttcgacagtatgggcagtctgcacatttccgcgcccatggctccaagcatgtcgagtggaacctgtacccacagcgcaaccttatcagctcatctccatcgtaaaatccatcaaggcaaatagaacattcaggcgatgcctctctgctatcatctttgctagcctcaaaa

SEQ ID NO: 4072 - DNA, 743 bp, Zea mays
  Clone ID: TF_ZmC6487_3
ccaccccgcagcccgcctccgactcgcacctgcccctatgtcgcggcacgcgcctcctggtgctcgccgttccgacgcgcgtttcgccggaggactttgttcgcttctgcggcccccacctcgagtgtgcagccgacattcgtttcatcagggatgatggagtggaggaccggtacagcgttctagtggagtttgaggaccagagtagcgctgaatggttctacgccgatctcaatggctggaggttctcaacctctgagagtgaggtgtgccatgttctgtttatagctgctgtgcagtatacaccttcctcagaggttgccacaactccaccggctggatccactgaacttccaatgtgtcctgtttgcattgaaagattggatcaggacatcagtgggattttggcaactacttgtgatcactctttccgttgctcatgtgtttcagtgtggaccaattcatcctgtccggtatgccagttttgtcagaagcagtctgaaaattctacatgttctgtttgccaaaccactggaaacctctggatatgtgtgatatgtggttttgttggatgcggacggtatcaagaaggacatgcgaaacagcactggaaagatactcagcattgctattcgctagatttggaaacacaacgtgtttgggactttgttggtgacaggtttgtacatcggctgaatcaatccaagagtgacgcaaagcatgctaagttcaaatcaaaaagt

SEQ ID NO: 4073 - DNA, 2478 bp, Zea mays
  Clone ID: TF_ZmC2195_4
tattcggcacgaggaacgaagatgtcttataatttggaacctagggaatagattcctaaaggctacaagattatcatgtgcatttctattcgacaaataataataattccaatcatactggttcttttgatgatcttgttgtggatgccccttagcttcctctttgggggtgttttcttctgtctatgtggtacccctagctccctctgtaggcttagagtgcacatgtctatactacatactatcgtgtttaactttatactaagtttttgctcatttctttattgaagacgaccttattattgttattgtatccctgtacagctaggcagtgttgggttgtaaaatttgtatcgcgtgaatgaactcagagcatctcaatgttaaaactgtaaaaggggcagacctggtgccagaggctcccacatgagtgggttctagggaagggataatccgaagcaagcctcccccctgcaaatgcagagatgtggctttgaacccgtgacctggtgactcagtgagacacctctcaccactgcaacgggcgtgtccttcctcagcgttaaaactgagcatattaattcccctgcttaagcaatatgggagctaattgctgcgttgctgcaaaggagaggacacagccgtgcatcactcctatagaagtatcgacatacaggaatgtgaggcgctcgccatcatggaacattcgatgggacaatcgcacacatatagaagacataatggatattcctactctgttctccaaccatagtagtggaagcattcatcctgatacaaagagtggttccattgctccaactgaagggttctctaatggaaatagccttggaactagcccttccaatgtgttccatggagcaaagtggcacaaatctgataaaaaaatggaagcacgcaaggttacaaagtctgattctcgagctgatcgctccacagcaagtaactcttctcctgagacaaagctttccaggaaatcactggacatatcaagtgttgcttcagatttgaagacttcagtgtctgttccttcaacgccacccttagtatccagagcagatccgtcatcctccaaggggcattctcaacctacagattcagatttgatgaagaaagcatggcggtcaccagggtatcaattatacagacaggtttcggacagtaaaattccatctctcagatctctcaatgagataaggtctcctgaaggaaggcctccctcttccatgttatcagcctgcagcaacgacttgtcagcagcaggatcctatggtgagtcatccgatggttggtcaatgcgcacattttctgaaatggtctcaacatcccaaagagagaggtggtcacttgacagtgagctcttgggatccatttctagtaaaatgacaagatcaagtgcttcgagttctactacacgcccccctgaccaagacgtgtgcaagctgtgtttaaagctgctaaaggagagatcgacatggaacgcgcaggagctggctgttgttgctgttttgttgtgtggacatgcataccatgctgactgtctggacagcataactacagaagctgacaaatatgatcctccatgccctgtgtgcacgcacggtgagaaattttcagtgaagctatttgggaagctggaatcaaagatcaagaacaagataccaaaaaatgtgtcagttgatattaatctagatgggaatagtagtaataagcaccagaagaaaggtagaagagagcccaggttaggtacaagttcaagcatgaaggtcccatttagtcgtccatttttgaggagacatttctccattggatctcgaccacctcggtcggtctcagaaactgattccacaagaaagaagggattctgggcaagacactgggagagagtagaatagaatccaattgtcgttaggtgggttggtctcaattattatgttttggtaagttcaatttcatatagcagattactagtcctattccttttgtcatcatggaacagtttaaagcaggttactaaaattcaaactagtgtcgaatttggaatgtcatgtcatctctgaacagtttaaagccgacaatagcatgattaattgaatttgtgttctttccacaggaaggatctttaagaagaggtgaactcctcagcatgcaagctagtggaggtgaactccccagtatacaagggctgccgagcaaccaacatatttggaagtttctctcagccatcgtattctgatactggtgcagagcgcacaacaaggtttcttataccatgcgaggcagggtcgttgtaggccccgcttgcatctaagtaatagtagtatcgatctaacagaaacggtgtggccttcctggatttaaggcccaatgctgggttataagattacacaaccagcatgctagattatttactgtacccgcagtttttttaattattggctaaggtatttgttggtggtt

SEQ ID NO: 4074 - DNA, 2418 bp, Zea mays
  Clone ID: TF_ZmC2195_5
ttggccctcgccggccggggcccttctctccccttcctctctcctctgcgtcgcttccacctctcaatctcaccccacgcctgccccgagctccaaccctaaaggaacacacccctgcttgcggcggcggggagcggtcttgggcgtccgccgttgctgtggcccagccgtgacagatccgggccccgcgccgttaggtcggtgtttcttcggcgacggtgcagccgctggatgttagtctggcggatcggggctcgttgttcgcgtgattcgaggcggtgttgagttgtgacatttgtatcacatgaatgaactcagagcatctcattgttaaaactgtgagcatatcaattcccctcctttaagcaatatgggagctaattgctgcattgctgcaaaggagaggacacaaccatgcattactccattagaagtatcagcgtacaggaatgtgagacattcaccatcatggagctttcggtgggacaatcgcacacatatagaagacataatggaaatccctactctgttttccaaccatagtagtggaagcattcggcctgatacaaagagtggttccattgccagccgtgcatcactcctatagaagtatcggcatataggaatgtgaggcgctcgccatcatggaacattcgatgggacaatcgcacacatatagaagacataatggacattcctactctgttctccaatcatagtagtggaagcattcatcctcatacaaagagtggttccgttgctccaactgaagggttctctaatgggaatagccttggaactagcccttccaatgtgttccatggagcaaagtggcacaaatctgataaaaaaatggaagcacgcaaggttacaaagtctgattctcgagctaaccgctccacagcaagtaactcttctcctgagacaaagctttccaggaaatcactggacatatcaagtgttgcttcagatttgaagacttcagtgtctgttccttcaacgccacccttagtatccagagcagatccatcatcctccaaggggcattctcaacctacagattcagattcgatgaagaaagcatggcggtcaccagggtatcaattatacagacaggtttcggacagtaaaattccatctctcagatctcttaatgagataaggtctcctgaaggaaggcctccctcttccatgttatcagcctgcagcaatgacttgtcagcagcaggatcctatggtgagtcatccgatggttggtcaatgcgcacattttctgaaatggtctcaacatcccaaagagagaggtggtcacttgacagtgagctcgcgggatccatttctagtaaaatgacaagatcaagtgcttggagttctactacatgcccccctgaccaagacgggtgcaagctgtgtttaaagctgctaaaggagagatcgacatggaacgctcaggagctggctgttgttgctgttttgttgtgtggacatgcataccatgctgactgtctggacagcataactacagaagctgacaaatatgatcctccatgccctgtgtgcacgcatggtgagaaatgtacagtgaagctatttgggaagctggaatcaaagatcaagaacaagataccaaaaaatgtggcagttgatattaatctagatgggaatagtagtaataagcaccagaagaaaggtagaagagagcccaggttaggtacaagttcaagcatgaaggtgccatttagtcgtccatttttgaggagacatttctccattggatctcgaccacctcggtcggtctcagaaactgattccacgagaaagaagggattctgggcaaggcactgggagagagtagaatagaatccaattgtcgttaggtgggttggtctcaattattatgttttggaaggatctttaagaagagttgaactccccagcatacaagggctgccgagcaaccaacatatttggaagtttctctcagccatcgtattctgatactggtgcagagcgcacaacaaggtttcttataccatgcgaggcagggtcgttgtaggccccgcttgcatctaagtaatagtagtatcgatctaacagaaacggtgtggccttcctggatttaaggcacaatgctgggttataagattacacaaccagcatgctagattattcgccttcctggatttaaggcccaatgctgggttataagattacacaaccagcatgctagattatttactgtacctgcagtttttttaatgattggctaaggtatttgttgttgattgatggaatgcgtttaagttgaaggcttcagtggtactgtagaacttttcgatcagattggctgaactgatcatccttccgttcacatatactaaatatagacacatttacagggtgtttggtttgaggagt

SEQ ID NO: 4075 - DNA, 470 bp, Zea mays
  Clone ID: TF_LIB3059-040-Q1-K1-D9
ggaattcccgggtcgacgcacgcgtccgcccacgcgtccgggatcaattagtgttggacatatgtgtcatatgccttgagcaagaggacaatgctgtttttgtgccgtgtggtcacatgtgttgctgtatggcatgctcttcacatttgacgaactgcccactttgccggagaagaattgaccaagctgtcagaaccttccgccattgatggtgatatatgatgcaaaaaactggcatggtaccaccacatgtactgcttctgaaaccaatttgttcttggaacttggaagtgctggctgctatcaaccaacgacatgaactgcaatactgggacgaagcagcttcaatgagtttgctttttgaacagaacagtgagtgatgcaagttgcaagctcataattggcagttgagatactctcactccctagatagtgccaatgggtgctcttgcctgtaatgtactacaact

SEQ ID NO: 4076 - DNA, 1166 bp, Zea mays
  Clone ID: TF_ZmC71625_2
aaaaaaaaaaaacaaaaaaaaaaaaaaaaaaaaaaaaaaaaaaaaaactcgtcatgcgcatggccgccgaccgccaagccgagctccaccgcctctcgcagcaccgcgccgtctctgactttccgcatcgcaacagaatccatgcgctgctccggggtcggtttctgcgcaacagcggtttaccagaggagaggaggcccccatctgtggccgcaagggagcttggccagctgcggcaaaggcatcctgtctctgtttgaggaatgggaggctatcaatgatttaagagctgatatggctagacttcagcaaggcatgagccatatgcaaaggatgttggaagcttgcatggatatgcagctagagttgcagcgttctgtaaggcaagaagtatcagcagccttgaatcgtttcattggggagcaaggtggtgaaagtaaagaaataatcgatgatggatcgaaatggataaatgtgagaaaagggacctgctgcatatgctgtgagactccgattgactcccttctgtacagatgtgggcacatgtgcacttgctcgaaatgcgcaaacgaattggttcgaggtggagggaaatgcccgttgtgccgcgcacccataatcgaggtcatccgagcatacttcatcatgtagatacaaaaggaagacagcaagaagatagaagaggcccaaattgtttttggtctgtgtggagtcgttagcgggttgtgtattcaattttgttcattctctctaatgcgtttggttaagtttttttccggcttcatttcgttttggtctgcttgccctattgtaagtaatgtacggttttgggtgtggcggcaggacgggaaggtggtcttctctcattaggacttgggtcactgctaattatgttccacaacgactaatggggttggaggttgtcgaaacacgagatgaggaaacttttggtatctttttgttcgtgtagcaccagcaaagtgcggcttggtcgcttcagtgtttcgtgtgattttgttgttggtcttggctatgtggtcatgatattttaggcttctagtttgcagatggatgtaaaagtggtactttgttgtcatgggcgatgctatttcctggatgtttgctttttctttccgccatagtacaccagatcactctcccgccta

SEQ ID NO: 4077 - DNA, 1056 bp, Zea mays
  Clone ID: TF_ZmC93126_1
gttttgaatggaattacttagcgtgtcaagtcttcttagtaatggctttggtgaaagtttggagcgattggagcgattaataaggtcatatcgtgaacagcgtggccatggtcccctcaactggaatcttgatccccccatgcacccttcaaatggaccaaatgcaaatcaggaacaagatgggaaacctgaatctcagcaatcgcaggctcctgtcaatcttgttatccctcctccacctttgccaccgcgtccaccattatggcacagtgagctgcgtcataacaactggagcagcagacacagggaatgggatgctattaatgatttaagagctgacatgggtagacttcagcaagggatgagcagcatgcagaggatgctggaagcgtgcatggacatgcagctggaattgcagcgttctgtgagacaagaagtgtcagctgccttgaatcgatttgcaggacctgaaggattctcgatggatctgtctgacgatggatcaaaatgcaatcaagtgaggaaaggaacctgctgcatatgctgcgatacgcaaatcgattctctactgtacaggtgtggacacatgtgtacttgctcgaaatgtgcaaatgagctggtgcgcagcggtggcaagtgcccgctctgccgggctcccatcgtggaggtggtccgcgcatactcagtattgtaaggtggtggaagatacagtcagtaggaaagggaataagttgacggcaagcgaagttttgctgcaagtgaagaaaagcttgtttaggaaatggaccccctcccaatcccccaaaaaagaactctgtttttcctcctttgtgaatctataggggaggctacttacgttgcctgcatattcgttgccttgctgctcgtgtcgccgagacgcaggcggcaaagggcgtgccattaatttttggaagagcttgcgttgggaagtggtgtccccagtgcaagctgtttcactgtatatttatacactgactgatcctcaactgaagcagacaccagcaatgcattggtatataccaggttccttgagcc

SEQ ID NO: 4078 - DNA, 523 bp, Zea mays
  unsure (1)..(523): unsure at all n locations
  Clone ID: TF_LIB4301-007-Q1-K1-E2
cggtccggacctccgggtcgcccccgcgtccgcgccacgcagaccgggcccgcctcgccggaggcggcgaaggaggaggaggaggtggtggaggaggaggacgacgaggagggggggaggaggatggggganagcagccgcggcgggagcgggagcgggagcggcggaggcggaggcggaggaagcgggaggcggcggcggcggcgagcgaggtggngatggngaagcgggagctcctcgcccgctgcatgacgngcccgctctgccgccgcatcctccgcgacgccaccaccgtctccgagtgcctccacaccttttgtagaaagtgtatctataagaagattaatgatgaagagctagagcactgtccagtctgtaaaattgatcttggctgtgctcccctcgagaagcttaaagctgatcacaatatacaagatgtgagggcaaaaatattttccttgaaaagaaagaagggtaatgctgaaaaaggtgaatctcctattgcgccgcctgcttaaaggaa

SEQ ID NO: 4079 - DNA, 2065 bp, Zea mays
  Clone ID: TF_ZmC30542_1
ccctttctccggttctagatcgcgagcggccgctcgcgatctagcattgggacctcgagccggccgggaagcgttgcgcccgtcgagaaataaaaagaaaaaaaaaaaaaaaaaagagaggaaaaggggacaaaccaccaacaacaaccagaatatcgcatcgccgtcgcgtcgtcgtcgatctccccgccccgcccgcgccgcggaatctgacacatctctctaatctctcctaggaccgggtgcccttacatccacgccgcaacgcaaatcgccgtccgagccctcgcggtctctcgtctccccgtgcgagaggacgccggcagcagcggcgtgccagtgcggtggcttggtgggggaagaccggaggcggcggcagagctcgcgcccagaggtgcacggcaggcctgttctcggcgtcggctgggggaaggcgagtagccgcgggaaggacgagtgaataatcatgagctcgatctgccctttcgcgggagccaccactggtggtggtgtatgccctgtgaaatctgataagagcaacactggggtgtgccctgcaaaatctgacaagagcatcagtggtgtatgccctgtcactggcaaggatcatggtagcaagctcaaggaaagtggtgatcatggtgaagaaaagggcaccgatcctcgtgtcgtaccagcaaaatgcccattcggctatgactccaacactttcaagctgggtccgcttagctgcattgtctgccaggcactactccatgaaagtagcaaatgcaagccgtgtgcccataaattttgcaaggcatgtatatcacgctttaaagactgcccactatgtggtgctgatatagagggtattgagcctgatgcggaacttcaagctcttgttgaccgcttcattgatggtcatgccagaatcaagcgatcacatgctgcaggggatgtggaagcagcagatggcaagaacaaagtcatatatgaggatgtttccatggagagaggggcttttctggtgcagcaagctatgagggcttttcgtgcccgaaacattgaaagtgcaaagtcaaggctcactatgtgtgcagacgacatcagggaggagttaaaatcttcagaagataacttagacctatgttcacagcttggagctgtgttaggaatgcttggggactgctgtcggaccttgggagatgttcctgcagcaatcacctactatgaagaaagtgctgagttcctctcaaagccccctgcaaaagatcttgagctggttcatactctctctgtttcactaaataaaatcggtgaccttcgctactatgatggcgacctccaatctgcaagaaactattatgcccgttcattggatgttcgcagaaatgcagtaaaagaacactctgctgtggcttcccaggtcattgatctagcaacttctcttgcaaaagttgcggatgtggatagaaatcttggtaacgaaagtaccgcagttgagggttttgaggaagcaattcgatgccttgagaagttgaagctggattctgaacaaactagcctcgaacagcggcgcctctcggttctcgacttcctgcacaaccagttggccgataagtaagacatagtcttctcctaagaatgcacaaccagcagatgtctcctcatggtaatgttcaactctactacataagttccctttggaaggagttggtctagaagcagcgatgagtgtgtgtttaccatcgtttgaaactttgtcacggcacaaaataagagctcctgcactgtaaatgtaatcatatatatgctcatcgagtattcttgatgattgccgatatggtttagtagtctaagcactctggtttgtcaatgtcatagcctggagcagcgcataagatgttagttaacttgtggcaagtaccatctcgctttgaagtgtcatgtgtgaagacctatcctgttgtatatttgacaataagacagggaggtagtaatcaaaaccgtggccgtcgtttctcatacgaaaaaaaaaaaaaaaaaaaaaaaaaaaaaaaagcgctctagtctctcctcgtgc

SEQ ID NO: 4080 - DNA, 898 bp, Zea mays
  unsure (1)..(898): unsure at all n locations
  Clone ID: TF_ZmC30542_2
aaaaaaagagaggaaaaggggacaaaccaccaacaacaaccagaatatcgcatcgccgtcgcgtcgtcgtcgatctccccgccccgccccgcccgcgccgcggaatctgacacatctccctaatctctcctaggaccgggtgcccttacatccacgccgcaacgcaaatcgccgtccgagccctcgcggtctctcgtctccccgtgcgagaggacgccggcagcagcggcgtgccagtgcggtggcttggtgggggaagaccggaggcggcggcagagctcgcgcccagagggaaggacgagtgaataatcatgagctcgatctgccctttcgcgggagccaccactggtggtggtgtatgccctgtgaaatctgataagagcaacactggggtgtgccctgcaaaatctgacaagagcatcagtggtgtatgccctgtcactggcaaggatcatggtagcaagctcaaggaaagtggtgatcatggtgaagaaaagggcaccgatcctcgtgtcgtaccagcaaaatgcccattcggctatgactccaacactttcaagctgggtccgcttagctgcattgtctgccaggcactactccatgaaagtagcaaatgcaagccgtgtgcccataaattttgcaaggcatgtatatcacgctttaaagactgcccactatgtggtgctgatatagagggtattgagcctgatgcggaacttcaagctcttgttgaccgcttcattgatggtcatgccagaatcaagcgatcacatgctgcaggggatgtggaagcagcagatggcaagaacaaagtcatatatgaggatgtttcatgggagagaggggtttttctggtgcagcaagctatngagggcttttcgtgcccgaaacattgaaa

SEQ ID NO: 4081 - DNA, 836 bp, Zea mays
  unsure (1)..(836): unsure at all n locations
  Clone ID: TF_ZmC30542_3
ggtaccctccgggtcgggcgggatatcgcatcgccgtcgcgtcgccgtcgacgggcccgccccgcccgcgccgcggaatctgacacatctccctaatctctcctaggaccgggtgcccttacatccacgccgcaacgcaaatcgccgtccgagccctcgcggtctctcgtctccccgtgcgagaggacgccggcagcagcggcgtgccagtgcggtggcttggtgggggaagaccggaggcggcggcagagctcgcgcccagaggtgcacggcaggcctgttctcggcgtcggctgggggaaggcgagtagccccggtgggtgattctcgccctctcccacctggtttggaatcgaattgaaggaaggacgagtgaataatcatgagctcgatctgccctttcgcgggagccaccactggtggtggtgtatgccctgtgaaatctgataagagcaacactggggtgtgccctgcaaaatctgacaagagcatcagtggtgtatgccctgtcactggcaaggatcatggtagcaagctcaaggaaagtggtgatcatggtgaagaaaagggcaccgatcctcgtgtcgtaccagcaaaatgcccattcggctatgactccaacactttcaagctgggtccgcttagctgcattgtctgccaggcactactccatgaaagtagcaaatgcaagccgtgtgcccataaattctgcaaggcatgtatatcacgctttaaagactgcccactatgtggtgctgatatagagggtattgagcctgatgcggaactcaagctcttgntgaccgctcattgatggtcatgccagaatcagcgat

SEQ ID NO: 4082 - DNA, 1626 bp, Zea mays
  Clone ID: TF_ZmC28824_1
caagggttcctgggtttctcagtctttgactgagagcttctttgtgcaataccatggtgcggtttttcctcaccggccgagtatctgtttttgaaggtagggtttgtacttttcttcttttttaacaaagagataaattgctcgcctttgtgttccagaagaaaaatctcagcaattgtcaaacttcagtttttagttaaggttaatagataccaaacaaaggatactatactattgtttaatacatcgtatattatttggctagtgccagcctttgggctatagaatcctctaccaaataagtagcagatttatttggatggaaggagtgtatctcttattaaatacatacgacaaacatttaaggaacgaacgtcacaaggttatcaatagtaagcttgactgaccttgagttgaacaaaaactttcatgaagacgtatctttggcaatgaattggacaggtaaggttcaagaacacttcagctaaataaatgagtagagttaacatatatctttctcaagggatgggggactaggggagtcactagcattgattgtgcaccttgaatccctttcttttcttatataaggaggtatcctctacactaaactacgaacaagtatcagagacactctctgtcaggtgtctgcaatggacaacctcaaaacccattctgaatatgccgatcaacctcaggggccacaagcaaatgccgtttctttcgctttaccaacaggtcaggtcttagacttagatagtcatatgattggccaacagcacacgaatctgtcatcattctggttctcccttgagcagcacaggctgcagttggatcaggcccttcaactccataaccaacagttgcaggtgtcactgcagcagcaaatatctatgcagaactcaactctactgaaccttgtggaatctatgacaagagatgtgctgatgcaaaagaatgatgagatagccagcctgcgagtagagttgcagaggaaccaagaggatctagaaacaacactgcatgacagagatgagtggatgaaggtcgctatggccgcttatgaaattaatcagacacttatccgcatgcttcgtaccgtgcagctggaagcgaattctcatgtttcatctaatgatctagatgctccaagttatagtgaagcatcgagcatggcgaggacagcattggagacagcacagcccaatctgatctgcaaggtctgcaactctggtaatgccggcgtacttatgttgccatgccaacacctctgtgcatgtaagccgtgcgtagcctggcttgcgacatgtcctatctgtggtgctgtgaagactgatgctatcgaggctcgatttgtttataagaagtaaaaacgccaaagcagcaatccgaattcgtttataagagcatgtcagctttcctttttttcgtgttaggtgttataggctgtagccttgttctgttatgcattctggtataatgttctggtagtcttcatgccgatgccatgtttttggattctcaaaatgttttgatatagttgccacgttgtcttcggttaaaaaaaaaaaaaaaaaaaaaaaaaaaaaaaaaaaaaaaaaaaaaaaaaaaaaactcgagagaggg

SEQ ID NO: 4083 - DNA, 2064 bp, Zea mays
  Clone ID: TF_ZmC3545_1
ttttaaaaaaaaaaaaaaaaaaaaaaaataaaaaagataggactctggctctccttttcccctttctcccgttcacctttctctcttcctttttctttcccctccctccccctttctttcctcctggcgacgactgggcgagtgccgccgaacttcgccaggtcttcgccggcgacgagcacctacaaggtgacactattccttttcttcactcggtgtataatctctctttgctccgatcaagcttttcaaacataataagcaaatagtctctgcacgtgattgccaaaattagtcaagacgggtgctctttgctgcgtggccgctaggccacatgggacaaagtctgaccctgctagcagagatcgttctatggatcctactgagcctcgttggcgcataaattcgagcttttctcccccaacatcaaggagatgggattgccgctattcatcagatggattgccccacagagttcatgatgctcctcatgatcacccgccatatgtttcatcactatcatcccatagcaaaggaagcagaagtgcatttggcagtgatcagtacctcaatcatcatcattctgcatctgatggagcactttcttactttgggagtccagctgacagccttcaggccccacgctggacaccctctcttcaaagatttgatctcggtgaattctctacccctgcaggaggatcaagaccagaaacttctgattatcctcagtcaagtgagaggccactgactgccacaagcagtttcagttctgcatccccattttcggaatcaagccagctagcttcgtctagtaaacaagcggccccatatctacctcgcaaccatatgggcaggcggtctttcatgtctaaaccagtctacccacttgtcttccggaatcctgtgtccgaatcagaagcgtgcaggatgcttgaggttagtaatgccgggcgagcgacaccaagtgatgacagccaggcttctcctctgtggcgtcgcagcttggcgagcccagagctcaagttccataatgcactgaacgaacttgggaagatggaggtttcacctgaacggaacacgagctcaagaagggaagggttcagatggagcaacgccagcagttatgactttggatacgatggagatgccattgacatttcagatcatatcagcatcgagtcccagagatctcccacgagctcagcgaggttcctgaagtgtgggctgtgcgagagattcctgcaccagaaatcaccctggacctcgaacaggattgttcgaaacgccgacatgccagtggcagcagttctgccttgccgacatgtcttccacgcggattgcttggaggaaagcactgccaagacagaagtccatgaaccaccttgccccctgtgcgcgcgagccactgacgatgaagggcacgtgtcgttctcagaacctctgcatgttgccctccgatctgctcgcaggaaccttttgttgggcactggtgctggtgggaacagcggcatttctgaccctcctcgcactgatcgtggcttgaagaggaacaactctgcagtcatgcctaggcgcagcggcggcgcattgttccgcaatcgcttcaagaaacagttccccttcaaagcgaggatcgggaaggagctctttggcggtagggttctcaacaaggttggattgtctttgtcttcaggtcagcatgatgatcatcgacagcaagcgccaaagcatgaccggcccatgaagtagctagatcttagtggcacagagtataatatgttgtgtgccctcctgatattttatctatggcatctgttatcgaaacttggcatccatgcgcagcagtcgtccaagatgggggccctgtatggattatggaaggctgcttgcattgcgtgtaacagtagcaccttgccattgcatgtattttgcatgtagcacagtaagaatctatgccctgtgattgatatgttctgaatgttccgcttgatctgttcacaatggctgcttgcatagcgtgttacccccagcaattggaggaatagccttgatgaccattcc

SEQ ID NO: 4084 - DNA, 729 bp, Zea mays
  Clone ID: TF_ZmC223_6
cccacgcgtccggggttctaagggacctgtaaatgcttgtgccctatattgtgtgcctccacatattggggagcttgaagcatcgacaagttactagtcattgcttacttatataagaacatatttttgatttgcggttgtcaagttggccttgccccacagactttcgtatgctgcatatgcaactgttcactttctaaagaaggtgctatttcagccgtacgtttgttcagttgcgggcatgcaacacatcttcagtgtgagtctgagcagaccaggtcatccaatcaggaatccaaagagggatgccctgtttgtctctcaatgagtgatacgcaagctcgaagcaaatcacctatgtttgagaatgggctaatgaagtattctggggctgaacatgaagtgtcacatggcatgtatcagattcatgaagttgatcatgctgagagatctcgtgggcttcaacagatgtcacggtatgaaatactgaataatcttcagaaagcgcagaagtcctttcatatagaaaccgtacctccattgaaacttgcaccgccagctatataccatgagaagatacagaagaggaccacttcggttggtgaaactagcaaacattctgttagaagtcagaaaccccagaaaatttggcaaatgaaggagaaaaaatcaaaagaggctgggagtcatcatccacaaaagtcaagttttctacgttaatagaagaaa

SEQ ID NO: 4085 - DNA, 785 bp, Zea mays
  Clone ID: TF_ZmC35583_2
aagaaaaagtttgacgaggcaaagaaaaaaggaactgtctttggaaaacgttctagcaggcatgtgggttcttgttgctaagttaaaaagaggggctttaggcatatccgattttaatgttgatgatcgaactgttaacctagctgatataactaatggcacaaaggaaaacaaaggtgaaaagaattttgctctagttgagaagcaagtttcagaagattctgtgaagtcgctgagcacagaagaacatagaagtccagagtttgaaccacttcttgttcgtctgaaggctaaaattcaggagatgaaggaaaaggacactgatcccctgagcgataaagatgggaactcacatgtctgcaaagtttgcttcgaatctgcaaccgctgcagtattgcttccttgccggcatttttgcttgtgcaagccttgctcgcttgcctgttcagagtgccctctgtgccgcacaagaatagcagacaggataatcacattcacatgaacggcgtgctagcttcaggctattctgaagcatggcgcactcttgtaaaatggtcggtggtatatgtttctcttttttccttagcaaagaaggtgccttttatgttccttctgtgttgtatcgccattctttgggttcccctatatggctatatagcttcaccttacgttctttatcaaggagttgcaaacgatgagaccccattggaatgcaggaattgtacaggaatttcacaaaagttcattttcatagaaaaaacacaacaaacaggcacaccccaaaa

SEQ ID NO: 4086 - DNA, 585 bp, Zea mays
  Clone ID: TF_ZmC35583_3
agtcgctgagcccagaagaacatagaagtccagagtttgaaccacttcttgtttgtttgaaggcaaaaattcaggagatgaaggaaaaggcccctgatcccctgagcgataaagatgggaactcacatgtttgcaaagtttgcttcgaatctgcaaccgctgcagtattgcttccttgccggcatttttgcttgtgcaagccttgctcgcttgcctgttcagagtgccctctgtgccgcacaagaatagcagacaggataatcacgttcacatgaacggcgtgctagcttcaggtgccaaacacttagatgcttgcatgttggtgctcatgccaacgctatccctctgaaatgtacctaatgatgtgctgtgtatctctgacaggccattttgaagcatggcgcactcttgtaaaatgggcggtggtatatgtttctcttttttccttagcaaagaaggtgccttttatgttccttctgtgttgtatcgccattctttgggttcccctatatggctatatagcttcaccttacgttctttatcaaggagctgcaaacgatgagaccccaaaaacccccccccaaa

SEQ ID NO: 4087 - DNA, 875 bp, Zea mays
  Clone ID: TF_ZmC552193_1
ggtacattgcgagcctcgaggccggccgggaaaacgtccacgcactcacgttaaggcgcacgcttctccgcaaccttcccagcactttcccctccgtctccagcgcctggtctccgcctcccgcgcgcgcccgatgcagatgccgccgtcgcggccgatctgacgccatcggtcgccggccatgaggcctcgccgccgggccctcttcccgttgcacagcgcaggcgctggggcctgcggtgacccgtgggccgactgccagacaccaccgccggttcccagcactcctgattccggccctggcccttccccatcgctgcctccctatggcgatctaccgtgccctcccgttttgtcgccgtcgccgtctccgtcgcctgctcccgcgcataacggtaggaggaaccagggagggacgcagggatacgggcccccacccggtgcaggcgaccacgaccgacggcacctcgtcaaatacgcgctcatcgccgccggggtgttcgccttcgtatgcctgatcctgctcggcgtctcggtggccgtgcggcgccggcaggtccggcggaggcggcaggcgctcctcgcaccgcctatcccattccccgagggcgcggcgaacgtcggcggcggcggcgggcacgaccacgggtgggacggcgcagccggggtggtgcaccacgtctggaacatccggaccgtggggctcgacgaggcgtccatcagttccatcgccgccacgcggtaccgcgccggggcggggctcctgggcgcggctgactgctccgtctgcctcggcgagttccaggacggcgagctcgtgcgcctgctgcccaagtgcgcgcacgcgttccacgtcccctgcatcgacacctggc

SEQ ID NO: 4088 - DNA, 785 bp, Zea mays
  Clone ID: TF_LIB4738-102-Q1-K1-D9
agtcgccacgcgcactcaccgctatcttgatgattgtgtctgtctcgctctcgctgctccgttcctgttcttccgctccttctccccacctcgttttggctgatcaaagttcttgttcgcgaacactttcctctgcctgacactctgagttcttggttaatgagcctgtatagacccatcggccatcaccagttcactactcgccaatcgacatgtcaggacagagctcaagctcctatggtgacactgatcctggcacagacagggcatacagcaccacctccagcagcatccggtggggtccgcacggccgcggcatgacggcctgcctcgtcgtcgtcaatgtcgtgctcgtcgccctcgtctacctctacttctggagggtgttctcccgcagaagcgccgcgtccccctcagcagctaaccccacggaccacgacgacgatgcgtcttccacatcgacgccgccgtcgccgctatcgtcccaggaccagcacggtcgcatcgtggcgtcgctgccgacgttcgtcgtgcgctccgggtccggcgccggcgccgagtgtgcggtgtgcatcgcggagctgcgggacggcgacgaagggcgcgcgctgccgcggtgcgggcaccggttccacgcggcgtgcgtcgacgcttggctgcggctatagatggccaaacgggcccgtgctaaatgggccggcactaagcacggcacggcccatagtgcttcggcacgacacgggcacgattcatatagtgccagtggcggcacgacacgagtctag

SEQ ID NO: 4089 - DNA, 1298 bp, Zea mays
  Clone ID: TF_ZmC35583_1
ggagcctttttgtagaggacatgaaaatagagcttcaggtcagaagacatagggaggctgctttggaagctgctttggcagagaaggagcttctgcgaggaagaggacattgatccctgaccgataaagatgggaactcacatgtctgcaaagtttgtttcgaatcggcaaacgaaaaagaactgcctctggaaaaggatttatcaggcatgtgggttcttgttgctacgtggaaaagaggggctttaggcatatctgatttgaatgttgatgatcgaactgttaacctagctgatataactaatagcacaaaggaaaacaaaggtggaaagaattttgctctagttgagaagcaagcatcagaagattctgtgaagtcactgagttcagaagaacatacaagtccggagtttgaaccacttcttgttcgtctgaaggctaaaattcaggagatgaaggaaaaggacattgatcccctgaccgataaagatgggaactcacatgtctgcaaagtttgtttcgaatctgcagccgctgcagtattgcttccttgccggcatttctgcttgtgcaagccttgctcgcttgcctgctcggagtgccctctgtgccgcacaagaatcgcagacaggataatcaccttcacgtgagctgcgttctagcttcaggtcattctgaagcacacatcctcttgtaaaatcttcaatggtatatgtttctctttttccttagcaaagaaggtgccttttatgttccttctgtgttgtatcgccattctttgggttccccttcccctatagcttcacgccttcaccttacgttctttgttgtatcgaggagttacaaatgatgacttctcgctctgcaaatatgtatagatacgcaactcgacgctgtaacacattttgattctctactcctgaagaaaagcagcgaacgacatgatgacgtgtgtaaaaaaaaaaaaaaaaaaaaaaaaaaaaaaaaaaaaaaaaaaaaaaaaaaaaaaaaaaaaaaaaaaaaaaaaaaaaaaaaaaaacaaaaaagaaaaaaaaaaaaaataaagacaaaacatattaagaaaacctatctcaagaaaaaaaaaaaggtggggccgggtttataagggtccaaagtttactgccatgctccttgacaataaaatttttttttttggggacgcaaaataaaaatagaggggcggatatttaaaaaatgcgaagggggaaaaaccccgggtccccaaaaattaatcacctggacaaaaatcccttttttcaccgggtgttttaactaaa

SEQ ID NO: 4090 - DNA, 1367 bp, Zea mays
  Clone ID: TF_ZmC9878_2
aattcattgtcattaattttttgaaaacattcttttagaaataaacaaaaatatttgaatgttggactatagctgatataacgctatgcacattgatgtataaccatgagttactttcagatacaatggttcgccaagctgcaatggctgtcaagtgcatgctgcttctgtactacaagaactgcagaggtcgtaactaccgtagacagggccaaatgttaacccttgtggagtaccttctgcttctttatcgtgctttgttgccaacttctgtttggtatcgtttctttctgaacaaggaatatgggagtctcttctcatctttaaccactggactgtatctgactttcaagttgacttcggtagttgaaaaggttcagtcattcttggccgcggtgaaagcactgtcacgtaaagatgtgcattatgggtcttatgcgactgcagaacagagttttagagctcatgctcgtctttcaactcaagagctagatttaggactaccactaggaccggtgctgggaggaagacatggagctcccaacatcggtgtaggcgagcgcgaagaggaatattctgaagcaggtatagagaggtcatacgtggagaatgggcccagagccggagttgtcgagggccgtgatggtgttggaacggagccgagttcccttagtgagctcctcaagaaggtcattgcgaaccttgtcaatgccatcacattttggatatcttggagcacgctggcatgctggactcttaagccatgtgcgacatcggtggacacacatgccaaggtctttggtgacggtgccactctcagcgacaccactgcctatcatagtcttgacaacgctcttaagtatctcaccttcacttcacttgacctgacatcacatatggtgttcaataggtctctctacatgaacgatcctcgggagtcgcacctgagcatggtcaagcggattcttcggtacttgctgctggtgatatgtgtgccatttgccaggagaagatgcatgtgcctgttctccttcgctgtaaacatattttctgtgaagactgtgtttccgaatgaggtacaatgctcacgtgcatattttaaatctgggatattcatctcacattcaaaggcagcatccattttttacgaagaaccccttccaccaaaattttacgaggaaccccttatgggtgttgtcattgaatggccttatcattttgtgaagaagcatttggatcgcgattcattaccacccctacgtgtgagttatcttaggacaaggtgcttcatgggggagcgaggggtgcttgacaggagtgaggtcaagccttgctaccctggagctgagagtgaaagagataaataa

SEQ ID NO: 4091 - DNA, 1279 bp, Zea mays
  unsure (1)..(1279): unsure at all n locations
  Clone ID: TF_ZmC11832_1
cctcgnagccggacgcgtgggtcctgccccgccaccacgccgcggcagcacaactgcacaagccctcctcagatctcaatcccggcgctccctccctccctccctcctcgcctcgggacagcgagcgccgccgtccgccgtccatggagcacgacgccgaggcgcgccgcgggttcgccaggatgggcttcgggtgcaagcactaccggaggcgatgccggatccgcgcgccctgctgcggcgacgtcttccactgccgccattgccacaacgagtccacgaaagacgggcacgagctggatcggcacgacgtccaatcggttatctgcctcgtctgtgacaccgagcagccgatcgcgcaggtgtgctgcaactgcggcgtctgcatgggggagtacttctgcgcagcctgcaacttcttggacgatgacgttgacaaggagcagttccattgccacgattgcggcatctgcagagtaggaggaaaggagaacttcttccactgccaaaagtgtggatcctgctactcgacgacccttcgcgacaggcactgctgcatcgagaactcgatgaagaacaactgccccatctgctacgaggcagtacctgttcgattcgctgagggagacgtcggtgctccgctgcggccacaccatgcacctgcagtgcttccacgagatgttgaagcacgacaagttctcgtgccccatatgcgccacgcccatcttcgacatggacaagttcttcaaggccctcgacgcagagatggaggcaagctacttgtacacgggaaagggatgggtcgtgtgcaacgactgcagggacacgacgcaggtcttctccggcgtggcgggccacaagtgctgccactgccagtcccacaacacctgccgggtggcaccccccgtccttccgtagccaccaccaacaccacatcattgttgttggaattggatgcagccagccaagatacccccccagcagctacgctattattaccagtagcgcctgcgcttttacacaccgctccgttccagtccatgatgaactgcataatttcgtgccatgcaggtatgtacgtacactgttattggagatcggaagatttatccgactcgggacgtattatttgtaccacaacaaaacacgtgttactattgtaataccagatccggatatatacgaaactatttttaggatgcttgaacgagtggtatttccttggagtgtgtataacatttatttattagccccaaaaaaaaaaaaaaaatttgcggcc

SEQ ID NO: 4092 - DNA, 1818 bp, Zea mays
  Clone ID: TF_ZmC4401_1
gtagttgcccggccgggtcctcgttcttcgtctcccccactccccacgctacctgagaggctgagactaggaaggggaaggaaaataatagtttggcgcgcaaatatccgcctccattcgtacgccgctattctcgtgtgcgcgatgatgatcccgtggggcggcgtggggtgctgtctcagcgccgctgcgctgtatctcctcgggaggagcagcggaagtgatgcggaggtgctgaggtcggtggcaagggctggcagcatgaaggatttagctgctatcttggacactgcaagtaaggtcctaccacttgtagttgccatctctgggagagttggttcagacacaccacttatatgccaacaaagcggcatgagaggtgtaattgttgaagaaacggcagagcaacacttcctgaagcacaatgatgccggatcctggattcaagattcggcagtgatgctttctgttagcaaagaggttccatggtatctggatgatggaactggacgtgtttatgtggtcggtgctcgttctgcagctggtttgattttaactgttgccagtgaggtttttgaggaatcagggaggacacttgtacgtggaactctagattatttacaagggttgaagatgctgggagtaagcgaactgaagggttcttccaactggaacctcattgacagttttggtgacgcgtgggttctattatccattggccattaaagatgatgttggaactattcgaattcagcgaccgcacaaaggacccttttatgcatcatcaaagagcattgatcaacttattgtgaatcttgggaaatgggccaagttataccgaattgcttccatgggttttgcaacatttggtgtcttccttcttgcaaagcgtgcactacagcattttctagaaagaagacggcggcatgaactgcaaaaaagggttcttaatgcagcagcacaaaggcaagctagagaagctgaagggagcaaaggtacatcagacgcagagcctaacagtaaaaaagatcaattagtgttggacatatgtgtcatatgccttgagcaagagtacaatgctgtttttgtgccgtgtggtcacatgtgttgctgtatggcatgctcttcacatttgacgaactgcccactttgccggagaagaattgaccaagctgtcagaaccttccgccattgatggtgatatatgatgcaaaaaactggcatggtaccaccacatgtactgcttctgaaaccaatttgttcttggaacttggaagtgctggctgctatcaaccaacgacatgaactgcaatactgggacgaagcagcttcaatgagtttgctttttgaacagaacagtgagtgatgcaagttgcaagctcataattggcagttgagatactctcactccctagatagtgccaatgggtgctcttgcctgtaatgtactacaactctgtacaggacgctcttgtgtaagtgcacatagattagcagcttgcttattgacaacatcgatgccggtaatatgtactgttgcccatcgggcatttgtgcaaaggaataacaaaatcagctcgtttagttgtgataatcaatttttctggtgggtgagaatgagacgcgtctcttagggttttttttttcgtgtccagtttatttgtcaggatcataggaaatagatgatttgaaatatgttgtatgttttaagactgtccgtagcataattctgttatttgggattcaaataatccctccgttctagtatataaagtgtaaccatatctggtttaaagaccaaaaaaaaaaaaaaaaaaa

SEQ ID NO: 4093 - DNA, 1723 bp, Zea mays
  unsure (1)..(1723): unsure at all n locations
  Clone ID: TF_ZmC4401_2
cattgggtacctcgaggccggccgggaacctaaaaaactgccggtctttgctttgcccttcctccgcccccttcctccccccgcgctgcctgccgtaggtacgggaagggaaaaaagtcggcgccaaatctccgcatccattcgcacgccgcgattcttgtgcgcgatccgccgcgcgatgatgatcccgtggggcggcgtggggtgttgcctcagcgctgcggcgctgtatctcctcgggaggagcagcggaagggatgcggaggtgctgcggtcggtggcgagggctggcagcatgaaggatttagctgctatcttggacactgcaagtaaagtcctaccacttgtagttgccgtctctgggagagttggttcagacacaccacttatatgccaacaaagcggcatgagaggtgtgatcgttgaggaaacggcagaacaacacttcttgaagcacaacgatgctggatcctggattcaagattctgcagttatgctttctgttagcaaagaggttccatggtatctggatgatggaactggacgtgtatatatggttggtgctcgttctgcagctggtttaattttaactgttgccagtgaggtttttgaggagtcagggaggacacttgtacgtggaactctagattatttacaagggttgaagatgctgggagtaaaacgaactgaaagggttcttccaactggaatctcattgacagttgttggtgaggctattaaagatgatgttggaactattagaattcagcgaccgcataaaggacccttctatgtatcaccaaaaagcatcgatcaacttattatgaatcttggaaaatgggccaagttataccgccttgcttcaatgggctttgcaacatttggtgccttccttcttgcaaagcgtgcaatacaacattttctagaaagaaagcgccggcatgaactgcaaaaaagggttcttaatgcagcagcacaaaggcaagctagagaagctgaagggagcattggttcatcggacacagagcctaacagtaaaaaagaccaattagtgttggacatatgtgtcatatgccttgagcaagagtacaatgctgtttttgtgccgtgcggtcacatgtgttgctgtatggcatgctcttcacatttgacaaactgcccgctttgccggagaagaattgaccaagctgtcagaacattccgccattgacggtgataccacgtgcactgcttttgaaaccagttggctattggaagtgctggctcctgtcaaccaacgatatgaactgcaaaactgggtcgtagcagcttcttcatggagtttgcttttcgaacagaacagcgagtgatgcaagttgcaagctcatgattggcagttaagaaagataccctactgagatagtgccaatgggtgctcttgcatgtaatgtactactactacaactgtgtacaggacacttgtgtaaatgcacataggttagcagcttgcttcttgactaacacctaatgggcatttatgttgtgctaaccgaatgacaaaattagctcgtttagttgtgataatcgttttttctagtgagtggggaatgatacggatatctccgttcttttgtgctcacaggatcataagaaacagaaaagatttgtaacatgttctatattttactgctcattttgtaacctgaatgtgaggacaacatgttggcgccttnaaaaaaaaaaa

SEQ ID NO: 4094 - DNA, 914 bp, Zea mays
  Clone ID: TF_ZmC4401_4
tgcacaaaggacccttttatgcatcatcaaagagcattgatcaacttattgtgaatcttgggaaatgggccaagtaggaaattttgttagaacatatttttggttgttacttcttagttagggcatcttatgctagtagcatgtttgtggcaggttataccgaattgcttccatgggttttgcaacatttggtgtcttccttcttgcaaagcgtgcactacagcattttctagaaaaaagacggcggcatgaactgcaaaaaagggttcttaatgcagcagcacaaaggcaagctagagaagctgaagggagcaaaggtacatcagacgcagagcctaacagtaaaaaagatcaattagtgttggacatatgtgtcatatgccttgagcaagagtacaatgctgtttttgtgccgtgtggtcacatgtgttgctgtatggcatgctcttcacatttgacgaactgcccactttgccggagaagaattgaccaagctgtcagaaccttccgccattgatggtgatatatgatgcaaaaaactggcatggtaccaccacatgtactgcttctgaaaccaatttgttcttggaacttggaagtgctggctgctatcaaccaacgacatgaactgcaatactgggacgaagcagcttcaatgagtttgctttttgaacagaacagtgagtgatgcaagttgcaagctcataattggcagttgagatactctcactccctagatagtgccaatgggtgctcttgcctgtaatgtactacaactctgtacaggacgctcttgtgtaagtgcacatagattagcagcttgcttattgacaacatcgatgccggtaatatgtactgttgcccatcgggcatttgtgcaaaggaataacaaaatcagctcgtttagttgtgat

SEQ ID NO: 4095 - DNA, 813 bp, Zea mays
  unsure (1)..(813): unsure at all n locations
  Clone ID: TF_ZmC64108_5
aattcggcaccggcggcgttctcgtgcatgctcacggtcccccacgcccacgagcgcctccgcggcgacgaagagaatcatcaggcagagcgggggtggggcggggcgcagatggatctagagaggtcaccgccagcgtcgtcggcggaggcgcccggggacggcggcgggggcggggccgcggcctgctcaatctgcctggatgcggtgctcgcccgcggcgctggtcgctccgtcgccaagctacaatgcggacacgagttccacctagattgtattgggtctgcattcaatgcaaaaggagcgatgcaatgccctgtcggaagattgagaaaggtcgctggctttatgcaagcggacatcgcgcctctgttgatattgatatgggtggctgggtgaccagtgacaactatgatatcacctccgagcttccttttggatttcaatggtgcccctttagtggattcacccggctagcatccatgtttgaggagcgtgaagctgagcttacttatcacacaactggagatcgctcaagtgctgcaagcagttcacttgtttgcccatatcttgccctgcgtggttttctgcatcctgttcatgtgccttctacatctaatcctggtgctgaaagcacttcatttcgtcggcatgcaactggcttggaaggccatgccactcttgatttgaataatgctcaacttttccatgcgaatgagtcaataaatcatgacagtgagcacagacatttgagtaatcttnctgtatcaggaattcctgagtattctatgactncatttggtataggactac

SEQ ID NO: 4096 - DNA, 782 bp, Zea mays
  Clone ID: TF_21210971
ccacgcgtccgatttttttctcttaagtgtattggaaagatgctctgatattttacaaaacgctacagtaaaatttccattacataagactttggtacatgcgaattgaacgaaaggtgttcaaaactatgagcattacattttttctgtagatactttataatcacattctcctattgttatatattaatgtaactaaattgcagattatgattctgagaatcctaggatagtaatgcagtgctcacaccatttccaccttggctgtatttatgagtggatggaaagaagtgaggcatgccctgtctgtggaaagaagatggagtttgacgagacaacataatcctctggctggactctacaccatggcccatggattaacaaaccttctcatatgacattctgaaaatacagatggtctagcccagcaagttctctgtaaatacgccctgtaaatattggactggtagtgtgggtccctcttggccatacgagtgctctccaaatgctggaacggtgcacataaacattcttttccgatttgttacaaatagtcggcaggggaaggttgccccccctctgcctgtctgcgcctctgcctctgccttgtcgaggcttagaggtgcattggttgtccggtgatagattcatcggaagcctgtaaattaaagacctaggctcatataataatcatatggagtcccgtggttctggaaaaaaaatattaggccggaaaaaatgcgaataaagaagttcctcaagaaataaaaaaaaagggcggc

SEQ ID NO: 4097 - DNA, 505 bp, Zea mays
  Clone ID: TF_LIB3592-075-Q1-N6-G10
ttttttttttttttttttttttttttttttttttttttttttttttttttttttagttatagatttgcattatgggcctcgtccaaccaaacccaagtaacgggatctctctgttcctgatttgattaccttacaaaacgcggggccggaggcgaaatacatttggtctaacaataacccacatttgggaaaacggggctaatacacaattataaaggggggacaataagctgccttcaagcaaacatcatgcgttcattgggggcagtacccagcttcaaagggcaacaacttcccgggggcctcataactggtgactcattgcctcaagatcctcgccaggaacttcagcaaagcaaacagggcataccttgtttatgccaagccattttgtcacccagctggcatggtatacatgcttgcatggaaaggtcatttgaaaaattcctttcctgtactccatttggcaaaacacacacctcttacgggggggtttctttccttg

SEQ ID NO: 4098 - DNA, 786 bp, Zea mays
  Clone ID: TF_ZmC518526_1
actttcccctctgtcgcccccctcgacgcggcggccgccgccgggatgaccgccttctagcacaccacaaccgatctcccgcggagtcccccgcccgccctgcgtcgcgccgacggagatccgggccctcttcggactgcagatgcacaaaacatagtgtaccagctcttcctcactcaacatgtggagttttgcatcaaatgccatagctggaagcataaagaaaaaggtacaaccatcaaaaggcagcctatccaatcctgattgctctgatgacgatggttcttcatgtgcaagtcgagaggaaggccttgaatgcccaatatgctgcgaatccttcaacatcgtagagaacgttccttatgtcttgtggtgtggtcacacaatgtgcaagaactgcatcttgggccttcagtgggctgttgtcaagttcccaacccttcctatccagctgcctctctttgtctcgtgtccttggtgcaacctattatctttccggctggtgtacaagggcaacctcaagttcccacgcaagaactactttctgctgtggatggttgagagcatgaatggtgacagagcaaagttccattcctctggtcatgaagagcgccaatcagtatgtccgtccagtggtggcaccagttccagtcaacaccaccgaagaacccccacggcacgagcagagacctcctcgtctgccagagatagaaatgccgctgccaacacccccaacactgccagcgtgtctctccaaaagctcatggtgtgcttcgtgcagctgac

SEQ ID NO: 4099 - DNA, 884 bp, Zea mays
  Clone ID: TF_ZmC2009_3
ggtaattcggctcgtgcggctcgagcggctcgaggaccgtatgcggtcacattttctgccagccgtgcatcaaggctgccattaaggcccagaagaagtgccctacctgccggaggaagctcactccaagacagcaacaccgggtgtacctcccatcgccttagtagcccagtgcagagtcattttgctacaagttctgccgtaccgggcacgaggggcgggaggctactgggggccgggggccgagctccacccccacccacccacacgcacacactttgccggcggcgagcaccaccaggacagcagtatcttttattgcaacaccatgaactcccatggtgctggttcgcattcacggcttttggacctcaactatccccctgctgaaggggctggtgagggggcttcacgtttcagcagtatccctgtctctcatagagagggttcaagcagcatgcctgtacaacacatccaggcttcgagtagtacaccaccggctactggtgagcctcgcattggtatgcgtagttgccccatcgatgtggaagccatcgatgatgatgccgttatctattcttcaagaccactgcctcgagcaagacagcagttgaccacgacagaaagtattactatcataatagatgatgattccgaaacaaacctagaaacagcaggcgatgctcttgacgagcatgtgaacttactgctatctctgggcatagaacgctcgcatgagcctacaagtgcaaccaacaccttccctggataagcatggtggacacaccaaaagtaaacaccttcaaggtgcctcctgaacctgtgaaggaggttccgaaagaaccgaagctcagctgcccgatctgtatgaacgagataaccga

SEQ ID NO: 4100 - DNA, 664 bp, Zea mays
  Clone ID: TF_ZmC9505_3
gtcccttcccgtgtcccgtagtcgtctcctctcggcttccctcatcagctgccgcgtcgtcagccagcgccaagaaacaaaagcgccgcgataagtccgttcgttgaaggcaggcagccatgatccctaggacgtcctcggtctcggcggcggcggcgccctcgccgccggcgtggcaaagcgccagcagcagcgacggcatgttcccgggcccgggtagctcggggcagcagcagctggccatcagcaacggggtgctcctcgccgccgtcatcttcctcttcatggtcgtcgtcttcgtcttcctcctctacctctacgccaagcgctacctgggcgcgaacccgctgctggcgccgtcgtcgccgtcctcgcggttcctcttcgttgccgcgtccccgctcccgcagcgcggcctgcccgcctccgtcctgcaatccctccccgtcaccgtctacggctcccccggcggcaaggacaaggacgcgctggagtgcgcggtgtgcctgtccgaggtgggcgacggcgagaaggtgcggacgctgcccaagtgctcccacgggttccacgtggagtgcatcgacatgtggttccattccacgacacgtgccccctctgccgcgcccccgtgggcgacctcgacgcgctgccgcgggaggagccc

SEQ ID NO: 4101 - DNA, 332 bp, Zea mays
  Clone ID: TF_cC-zmpo14820003g11d1
ttccgtggtcgtaccacgccttcgctccgatggtatccatcacgacgacgcggctagctgcccggtctgcctggaagactacgcgcccggccagcgtgcccgtgagatgccctgcatgcacaggctccagcgcaatagcatcggcccgcggctcaagaggcacatctgctgccctgtgtgccgtctgcatctgacggctaccggctacaggagatcatgcagcgtccgagacggagtgtacctcaatgtcgatcctgatcgagacggccatgaccacggacggtgcgatggtcgggcaagctgtccgggcaacgcctatctagcatgcacct

SEQ ID NO: 4102 - DNA, 1728 bp, Zea mays
  Clone ID: TF_ZmC84167_1
ctggcaagcaaagctcttcagccagtgcagtattggagaggaagtgcaggtcattttccgattctactactagcaacttgaagggctcatcaagagttgctaaagggtttgctgcaagcatatctggatcagaagtatcagttgacctttcctttactggtaccctttccccttctccatcatttgatgccaaggtagttagtaactcaaactcagcacctgctgctagcacagatctttcattggcattgccctcaagtgatagtttaacaccatctttgagtcatgattccaatactgaggtagtggactctagtagcaaaattaatttttcatatgatgaagaacagaaggtctggatcccacaagataaaaaggatgaaattgtcttgattcttgtccagaggcagaaagaactgcaagcacatacacgtgactggacagactgggctcaacagaaagtgatgcaggtcgcacaccgacttgcaaaggagaaggatgaacttcagtcactcaggaaagagaaggaagaggcagaccgtctgcaagaagagaggcaccatttggaagagagtactcggaaaaagcttctagagatggagtctgcaatttctagggcaaatgctcagctggagaaggcagaagcttctgctcgcagacgtgaggttgagaatgcacaactcacgttacagatggaagctgcaaagcgacatgcagcagagtcagcaacaaacatttcagagcttttaaagaaagatgagaacagccgtaaaaggtctcagcgttgggaatctgatagagccctgttacaagaggatcttgcagcacaaaagagcaggttatctcgggttcaagaacaccttcagcatgctaaagagctaaaggatcaagtgcaggcaagatggaaacaagaggaagctggaaagattgaggtaattgcccttgtaacctcaaagaagaaagagagggagcaaattgagacctccatgaggtcagaagagaatttactgcatcttaaagcagcgaatgacacagaaagatacaagagtgagatccgtgctcttgagcagcgtattgcacagatgaaggtttctttggactcttcaaaggttgctgcccccaagtggggtgctgacaataaaacatatgcattgcatctttctgaagggagaaagaacagcagtgcccaaattttgtccaacatagcagtaccccaagatcccagttttgatgatatacagcgtgaccgggagtgcgtcatgtgcttgagtgaggagatgtccgtggtgttcctcccttgcgcccaccaggtggtctgtgccaaatgcagcgacctccatgagaagcaagggatgaaggaatgcccttcatgccggacccccatccagcgcagggtgcgcgcccgccccgcaggttgctagatttcacatataccatttggattttatcctgttttttttgttttaccttgattgctcagcttgagttgatggaagattggagagaataatgggggggatgtgagtggtgaaacttggacaataatacatcgttaaacatcaaacaagccccagcggacagtgggtactggttgggtttgttatatggatataccggccgcttctgaatgctttggttttgttgcaaaaaaaaaaaaaaaaaaaaaaactcgaggaatgtgggcggcacgctcgtcaatttccggttctaagtaccgtactgttttgt

SEQ ID NO: 4103 - DNA, 2410 bp, Zea mays
  unsure (1)..(2410): unsure at all n locations
  Clone ID: TF_ZmC12187_1
gccggccgggttcgggaacgcattgcgaccgacccgcccaggctcagagagagcgcagaatggaatcgtcgctcttatcatactccatgactccatcactagactagagagagaaacccttgtacccttgttcctttttatcccccatttctccgagtctccggcccatcgccgaacttcgagtccaaggaagcggagccaccggagaaggggatatttgcctttcccgtcgggggcctagggagcaggagggatgcagcggcggcggggccacacgtgggcaggggtggggaagacggcccaggcggcggcggcgcacgccgcgctcttctgcttcactctcctcctcgcgctcagggtcgacggacgcaccgcatactcctggtggataatattcagtccactatggctctttcatggtattgttgcacgcggaaggttttcaatgcctgccccttctttgcctcatggccgtcattgggcaccatgtcattcgattgttgcggcgcctttactaattgcgttcgagctgcttctttgtatatatcttgaaagcataagagttagaaatcatccatctgttgatctgaagattgtgttccttcccctgttggcctttgaagcaataatccttattgacaattttagaatgtgtagagctttaatgcctggggatgaagaaagcatgagtgatgaagctatttgggagacacttcctcatttttgggtttcaatttcaatggtgtttcttatagctgctacaacattcacccttctcaagctgtctggtgatgttggtgctttgggctggtgggatttgtttataaattatgggattgcggaatgctttgcatttcttgtctgtacaagatggtttaatcccatgattcataagtcccccactcatggggaggctagctcatcatcagcgattagataccgtgattgggaaagtggtcttgtcctcccatcactagaagatcacgaacaagagaagctttgtggtctacctgacattgggggtcatgtaatgaaaatacctcttgtggctttccaagtattgctttgtatgcggttggagggtacaccaccaagcgctcgctacatcccaatatttgctcttttctcgccactatttattctgcaaggtgctggtgttcttttctctctagcaagattagtggagaaggttgttctgctattgcgtaatggaccagttagtcctaattaccttacagcctcatcaaaagttcgtgattgctttgcttttcttcatcatggttcaaggcttcttggttggtggtctattgatgaagggagcaaggaagaacaagcccggttgttttatactgaatctactgggtacaataccttttgtggctatccgccagaagtggttaggaaaatgcctaaaaaggaccttgcagaagaggtttggaggctacaggcagctttgggagaacaatctgaaatcaccaagtgtaccaaacaggaatatgaaaggcttcaaaatgagaaggttctttgtaggatttgttatgagggggagatatgcatggtgctacttccctgccggcacagaactttatgcaaatcttgtgctgagaaatgcaagaagtgtccaatctgccgtgtgccaattgaagagcgcatgcctgtatatgatgtttaaacctcactaactcagcttaacaatacaaatttgtgcatgtgggttctgtcatgctgtgcatttagtctcgatcacaactttaagctgattgaggtttgcacttcagaaagggtctgcaatatatgggggaaatacaagtatatcatgtctaaccaaaagcatggatatgtggttgatgagcattgtcgttttggaccagttatctactgtaagtatgtggtcagtgtatttcccttccctcttgtgattggtagatgagtcagatagtcttgttcgcgtagcagcattttctcagggatatgcagttgttgagaagaaagtgaaacaaaaacagactgtaaataaaaacactgccttgtttgaatctagtccttgtttgagaagaaagtggaacaaaaaaaatgtaaacatctctgttgtattattttgtagtagaaaaatgtctgccgaaatttgtgaccgcaacgnttcgttgtctggtgtcttttcacaatgtgaggggtcgtcttagcaaaattatttaaagattgtggaagcatgtctggagaagaaaggttgcgtctggtctgtgccaaggaatcattgttggtatgttttttcaaaccgtattgcggtgattggaaccaatttaatcatgatactgtggactgctgtctccttttaaagcagagtataaatctaaatattgttcgtcaaactattttaagtttgactaaatttgtataaaagatattgatg

SEQ ID NO: 4104 - DNA, 1094 bp, Zea mays
  Clone ID: TF_ZmC22071_1
ctcgaggccggccggggcaattctcaccctcgcacagtcgtcttctcctactgcactcaacgcatccgggcttttggtccacccccgccactacatacatagccgatagccccaggctcttgccgtgccgtgccactgccagaaacgaggaaccacctctcgatggagtccaacaccaccccgttcgccgcggttggcacggccgccgaggaggcatcgacgcggcgcgtggccaaccgcatcatccgcgccctgcagcaccagctccggctgctgcaccgcgccggcgccgagttcttcgtgctcggcgtcacgggcaacgtgtacacggtgacgctgtccaccacgccggcgtgcacgtgtccggacccagccgtgccctgcaagcacatcctcttcgtgctgctccgcgttcttggcctctccctcgacgaggcctgcgtttggaggcagactctgcacccgtgccaggtcgcgcggctcgtcggcacgcccacgtacccggacgtgctcgctggtgcgcgcgcccgggagaggttccaccagctgtggtcggcccgtccagccaacaatgttgctgacgacaggcaggaggcgtcgtcccacaggccgctcgacggcgcggcatgcccagtgtgcctcgaggagatggcgccggcacaaccgtcacagggcagcggggccaccgcacaggcgatcctgacgtgtaggacgtgccggaatgcggtgcacgccgagtgcttcacgcgctggaagcgaagccgctcgcggcgggccgcgacgtgtgtcgtttgccgctcgcggtggaagaagccaaaccgggagcatgagcatgagcagtacatgaacctcgccgcctatatgaacgacgacggcgacgtcaccatgctgagcgccgacggctggctgtgtgcggggtagttgcaggctttcgattattcaacaggctaattgtcacataactgtgcctgtacagaatatagaaccattgtgatctctgactctcaactctagtttatatatactctttctcttcaaattagaagacatcttaactttttcaatcataaaaaaaacaaaaaagggcggccgtt

SEQ ID NO: 4105 - DNA, 670 bp, Zea mays
  Clone ID: TF_ZmC14225_2
ggcgcagacggggcagaacagaactctgttgtcgcagcaggagcgcgcgtggcctacgatgcagggtaagtggaaggcgtgggagcaatcgtctgtgaacactgccgagctgccgccgctcttgacgccacgcgagcacacgccgcaccgggactgcacgtaaagaaaagagagagaacccacatcagcagctgagactcaaaacattctgcaaagacaggagaatgatcaacaaacaaaacaagatggagtgttttccaaagaaaggaagaaaagagcacgagtaaaagattgggctttttggacgctaagcagcagtaggatcattcatttggagcactgagatcaaaatctccatttggacaggcaaaagctgatgtgctgtgatctgattggatccatctttttgcgctatagcctccaccttctccctcgtcctacgaaagaagagaaaagaaaagcagggggatttgcatccctctgtgcagcagctgctaccaaaaggtgtagtacaaatacaataatgctacagaggttctgaaccctagaaaaggcgttgtaggcagtacggttttgttttctttttggacggataaggaatggcaagagatgcatgaaatacagaatgagagaatccggtcctgagagggtctctgcctcgtgccgaatt

SEQ ID NO: 4106 - DNA, 1077 bp, Zea mays
  Clone ID: TF_ZmC35655_4
ccgggtgacacattccttctcgagcttttgacaatttccaatttgtaaatttttcggagataatgtccaagaacatggcacaatcaaggaaagaggctgcatttgctctttcagcattgatggagataccacaacagtataaagcaaccgtggaattaggaattttaggtcgtcgctcttccaagtctcccaacagagttcctctacctccgccttccgcaagtcatgatgcttattcctattcatctaaaagctttagcaaaccaaccacctaccctcagagttcttcatcctcatcagcctatcctcaatatggaactccacatacagccaccccggccgcaccttcgtccacttatgacaaccaggtctgtcctatctgtcttgtgaaccccaaagacatggcgtttggctgtggacaccagacctgctgtgactgcggacagagtctcgagtcgtgtccaatctgtcgcactcccatcaccacaagaataaagctatactagcaagtggtggctttggatcattgccaatgggtggtatactggagccaccctgcctcacactggaggatcgcgacggcatgtcccaataaccgtcggaacacccgctccgtagatcgattggagctaaggattgcagggccaagcttggatcgattggagctgaggattgcagcgttggtctatcggacagggttgccccagtattcatatccacgagtaatgatccaaatcgcagcttgcaaaaaacaatctctatataaacgagaagaaagagagaggagaacacaaaggtagtggtgtggtggagcagtcaattgcgtgtcgggccatgacacgcaacttcccttggtgccttcgttacttgtcaaaccagcaacactagttgtacatatcagaatttcgtgcttatctggacttctgatgccaggcttagaggattctttatttgtgcgcgtacttttagtttcgtccgagatatatgttgatttgttctttgcttgcaattgtgtaaaaaattcaatccgcaaaattttgttttggtgaatcagaaaaaaaaagtatttggtaggtg

SEQ ID NO: 4107 - DNA, 673 bp, Zea mays
  Clone ID: TF_LIB3591-068-Q6-K6-G10
ctattttgtatctttttccttgatctggttgatttttagtgtgtagtgggggtggtgttttgtttgctatgttgttccacggtgttcgatcatgcatgtatttctgcagagcaatgttcttcgaggggattcatcccttgcaaagctagcgcagcttaaagagttctcccattacttccgacgcattacagcgtgcggggggggggaataattttaccatagcctaaacgcgggcgatgaagacgacgaccacacttgttgcatttgctacaactgtgattccgatgcaacattccagccatgccatcaccggtcctgctttggctgcataagcaggcatctcctgaacaaccagaggtgtttcttctgcaatgcagtggtaacatcggttactagatagccgattcgcgagcgatgcgctgctctactcattgcctctttcggtatcgtgatccgaaggaagatggtgccactgatttgtcttatctattttgcttgacctgagggctggggcgctggcgtcccaaagatctttccattgcttttccaggaagaacgcgttacctttgtgcacgagggtcagaagcgggtcttcgttttccttgctgtatatgtaaaggccaggtaatagtagaaaggattcaataacattgccgcagaaggaggtttctgt

SEQ ID NO: 4108 - DNA, 929 bp, Zea mays
  unsure (1)..(929): unsure at all n locations
  Clone ID: TF_ZmC12187_2
aaaagttcgtgattgctttgcttttcttcatcatggttcaaggcttcttggttggtggtctattgatgaagggagcaaggaggaacaagcccggttgttctatactgaatctactgggtacaatacattttgtggctatccaccagaagtggttaggaaaatgcctaaaaaggaccttgcagaagaggtttggaggctgcaggcagcgttgggagaacaatctgaaatcaccaagtgtaccaaacaggaatatgaaaggcttcaaaatgagaaggttctttgtagggtttgctacgagggagagatatgcatggtgcttcttccctgccggcacagaactttatgcaaatcttgtgctgagaaatgcaagaagtgtcctatctgccgtgtcccaattgaagaacgcatgcctgtatatgatgtttaaacctcactaactcagcttaacattcaaatttgtacatatgggttctgtcatgctgtgcatttagtctcgatcacaactttaagctgattgaggtgtgcgtttcagaaaaaaagtctacaatatgtgtatatcatgccatgtctaaccaaaagcatggaaaggtggctgatgagcattttgccatttcggtccagttatctactgtaagtatgtggtcagtgtattccccttttgtgattggtagatgagtcagtcttgtttgcgtagcagcattttctcagggttatgcagttgttgagaagaaagtagaacaaaaacagactgtaaataaaaaaatactgccttttttaaatgtaatcctcaagtgtaaacccccctgttgtgccattttgtagtagaaaaatgtctgccgaaatttgtggccgcaagaaataaaaaaaaaaaaaaaaaaaaaaaaaacgaagggcggccaaagactagaaagcncatcgaccagggaatt

SEQ ID NO: 4109 - DNA, 1421 bp, Zea mays
  Clone ID: TF_ZmC22395_16
ttgggaccctcgaggccggccggggtaattcaaaatttcttgctcacactgctgtctccgttccatcccctacgagatctgccccctcgccctcgccctgctccaatccccatctccttgcggcccgatccaccctgctccaatcccccggcgatggtcgtgtgcaaatgccgaaaggcgacgagggtttactgcttcgtccatcaggtccccgtctgtggcgtgtgcatatgcttcccggaacatcagctatgtgtggtgaagaactatgctgaatgggttgttaattctgagtatgactggccacaacactgttcgtcttgcaattctgttctcgaaggtggaactgaagaaacaacacgattgggttgcttgcatgtggtacacaccaaatgcttgatatcacatatccaaagttttcctacccaaacagcaccagatggatacgtctgcccctcctgttctgcacccatatggccaccttctagcattaaagatacaggttcgcgccttcacactgaactgaaagaagcgatagtccagactggaatggagaaaaatgtatttggaaatcattatgtgacaatagctaaagctgatactcagacacctcctgcttttgcatcagatcctctcaaaactttatccaatcgtgatgatagagaatttaatagtgcaaatgcagctaaagatgctgctttgccatcaacattacattctgggatgtactcttctgctgtaggatctgagacaactattcatgttgatccagaaattgttgaaatagagggttctagtcctgtatcgacccaattttcagtgcaggactccaacttcatcaggagtccaagcccacatgggcctggtgctatgacaagaaaggcgctaatactgttgatagacaaaattctgagatttcttattatgctgatgatgaagatggaaataggaaaaagtatactaaaaggggtacatttcgtcacaaatttctaaggatgctgctgccgttctggtccagtgcactgccaacgctaccagtcacagcaccatcaaaaaaagagagtgatgctctagaggggagtcgatcacgccatcagagatcatcaagaggtttagcaagtttcaagttgatgtcagattccatgaggtgcactgcaacaagtcatttgttcattcaattccatggttgcacagaaaagatgaggcgatgccaagaaaaagtcgatatgtctatgtgtttaagttaaagggccaaaatgtatttcttgtttggtatataacagccctacaacactttggtgaacttagttactgcagattaggtaattacagttgcaccttttgtattttatagcaaacccagaatttttcattggattctacgactgcccctcttgtagtgggaaaaaaaaaaaaaaaaa

SEQ ID NO: 4110 - DNA, 404 bp, Zea mays
  Clone ID: TF_ZmC89425_1
gaggcggcggacggggtgcggcggctgggcaactgcgcgcacgcgttccacgcgcgctgcatcgaccgctggatcgacctcgtacgggtaacgtgcccgctgtgccgctcccacctgctgccgcgccggcgcgccggcctgcttgccatggcacggcttggcgacggctagtatagtcgcccgtccgtccgtacctggttgtttccttgccacgtgacgtgcgtgcccgtgcccgtgtgcttggctttcaggcgcgcggcactggtgccggatgggggcggaccaaccgtgaactgatcgcgattaggacgatggactaaccaccaacctgatgttattaatgaatgggcgcaagttaaattaaccggaggaggttggcattaactacttgttgacgcgatacc

SEQ ID NO: 4111 - DNA, 281 bp, Zea mays
  Clone ID: TF_700381537H1
cagctcgatcattcctatacatagctatcattacggagaccagtatgatggctgtgtgagttccctgtatcaatgtgaggatgtggacaagctgcgggtactcccctgtggtcatggctaccacagccgctgcgtggactcctggctcactcagactcggaagacctgccccattggcaatcagcctgttcatcggggtcctggggactaatatcaagagggagaaactcaagggcgagtggagggtgatcaagtggacccgagggaccatccttcctcag

SEQ ID NO: 4112 - DNA, 280 bp, Zea mays
  Clone ID: TF_LIB3158-018-Q1-K1-F12
gagcacggcaattcgtgagggccctgcctcagtgccaacacatattccacgtgcggtgcatcgacagttggctcctccggcacgcgtcctgcccgctatgccgggccggtgttcacatagaccatatacatatgtaaatgaactcgcagggtggcacctggtgtattttcgtagcgaatacccgtgctcctgttggatatcacaagtatagctgtatacatagggtttttttgccagaattcagggagcttgttagtcggtccattttcctagatcgcga

SEQ ID NO: 4113 - DNA, 784 bp, Zea mays
  Clone ID: TF_ZmC435619_1
cattgggtacctcgaggccggccggggcgttcgagttcacgctaagcatcgtcatcgccccatcggtccgtcgttagtgcccctcgctccctcggaaaaccctctcctctcccctatcctctcgtctccccccaccccgccgcgatcaaccgagacccaccgccatggcgagcgacgacgaggaggcgtgcgactacttctacgacgacgacgacgacgccgaggaagacgccgccgccggactggaggaggactcttcgcttccaacgccggagggccgcgcggactactgggctatcacacaagataccgttttcgctgcacagaaacaagatctgtctacggtgatgaacttgctcaatataaatcaacatcaagcacgagccctcctcatccaccaccgatggagtatggatggcatctatgattctctagacatggggcgagaacgcatgctcagaaattcagggatcgtgctgcaggaggtcaacagcattgcagcagctggctcaatgacaccatggagaacagtgacctgcaaagtgtgttttgaggacttctccatggatgctgtttcgaccatggactgtgggcactgcttctgcaatgactgttggacggagtatttccacgctgcggtagagagcgggaaaaagcaaattcggtgcatggaggtcaagtgctcggctttctgcgatgaggacctcgtgcggtttctccttgtccaaaagtatccagacatggccaagaacttcaatcgcttcctgcttgggtcctaccttga

SEQ ID NO: 4114 - DNA, 431 bp, Zea mays
  Clone ID: TF_uC-zmflb73019d10b1
cggactcgttggtttttcgaaaagctttgaataaggcaaaccaatcaaatttgggtaaaaaagtcaaacgaattataaattaggacggagggagtaactattaacacctccacttgctaatggttagctggtctattaatatgcctgtttagatccccacttgctaattttagctgcaagctatcggcgctaaccgatggaaacaggctacgtatcctcatgggtctccaaatccaatacatgtccatgcaggtccgtgggctcccatgcgcgcacaatttccatgtggagtgcatcgaccagtggcttcggctgaatgtcaagtgcccaccgtgccggtgctccgtcttccccaacctggacctgagtgcgttgaacaatctttggtcgaccagcgagccggaccattcatcctgcagcgccagcaatgt

SEQ ID NO: 4115 - DNA, 415 bp, Zea mays
  unsure (1)..(415): unsure at all n locations
  Clone ID: TF_21210134
ccgagcgatcgatctttggcgcccatcaatctacaatctatgatccgatcccatctcagacgacgggagtcgctgttctcgttcgtgaatgtgcgcaggatttccaggtcggggagaaggtgcggacctgccggactgctggcacgtgttccacgtgccgtgcatcgacggctggctcatcaagcacggctcctgcccgctctgcaggaggaagctgtaggcggatcgaccggacgacgccatggacgatgttcttctctgcgatcgagccgatgatgtgtgtgtgtgtgcccccgccgccgccaccaccgatagctgctgctaggatcggaggagggaggagggagaagagactgacatctatagaacccttaatttatagagagggcttttgctttaaaaaaaaaaanaaaaa

SEQ ID NO: 4116 - DNA, 722 bp, Zea mays
  Clone ID: TF_ZmC11824_5
aaactgccactaagtttttaagttagtatataatgggtggctgttgttgctgttcgtcgagaacatctgaagccgatagagcaccaattgatatatataatacgatgaagaaaatccccgctctgtaactaagtgtgagcaccatttccatctttgctgcattcttgaatggatggagcgaaaagatacttgcccagtttgtgaccagacaattttggtggatgagatgtccgaatagacttggtaatcctggtggatcatcacttgaagctgtttgttactgaggaagtgcaggcaacaactactacactcttgatattcgtccattctgggtggctctcagagtaatgaattgatggggcaaaaattgaaaggatgaacgacatgaaatgtatttacgccccctcctttaccctgcattctgtgtcatgcttttgctgttcatagcaacaggtggactaggaaactgcttggttgaattatatatagagagagatatgtcggcttgcaggttgattcagttaaaagtgcaaaactatgccatttcgcttttctgaattcagagtttcagacatctgctggttcttccaggaatccagtcagctttttacatggtatattaggtggttgcaggtaaaaatggtctagatggaggtgggggtttctttgtataatccacatgctattcaagcttcctgtatataatatttcctgttttcttc

SEQ ID NO: 4117 - DNA, 641 bp, Zea mays
  Clone ID: TF_LIB3066-048-E2-R3A
aagcctttggcggactaccggtggtcccacgcgcggtgcacaaccacttgcacctgcgccctgtacggcgagcgccggtcgtgctgccgcgtggccgccgagtcctacgactaggagtcgtgcacgcggacccctgtgacacagcggaggccgacggagcacgtggagtgcgccagcagccaagcgtggatgcactctgagtggaatgcgtggcgacaggcggacatgacgcgaagcacctcggcggcgttgaaagcgcccaggcacaccgtagcactcagaggcgcggaccacgttgacgtcaccagagccgaaccggaccgtcggaagcgcgcccaccgtggagctgctgagcccacaccggcagcggtcgtacgaggagggcgcgaagccgaggcccaggccgtcgggccgctcgccggggccgcgctgcttgcagtgcttggcgtagatgaggaagaggaagagcgccagcagcacggccgtgagcacgcccatgatgactgccgcgtccactgccggcagcggcggcggtggcagcggcggtggtcccaccttcgtcggcggcgacggcgactgcatggcctggcgcgcaagcgctcgcagcggcgtcggcggggacgtcatcctgtctcgatcat

SEQ ID NO: 4118 - DNA, 619 bp, Zea mays
  Clone ID: TF_LIB3597-002-P1-K6-C5
gtcttcctgcccaaatcgttgccggctacgccggtgcctcaatctacttggggccgttcacccggcgacaagcacacaggcttgggtaaccaccaacaaattaaaattgtcagccaacgtccgtgaatcaaccagcggtggcagcaccaacaatacagctcgtgttcgctgtggaggtgggagatgctttgatctgcctcaagagccaatagtgcctttatgtggacacctattttgttggccatgcatttaccggtggctgcacatccatactcattcaccagagagcccagtgagcacagatcttgtggaggaagacacgcttgttccactttatggtacgcggaaaggatcgtgttgactcaaggtacaaagaacatgcccattggtgagattaataaccgcccaactggtcagaggcctgacctagccccccaggccgttgctacacaacaactttgtcactgccaagttcaatgcgactccaggttgattggcacacgcatgcatttggctaatgcgcgctggcgaaactacgcattctgagctgctgtctggggactatatcctatgcttagcttccaagacatgtgtttccacatactgctacttatgcgca

SEQ ID NO: 4119 - DNA, 474 bp, Zea mays
  Clone ID: TF_3340896
ttttttttttttttttacaatgcaactaataatatattcctgattttttttttttttttacaatgcaactaataatatattcctgagacagcactttgagtaactttgataaataactgactctatcagcacatttttttggatacaaaaatttacactcatcaaggcctggagttacattagcaacggaacagaagttgaaacagattggcattgtcaagcggactgcattcatacggaacagaagttgaaacagattggcattgtcaagcggactgcattcataagggggcatgttgcattgatgtgaagccacttatcgatacaggtgcagtggaaatggtgcccacaggggagttcgcgcaactctgcactgtcatcgtaagccgatacgaaatacaacactctgcatcttcagctgcaagcactttctcaataggttgattggtgccacactctatcattattccacca

SEQ ID NO: 4120 - DNA, 840 bp, Zea mays
  Clone ID: TF_ZmC6478_1
ggggccgcccctgcccggagcccatcttcactccctcccgatgccctaacccatggttacgactccgacgacgcgaccccggcggcctgctgcccagctccctctgccttcgcgccgtgcctcctaccctcctgaatccgcgccgtgccacccgagtccaggcccccccagggtgcgagggcggcaccggcgcaggcgaaccgcagtccgcgcctccgcactccgccccatccgaagctccgagcacagcaggagcagcaaagcaagcgagcgtcagactggctgaatcgagaggtggaggcagcaaccaacaaggtagcactatgaaggtcaagattcttcagtggcatgcagtggcttcttggacgtgggatgcacaggatgagacatgtggcatatgcaggatggcttttgatggctgctgtcctgactgtaagttccctggtgatgattgcccactcatttggggtgtctgcaaccatgcttatcatcttcactgcatactgaagtgggtcaattctcaaacatccacacccctttgccccatgtgccgtagagagtggcagtttaagggctaaggtactatggacatctagaactgcaccaagcgactctcagttctcagagaagactgatgtttttctggtacttctgtgatgctttattttaactactacatattgttttccgtatctagtataaatcctgatgtcagcgcctgatcctgtgtatgcttccgagcttgtagtggaacaaatgaaattattgcttttcttagggctgatttcctaatcttatcccatattggtttgttcgaaaaaaaaaaaaaaaaaagcggcc

SEQ ID NO: 4121 - DNA, 341 bp, Zea mays
  Clone ID: TF_LIB3206-072-P1-N1-G5
ggggattgcaggatcaattcgatccatgggcatgaacgttgaatggtactagtacatgtgttatgttgaatctggttctgaggcgaaacaagaaacagagatctcatctatacaccgatcgaatgcttgttttctctaatcgatcatcgacccgtcaccgatgaacgcgaaaacgtggcggaatgcaacgcatggcgctgcgggggggtgtcagaagaggttgaggacctcgcggatggtggcgttgcaaagcgggcagcgcccgcggccggtgcggagctcgcgcgcgcaagcgcggcaaaaggtgtggccgcaagggatgaaggccccgccctttgccc

SEQ ID NO: 4122 - DNA, 532 bp, Zea mays
  Clone ID: TF_ZmC240975_1
gtacaagtatattacattgtttacaacatttaccctatacatatttacatccacatagtgtgtgagacaatgtgagccacgtactgtatctgtacatgcgtgcccaagacgtagaaaaaagaagaaaaaaataatcaaggtatgcaagaaagaaccaggtgtcctgcactcctactaccctacaatactctgctcctggtctgggacacgtgtgcacgcgcatcggctcacggttgcccaaagacatcctaacgaaaagtgtgcgcaccggcttagaccgcgcccacgcgtccggagcagccagacgtcgatgcacggcaggtggaacgtgtgcccgcactccggcaagctccgcgccgtctcgcctgcctcgaagtcctgcaaaatcaaaccaccgaccgggtcgatgtcgaccatcaaaaactgtgcagaaacgacacgaaaatcggccatgcacagcctgcactcgctgcaagcatgcgcggcggcggggatctataggtagctgacctgaaggcagacggagcagccg

SEQ ID NO: 4123 - DNA, 819 bp, Zea mays
  unsure (1)..(819): unsure at all n locations
  Clone ID: TF_LIB4758-090-R1-K1-B1
cctcgaggccggccgggattctcctcttcttcagactagtcgcgggctcgcggtcgcggccgaggatatcgaagctgcgagcaacgcgatcgagcgcgacgcgggtgagacccgagagagccgtgagggagccagggagggaaccccgaacccccgtcgtcgtctcgtgctcggtctctccggctggcggcatggagagtgccgtgctcgcctgcgaggcgccaaccgccgccgccgccgccgccgccgtctcctccgcgacgccgccaccatcaccgagtgtctccacaccttttgcaggaagtgcatatcagaggagtttgtaaataaggaagtgtgctgctgccctgtttgtagcattgacttgggctgtgctccactggagaaactcagaattgatcatagcctacagtatgtaaggtcaaaggtatttccttctaaaaaacgaaaggttgaggatccagaagtcacatcgccaattacatcacctataaagacgaaagtacggtctttatcttctttgacaaaacatgctcctcaaatgtctatgcaaaaatgcttgagaaagaggagaacaaaagcttcatgcttacaaaacctccctttgcactcaaccttgcggngcagtagtaatatcacaaaaaaatctggnngggtggagacctttagggtgtcactttcgagcagctaaaaaagaaaggtctcttagacnctaatcagacgatataaagacagctggaaaaaggactgatgatccagntgatgtaactcttgccagtncagcaaagactangaagcagattaccagacgtggaaatc

SEQ ID NO: 4124 - DNA, 1274 bp, Zea mays
  Clone ID: TF_ZmC21544_5
gggtacctcgaggccggccgggccgatacccaaccacagcgaccgaacaaacaacatgtatgatttcacaagccgcccgctgaaaccaaagccttttgccctgtcgtcaggggcgaggtttcatcaacctcagtacctcaccctcctctcccggagagcctctcgcctccgctccgctcctctgccctgccctgcccttccccgccacaccaaccaaggcgccaaaaataaacgccgcgccactgcgtggcgagggagcctgtcacattgcttgccgctgccctgccgcctcgtcttcgcggagaggcctcgtcgcgcgacgatatggagctcgccgaggcgccggcgcccgtgcccgacgaggacgggctggacgaacgcggcgtcgcgctgcacctcccgaggctgctggccggcgtcgtctccggcgccctcactggcctcttcgctctcgctggagctctgaccggggcagtcaccggcgcggtggcgggcagggcttccgacagcggcggcgtcctgcggggagctggactgggggcggtcgccggagctgtcctctccattgaggtccttgaggcttctcgcgcttactggtgctcgtcggaccggctgggctcgcacggcggagcatcgtccatggctgatttcattgagcagcttcttcgtgcccggtttgtgcaagagcaatttactgcttcaggatacgcatcatatcgctggcagctcagcatatcatattttggtcaggatgacctatacaacatctttggggacatttcatctgaagcgctctcgcaagagtcactgaagtaactaccacatcatatgaatgcatggttggagtgcaatgacagatttcataccgaaatttgtttgctactaaatgcagcgtctggccttggctggcaccttttttcttcttcttcttctaataattataaacaacgccgacggccgacctaatggctagcgtccttcgtcttgccgcaggacattgtggccggtaagacagcaagaaggctgcccggttgttttcacgccttccaccagccttgggtggacaaatggctcgtcggccatggctcgtgccccgtttgcaggcaacgcgtgtaaaaaatatataggcgacctgtgtctgtgtacgtagataaacgtggagtgaagagaaacgaccgtgcgcatctggcaatctcacttcgtttcttgcaccccggttccaacatgtaatggcaatggaataagattgctgtcggagcagttcctgtttctgt

SEQ ID NO: 4125 - DNA, 569 bp, Zea mays
  Clone ID: TF_LIB4605-011-R1-K1-H12
gggcttccccgacaaaggcagccgcgtcgcatccccttcgcctagttccttgctcggggcgccccaacttcgctgccggccgccgccgcattcccctcggctactcgctcctcgccgctccccggcgatgtctggcgggaacgcgaggtcgccactgccttcgcacggatagggatccgagactagcggcatggcgaatcgcgccgacgagcgggggggggggaccaacagcgatggcggcggcggcggcagcaaggacgctggcagcttcaagtgcaacatctgcctggacctggcacaggaccccgtcatcaccctatgcggccacctcttcagctggccctacctctacgagaggctccacgctcacgcacactataaagagtgtgccgtcagcaagggcgacgtccaggaggggaaactagcccacctgtacggacggaccggaagctgcgccgtaccccgcgcaaggtcaggggccacagtggaaatcccaatcaggccaaccgagcagagcgcctccactgccctgctgccggaccacaacaaccattaccctcaccagaacc

SEQ ID NO: 4126 - DNA, 1122 bp, Zea mays
  Clone ID: TF_UC-ZMROTEOSINTE105E03_FLI
aagagtaatattttcctcttttttagagtattagatgcagcgctaaaaggaacagagtccatagtgagcattttgtagtcctatgaaacccaaaacagcaaagcttgttgagacaatgcaaacatgaatgagcaggggtaggcacatttgacattgctaggtagacctgctggcgttcttctgtgagttctattgtagataaattatgttgtgcatcttaatggcacttccatagtattttctatgttcactttcatatgtaaggtttcttctaactatagtatttccttctatgtagtatactgcaacattccagaggcttgagtctaggccaaacaacccagctcaaggggttgctccactgggatccactaatccaagtgtcaacataaatgacaattcactcaatcttgtttctagaccacctccatatgataccgatcctagatatgcccgtgttcaaagagagggattagtctccaggcgtgagaaatccataaatcttgcacaagaagagtcactggcccttagacgaaatgccagcagctctggtattgaacatttagctgctcagaagaaacgcaacagcactgaaaatgagggtgaatataaggtccatcgttctgaatcaactaagagtttgtctgcaaaagcttatagtagcagctatgctgttgtcgcttcagaagatgaggatgtctgccctacttgcctggaagaatacacgccagacaatccaaaaataataaccaagtgctgtcaccattttcatcttggttgtatttatgaatggatggagagaagtgatacatgcccaatttgtggtaaggaaatggagttttgcgagagcccatgatagcctttcggtttacatgatctcacatgaagtctgagctgcaggaaacggggttctgtgagaaccaatgatagcctttctatttacatgatctcagatgggagcaagggaaacattctacagagtacaacagaatgctggagaattgtaaataatagttccttatgcatgcgatgtccaaatagatctctttctcgagatcagtttcttacatgtactgagatggttatctgtcttactaaattcatgctagaatttgcttggcc

SEQ ID NO: 4127 - DNA, 1483 bp, Zea mays
  Clone ID: TF_ZmC4212_1
gggaccctcgaggccggccgggctccgtttctccgctccccccaaccgctctcccgccccccccatcggtccccaccgctccgccaggctcagtgtctccgcttctcgccgctttcccctcctccgcctgggcgcggcgcccgcccgcccctcccgatcccgtggacgtcctcgcaggcggcgtgttgcacgagagcttagggaatgttttaccagtattgttcatggtaaactcagagtttctatcaactgcccgggaaagtgaacttgtttccactccatctttagtgtcaaaaccaatttcttctacaggggcaacggaactacttcgaagtgaattatgggtgggttctgctgctgcctcagtgctgaagaatttgatgaatatgtctatccaaacaaccctatctataggcaatgcgtatccttgaggcatcttttccacagcatttttggcgggtatactgcaacattccagaggcttgagtctaggccaaacaacccagctcaaggggttgctccactgggatccactaatccaagtgtcaacataaatgacaattcactcaatcttgtttctagaccacctccatatgataccgatcctagatatgcccgtgttcaaagagagggattagtctccaggcgtgagaaatccataaatcttgcacaagaagagtcactggcccttagacgaaatgccagcagctctggtattgaacatttagctgctcagaagaaacgcaacagcactgaaaatgagggtgaatataaggtccatcgttctgaatcaactaagagtttgtctgcaaaagcttatagtagcagctatgctgttgtcgcttcagaagatgaggatgtctgccctacttgcctggaagaatacacgccagacaatccaaaaataataaccaagtgctgtcaccattttcatcttggttgtatttatgaatggatggagagaagtgatacatgcccaatttgtggtaaggaaatggagttttgcgagagcccatgatagcctttcggtttacatgatctcacatgaagtctgagctgcaggaaatggggttctgtgagaaccaatgatagcctttcgatttacatgatctcagatgggagcaagggaaacattctacagagtacaacagaatgctggagaattgtaaataatagttccttatgcatgcgatgtccaaatagatctctttctcgagatcagtttcttacatgtactgagatggttatctgtcttactaaattcatgctagaatttgcttggccagtttttgttatatttgcaaatggtagctcatagatggaagcacaactcatggatgaaagaatatattaacctgagctgtgcttccatctatgagttgtgcttccatctatggaacacaactcaggttaatatattctttcatagatggaagcacaactcatggatgaaagcttacagcaaccctttgttggtgctgca

SEQ ID NO: 4128 - DNA, 491 bp, Zea mays
  unsure (1)..(491): unsure at all n locations
  Clone ID: TF_jC-zmXLIB3526060ac08b1
atcaggttgtatgctcattgtgtggcactgaacaggaggtgtgtgaccgaacctttactaatgatcttttaccagacattatatgtgtttcacctgtatcatcatggttccttgtccgttggcaggtgcgacaagtatgtatcaattgcggtgtttgcatggggaaatacttctgtggtttgtgcaaactcttcgacgatgatgtctctaaacagcagtatcactgcaacggatgtggaatatgtagaatcggagggagggagaatttcttccactgttcanaatgtggatgttgctattcaattgcgctgaagaatagtcatgcatgtgttgaaggggcgatgcatcatgactgtncaatctgcttcgagtacttgttcgattcgacanatgatgtttccgtcctgccttgtggtcataccattcatgtaaagtgcctgaaagaaatggaagagcacntgcagtttgcttgccccctttgctccaagtcg

SEQ ID NO: 4129 - DNA, 742 bp, Zea mays
  Clone ID: TF_ZmC213505_1
cggtgagctcagtatccgcccaggcccgcgagcagcagcagctcgtgcggccgcagcagcgtcgggagcagcgtcggggagggcacgggcgcgccgaggtaggagaagtccaggtcggaggcgtcggcgggccagagcgcgccggggacgagcggcgcgcggcagagcgggcaggtgcgctggtcgtgctccatccagcggtcgaggcaggcgcggtggaaggcgtggcggcagttgccgagccgccgcacctcgtcgccgccgccgatgccgccgaggcacaccgcgcagtccccgccgacgacgcgcgcctccagctcgtcgaaccgcgccacggggagggcctcctcgatgaccatcgccggcatggccgtccggaactccgcccgccggtgctgctgcggctgcggctgctgcggcggcggcggcgcctggtggtcgtccccgagatccagcaggtcgccgaggcccacggcgtcgaacgcccagaggaggaagcggcggacgtaccccagcagcagcaggaggtggagcagctgcttcgggagcaccagctccgagtagcccgccgggaaacccatgcgtggccgtgcctcttggcttgcggtggtggtggtgtaaggggaaggtggggtggggtggggtggtgaagcgacgtgcctggcccggtgcttcctgcagatatggcgcttggcgatgcgtggtggacggcaaaaagggagcggacgctaggtcgacccgg

SEQ ID NO: 4130 - DNA, 866 bp, Zea mays
  Clone ID: TF_ZmC195726_1
cattgggtacctcgaggccggccgggggcttccttctataaacctttcttccgctttcctcatttgcgaccttcttctttgctggcattttcctcttccatctttcatatctctctcgtttatttgcgcgactctttttcttggagacatttgtgatcttttccttcagaattcgatttgcattaagatcatcttcttgttgcgaagccgtcttggagatttcgtaaattaaagcggtttttacctttggtggtttatgcgcaccattggctgccgctctcttgcgtttgggttgtgcagtaccagcatctcgtcggcgcagaagccatcatgtcgacggccgggagcggcagccttcgcccggcggtggtggaggacacgggcagacactgggcgccgcacggacctgtgctgacggcctgcgtcgtggccatcaacgtgctcatgatcctcctcgtcttcgtcttcttctggcgctacttctccggtaaacggggaccatccgcgtcatccggcggcggcggcgacggcgacgacgacgacgcgtcgtcatccgcgtcgctgcccgtggcctctccatgggcatggtcgtcccgccggcggagcagcaaggaccacggcccgcagccggtggacgacgacgtggcgtcggcgctgcccgtgtacttgtactccagtagcgccggcggcgaaggcgggaaggccccggagtgcgcggtgtgcatcctggagctccgcgacggcgactcggcgcgcctcctcccgcgctgcgggcaccggttccacgccgactgcgtgggcgcgtggctgcggctccacaccacgtgcccgctttgccgcgccagcgtcgtggcgcccagagcggt

SEQ ID NO: 4131 - DNA, 1806 bp, Zea mays
  Clone ID: TF_ZmC22619_1
ccggccggacctcgagaaacattgttgcttccccactcctgtagtaccgccgccgtgttccggtgatccgccatccgcctccgttcgccgtcccccgcttgtcccgttagtggttttcgtccttctggttcactcgccggcggactacatgctgatcgacgggatgaggtccgtggtcgcgacggtgagcggttaccacggcgacgagcggcataggcttgtaaacctcattgcggagaccggtgctagctacgtaggatccatgagcagatccatcacccacctggtgtgctggaggctcgaggggaagaagtacgacatcgcgaggaggctggggacacgcgttgtgagccactggtggttcacggagtgtctcagggaggggaggcgcctcccagaggacccctactttatgtggtgaagaagcagggccagtcccagagctgccttctcgttcccgtaaacaagtcaagaaaaatgccatcatggaggacagagttttccaagagttacctgatgatttctgggacactcctcgagctagagccagctataaagttaagcttgatgattctgattttgagtctgccctgctagaacaaacgttaagaaaaggagaaagcgtatgaagcatgtcaatacatcaacggacagagatgtcttaaaccttcaggataatgtgtcaagtgtcatggcaagacagtgccttcatatctcaagtcatagaacgtcccagagcacatcaaagcataagggaaacttgtcacgcttgcttcacaatgaagttcctatccggatgggagaaaggaacaatcttactgaaaactctgaaaatgatagtttgtctgacagcttcagtgaacctcagacttcagatactctgtgtatagaagctcaaagaaaatcaagtgcaccatcatcatcacttagacgaagtaccctagattctctatatgaatttggtgaaactagtaggcatgaaccagcaggaagaacaaaactagacaacgttgaattaagggagacttcaagaagcttacttccatttgatttgtcaggacaggaaccagctttctgtactcaggagcaagtagataaatgtagccttggcactctagctgataacaaacccatggaaaaatcatctaatatggaaaggcaaccggaattatcatgtgtcatatgctggacagatttttcttctacaaggggcatcttaccatgtggacatcgattctgttattcatgcattcaaggatgggtggattgtctggcttctaggggtaaagtctcaacatgtcccctttgcaaagccagtttcacatggatcagtaaggtggacgaggcaggcacctcagatcagaagatatactcgcagaccattccctgtgaagcttctactgatgtttttgtgccgggcaatgtaggctacgatttctctcgaccaacgtctgggcaaggagcatgctaccagtgtcacttccgtgagcccgaggagcttcttctaagctgccacgtctgcagatcacagtgggtacactcgtactgccttgatcctccgctgactccttggacatgcatgcactgcagagacctgcgtatgctgtttcaccggtatcgttagccccagttatggtactcatgtcaaaccttaattgttggaggaaattgtatcagaaggcatgaacaccatttgattactgagatgtaactgccaagttccatttgatgtctatactctaacattgattactgagggtcgatgtgagttttttttatcgcaaaaaaaaaaaaaaaaaagcggcc

SEQ ID NO: 4132 - DNA, 1114 bp, Zea mays
  Clone ID: TF_ZmC11815_9
gacttacccccatatcctctccagctttccgctctgcccttgtcgctcgtccagccaccgtgcccgtgcccgtgccgccgagaattctatccagaagcaagcaacaagagcccacccccgcttcgcgcgcgctttcgtgccaggcagacacagagcacagctatctgctcgtgtcccggtccgtccaactcgctcgctcgctcaatccactgatgatggggatcccgctggtgtgctactgcctcgccgtgcccaagccggtcatcgccttctgcaggctgctcagcgccgtcagggacgccgccctgctgatgctggccgtggtggggctgtgccgcttcccgcccgacggcgcggcggacgccggccaccagcccggcgaggtgaaggcccggctccccgccgtggagtacggccagctcctggccgagcacgacgagcagcagcagtccggcgaccacgactgcgacggggacgccgcgtcgtcggattgcatcgtgtgcctcgagacgctggaggcggcggaccaggtgcggcggctgggcaactgcgcgcacgccttccaccgcgcctgcatcgaccgctggatcgacctcggccgcgcgacctgcccgctctgccgctccgacctcctgccgcgcgggccgggctgggccagccggctcggcctgggccggctcacgcgcgttcggtgaggaggaccgtcttccagggcagttttgtctattggatgatggggcgcggacaggttagcgacggcgatcgcccgggtggtataacaacagctgctctgcctgccatcagccaaccgctaatctacggggggcttcattagtacgtaaaaggcgcctcacacttggtatacgtaaaagatatactagttattaatacgttaaaggattgagtatacggcacctagatgtttcatttgtacacgattttcattctcttctcgaccatatattaatagtaattaaattagttcgtcaacttattgtgcaacttggtgagcttagcagcagcaagtttgcgcaactggcagtgatgaataatttagcaaccaacttgaatcctctcaaaaaaaaaaaccaaaaaaaaaaaaaaaaaagcggcc

SEQ ID NO: 4133 - DNA, 921 bp, Zea mays
  Clone ID: TF_ZmC7432_2
ccttcgacccccctaacccaaccaagcccgaactctcgagatacaggacgcggatccaaaccagaggcccctgcctgccctcccccaccacaccacagcctaccgccatgtcggcgcccgctacggacgaggccgcggtggaggcgcgcctccaggagctgcgggggaggctcgggaagaagcagcacttcgaggaggccgtaaacgagctcgccgccgccgtccgggaccgctacgccggcgcctctccagccctccacctccagcatggcttgttgcccagaatttaacgagggaattgagcatactaactgaatcctctggtgatcaagatgggagcaacaacagaacagtgcctagagccgaggagattacacctgctataatgaacctcctagaaaccatatcaggcgacagggatctagaaactgctttggaagaatcactgcagggaatcattgagcatccacagagggcacccccggcttcaaaggaagttgtcgccaatcttcctgtcattgctgttaccgaggaagtcatgtctagattgggtagtgagacggagtgtgctgtctgccgcgaaaacttggttgtggatgacaagatgcaggagcttccctgcaagcatctcttccatcctctttgtctgaagccatggctggacgagaacaactcctgccctatctgccggcatgagctgaggacggatgaccatgtgtatgagagcaggaaggagcgtgaaagggaagaggaagaagatagaaggggtgcggcaaatgctgttaggggtggagaattcatttatatctgaactcaacagttccagaatgtaatccctttgatgaacttcgtgattaccatgttgacatatatatatacctagttacttatgcttgagttaaatatcttgcggtctttttt

SEQ ID NO: 4134 - DNA, 706 bp, Zea mays
  Clone ID: TF_LIB5074-010-R1-XP1-A11
gccggccgggtccggaatgcacccgacctcgcgccctccacggcggagccgcgtcgtccccaaggccaggcgcggcgagcgccccggtgcggccgccgccgcgggagccgttccctatgctgctgcccgtgttcatcctcttcgtgctcctcctctgcttcctctccatcttcctcctgcgcgacctcctccacttcctctccctctggctgcgccgccggcgccgcctccgcgccgatgcggacgccgcgtccgacgccacgccggacacgcacgcgtcgcacaagccggccggtctggaccccgcggtcctcgccacgttccccacggtgcggtggttcgaggagacgcatcggcccgcgtcggggcaggccgagtgcgcggtctgcctgtcggagttcgccgcgggcgacgcggtccgcctgctcaccgtctgccgccacgcgttccacacggcgtgcatcgactcgtggctcggcgcacacaccacgtgccccgtgtgccgctccgaactggacgcgccggctgccacgccccgctacggcggcggtggacgcatcgcgatcctggtagacgatcagggagacggcagcgcggcggtggcggacaccgaccatgcggaatcatccccggcgaaacgttggcgtgcaatcgcgcccctgaccgatgacatacatattgtcccaaaatcgccgagtgccagacg

SEQ ID NO: 4135 - DNA, 2164 bp, Zea mays
  Clone ID: TF_ZmC4578_2
tcgaggccggccggggtctttctccccaccctgtccgtccccgaaaagctcatcgtgcttataaatacaggacccacccgtatcggcgggcgcttccgaatttccgatcgagctccagcccccaccggataccaccgcctccaccaaccgattccgttccgtccccccggccccgacctcgtcaccaccggtcacgctcgagcgggaggcttctctcgccacccaccagcggattcctacagctcccgcgccgatcgcgtcgcggacccgtccggagggagaggtgatgataaaggatatttgctgaccaaacttgcagtatttctccttaaggaaatagaaattggcgtcatgtcatatagaaatatgctctggacacatcagtccgttaatcctgaatgggagcaaggacatgtccaagtccaaccaagaagttcctattatgcaggcactgtaagtgattcatccaacctgggcatgcaagttgctgttggtgttccagtaaatactgttaatgttggtatatgtgatctgtggaatcatgagcgcctgcctgttcataattcatacccacatgccagtgttacatcgagatttgtcctcccaactagtatgtacaacccttgcatgccagcagcagctgtcaacatatatattcctcagactcaaagctttggactgggcaatgtgctaccaccatctttacatagtcaagtttccacaggaactattgatgagaataacagcagtttcaattttggtgatagtgccattggatccatgaaaaggaaaaccgcagtagttgccggaaaccatcacattcttcatggatttgctggctcaagttcatctgttcatgtccctcagaatcctgtgtatgggccatggaatgcttcatctcaatcaaattgtttacccagttctgcagcttcaaacctaccagaataccacaatagtaatgggtggccgttcttagaagaatcttctgcaaatgcttcaaacagtttcacttcagtggatgcttgtccagagttggtacctcatggtaacaatttatatccagcttgtcacataatacagtgcaatacatgggttccacagactgcaagtcatggaataccacagtggggatatggtaatgtcatggtcaatcctccaggaaccgtagacatgccgaatggaaatattcaggattatcaagctgggcattcttctattcatgggccactacctcatttctgccagattcctttgcgtagtatgcaagtacctcaaatacaagtaccccatcaacagttcatcggtaacaatgtggtgcatggtttaaatccttcagccgcaggccttccgttagatccaagaatgctggctttcccattcaatgatgagcacacttttgggcatcaagtgcatccacctctgataaaccaagccaacaatggggctttaagaattctgccatatcagaatgctacagtgatggatcattcaaggatttatgaagcaggacatgttattgatgaacatagagatatgcgtttagatgtggataacatgacttatgaggagcttgtagcattgcaagagcagataggtgatgtcaatactggtttgacagaaagctatatccaagaaaacttgaggtccacttttcatgttccaggagcagctagcatttctgatcatttctgtgagctttcgttagagaacgatgcttgcataatatgccaggaggagtatgaagctagagaacttataggagcccttgaatgtggtcacaagtaccatgaggattgcataaagcaatggttgatggtgaaaaacgtgtgccccatctgcaagacaacagctttgtcatcagatagaaggaatggatgatcttcgccagtaacattattggttatttaccgcgtggcaagttagcgcgattttgtatatagacagggttgcctttatttgccgtcccccttcgctgtggacataaactgtacagatattattttgtaggatattttagacgttaaatggcaccatggtgtgtaaggctcccatggttgccttggtagatcctcccttcctttacattgtatttatctttactcttcaaaaaagaagcccgaaaacatgtatattttggaagtgaaagaaccgattttttttcttc

SEQ ID NO: 4136 - DNA, 628 bp, Zea mays
  Clone ID: TF_LIB4740-104-A1-K1-A8
cattgggacctcgagccggccgggaatcccttcccggcagtcgcatcgcatcgtatcgcatcccctccgcctcgttccttgctcggctcgccccaacttcgctgccggccgccgccgcattcccctcggctactcgctcctcgtcgctccccggtgatgtctggcggtaacgcgtggtcgccactgccttcgcacggatttggatccgagtctagcggcatggcgaatcgcgccggcgagcctgtggcgaggaccaacagcgatggcggcggcggcggcagcaaggactcgggcagcttcgagtgcaacatctgcctggacctggcgcaggaccccgtcgtcaccctatgcggccacctcttctgctggccctgcctctacgagtggctccacgttcacgcgcactctcaggagtgccccgtctgcaaggccgtcgtcgaggaggggaaactcgtccccctctacggccgtggtggcagctccgccgtaccccgtgcaaggtcggtggccggtgtggaaatcccgagcaggccgaccgggcagcggccctccactgccccgcagccggatcacaataaccattacccgcacccgaacccctgggtccatggtgctggcgccccccctg

SEQ ID NO: 4137 - DNA, 537 bp, Zea mays
  Clone ID: TF_LIB4826-003-R1-N1-E5
ccggccgggttccccggcagacggcagtcgcatcgcatgccctccgccttgttccttgctcggctcgccccaacttcgctgccggcggcagcaaggactcgggcagcttcgagtgcaacatctgcctggacctggcgcaggaccccgtcgtcaccctatgcggccacctcttctgctggccctgcctctacgagtggctccacgtccacgcgcactctcaggagtgccccgtctgcaaggccgacgacgaggaggggaaactcgtccccctctacggctcgtggtggcagctacgccgcaccccgtgcaaggtcggaggccggtgtggaaatcccgaacaggccgaccgggcagcggccctccactgccccgcagccggaccacaataaccattacccgcaccacaacccctgggtcaatggtgctggcgccgcccctgtggctaatggtaggagggggagttaccctttatcggccgccatcggagggctgatcccgttgatgagcttccgggggccgggattcccgcaagcgact

SEQ ID NO: 4138 - DNA, 663 bp, Zea mays
  unsure (1)..(663): unsure at all n locations
  Clone ID: TF_LIB4828-091-A1-N1-E3
ctcgaggccggccggagacggcagtcgcatcgcatcccctccgcctcgttccttgctcggctcgccccaacttcgctgccggcggcggcagcaaggactcgggcagcttcgagtgcaacatctgcctggacctggcgcaggaccccgtggtcaccctatgcggccacctcttctgctggccctgcctctacgagtggctccacgttcacgcgcactctcaggagtgccccgtctgcaaggccgtcgtcgaggaggggaaactcgtccccctctacggccgtggtggcagctccgccgtaccccgtgcaaggtcggtggccggtgtggaaatcccgagcaggccgaccgggcagcggccctccactgccccgcagccggaccacaataaccattacccgcaccagaacccctggttcaatggtgctggcgccccccctgtggctaatggtaggtgggggagttacactttctcggccgccatcggagggctgttcccgttgctgagcttccaggtgcacggattcccgcaggcgactgcctatgggcctgctgcagggtttccttatgggtacggncattctttccatgggtggcatggccatggcttcccgcgccaggcacacaaggccagcaagtcgatgcgtacttggaagtgctgctgct

SEQ ID NO: 4139 - DNA, 1838 bp, Zea mays
  Clone ID: TF_ZmC4170_1
gtcgtgtccgttcgcgatcgggcaaatctgcaaccctttcctcttcgtccccccgctcggtcggtgccccaagccggagtacggagtacggcaatcgcacccccgtcgtcccgttccttgctcgccgtgttggggtccggacgcgtggggaagtcccaatttccccttcgcctttgtcttcccgctcccgtcccgaaatccgcccgccgattaagcttgcttgccctagcagatcgaagcactagccctagccctagccgaggagcgcgcccatggccgccgcggtcgtgggctgaggggccgcggctctttgcatggggtgaggaagcggcgtcccgaggcgcgggaatggaccctagcctgaaggaggaggtgatgaaggcggtggaggaggcgaggtccgcgtcggtgccgcggtgccgggtggtgcgcatcatcgtgcacgacgaggacgccaccgactcgtcctccagcgaggacgaggacgaggacgaggcgggggagcgcgcctcgccgcatccgggctcgccgtcggcgtcggcgtcggcggggagcgtgaagcgcagccgcgtgctgctccagtccgccgggtgcggcgcggaggaggacgaggaggaggaggaggagggggaggggccgggcgggttagcggctcggggtcgggggtggcggcccggccttccccggcagacggcagtcgcatcgcatcccctccgcctcgttccttgctcggctcgccccaacttcgctgccggccgccgccgcattcccctcggctactcgctcctcgtcgctccccggtgatgtctggcggtaacgcgtggtcgccactgccttcgcacggatttggatccgagtctagcggcatggcgaatcgcgccggcgagcctgtggcgaggaccaacagcgatggcggcggcggcggcagcaaggactcgggcagcttcgagtgcaacatctgcctggacctggcgcaggaccccgtcgtcaccctatgcggccacctcttctgctggccctgcctctacgagtggctccacgttcacgcgcactctcaggagtgccccgtctgcaaggccgtcgtcgaggaggggaaactcgtccccctctacggccgtggtggcagctccgccgtaccccgtgcaaggtcggtggccggtgtggaaatcccgagcaggccgaccgggcagcggccctccactgccccgcagccggaccacaataaccattacccgcaccagaacccctggttcaatggtgctggcgccccccctgtggctaatggtaggtgggggagttacactttctcggccgccatcggagggctgttcccgttgctgagcttccaggtgcacggattcccgcaggcgactgcctatgggcctgctgcagggtttccttatgggtacggccattctttccatgggtggcatggccatggcttcccgcgccaggcaccacaaggccagcaggtcgatgcgtacttgaaggtgctgctgctggcagttggtgtgcttgtaattgccagcctaatcgcattttagattatgtatggctggcgatgtcgctgatccttgttggtgtgtaccgtagttctagcatcattgcatcttagatggctcccaaagtttgatgtcaatgtgtagagtattgtggatgcttcggctagtaatagtacttgtgataattggtggcagctgttattcattgtgtaaagttgctatcgaaaattataggtgcatctgttgtgttcatgccttgaactttggtcatgttcatatttcttcaatgaagtttccctggaatgttctgttaaaaaaaaaaaaaaaaaagcggcc

SEQ ID NO: 4140 - DNA, 1251 bp, Zea mays
  Clone ID: TF_ZmC4170_2
tggggcctccggccgggaggtttacgggtcaccagtctcgtcgtgtccgttcgcgatcgggcaaacctgcaaccctttcctcttcgtccccccgctatctcgttgccccaagccggagtacggagtacggcagtcgcacccccgtcgtcccgttccttgctcgccccaacttcgccgccgcatccccctcggctgctcgctcctcgtctgcccctagtgatgtctggtggtaacgcgtggtcgccgctcccttcgcacggatttgaatccgactccggcggcatggggagccgcgcaggcgagcctgtggcgaggaccaacagcggcggcggcagcagcagcaaggattcgggcagcttcgagtgcaacatctgtctggacctggcgcaggatcccgtggtcaccctctgcggccacctcttctgctggccatgcctctacgagtggctccacgtgcacgcgcactcccaggagtgtcccgtctgcaaggccgtcgtcgaggaggggaagctcgtccctctctacggccgtggtggcaactccacctcaccccgtgcaaggtcggtggccggtgtggaaatcccgagcaggccgaccgggcagcggccctccactgccccgcagccagaccacagtaatcattacccgccccagaacccctggttcatgggcgctggcgccccccctgtggctggtggtcggtgggggaattacactttctcggcggccattggagggttgttcccgttgctgagcttccaggtgcatggattcccgcaggtgtctgcctatgggcctgctgcagggtttccctatggatacggccattctttccatgggtggcatggacatggctatggcttcccgcgccaggcaccacaaggccagcaggttgatgcgtacttaaaggtgcttctactggtagttggtgtgcttgtaattgccagcctgatcgcattttaaattatgtaaggctggcgatattgctgatccgttggtgtgtaccatagttctagcatcattgcatcttagatagctcccaaagtttgatgtcagcgtggagataagtagacaagttgtgataattggtggcagctggtattcattgtgtaaagttgctatcgaaaattataggtgcatttgttgtgttcttgcgttgaactttctccatgttcatgtttcttccaagaaatttgccagcaatgttctcttcttcccaaaaaaaaaaaaaaaaaaaaaaaaacccaccac

SEQ ID NO: 4141 - DNA, 861 bp, Zea mays
  Clone ID: TF_ZmC4170_3
ttgggtggtacccgcggccggccgggcgttccggttaccagtctcgtcgtgtccgttcgcgatcgggcaaacctgcaaccctttcctcttcgtccccccgctctctcgttgccccaagccggagtacggagtacggcagtcgcacccccgtcgtcccgttccttgctcgccccaacttcgccgccgcgtccccctcggctcctagtgatgtctggtggtaacgcgtggtcgccgctcccttcgcacggatttgaatccgactccggcggcatggggagccgcgcaggcgagcctgtggcgaggaccaacagcagcggcggtggcggtagcagcaaggactcgggcagcttcgagtgcaacatctgtctggacctggcgcaggatcccgtggtcaccctctgcggccacctcttctgctggccatgcctctacgagtggctccacgtgcacgcgcactcccaggagtgccccgtctgcaaggccgtcgtcgaggaggggaagctcgtccctctctacggccgtggtggcaactccacctcaccccgtgcaaggtcggtggccggtgtggaaatcccgagcaggccgaccgggcagcggccctccactgccccgcagccagaccacagtaatcattacccgccccagaacctctggttcatgggcgctggcgccccccctgtggctggtggtcggtgggggaattacactttctcggcggccattggaggggtgttcccgttgctgagcttccaggtgcatggattcccgcaagtgtctgcctatggtgctgctgcagggtttccctatggatacgtacagtcattccatgggtggcatggacatggctatggcttcccgcgc

SEQ ID NO: 4142 - DNA, 919 bp, Zea mays
  unsure (1)..(919): unsure at all n locations
  Clone ID: TF_ZmC4170_4
cccacgcgtccgcccacgcgtccgcccacgcgtccgcccacgcgtccggttcgcgatcgggcaaacctgcaaccctttcctcttcgtccccccgctctctcgttgccccaagccggagtacggagtacggcagtcgcgcccccgtcgtggcgtccgtccggagacggcagtcgcatcgcatcccctccgcctcgttccttgctcggcagcaaggactcgggcagcttcgagtgcaacatctgcctggacctggcgcaggaccccgtggtcaccctatgcggccacctcttctgctggccctgcctctacgagtggctccacgttcacgcgcactctcaggagtgccccgtctgcaaggccgtcgtcgaggaggggaaactcgtccccctctacggccgtggtggcagctccgccgtaccccgtgcaaggtcggtggccggtgtggaaatcccgagcaggccgaccgggcagcggccctccactgccccgcagccggaccacaataaccattacccgcaccagaacccctggttcaatggtgctggcgccccccctgtggctaatggtaggtgggggagttacactttctcggccgccatcggagggctgttcccgttgctgagcttccaggtgcacggattcccgcaggcgactgcctatgggcctgctgcagggtttccttatgggtacggccattctttccatggggtggcatggccatggcttcccgcgccaggcaccacaaggccagcaggtcgatgcgtacttgaaggcgctgctgctggcagttggtgtgcttgtaattgccagcctaatcgcattttaaataatgatgngctggcgatgtcgctgatccccttgntgggggtgtaccgtagntctagcatcatggcatcttagatggctccccaagtttgat

SEQ ID NO: 4143 - DNA, 760 bp, Zea mays
  Clone ID: TF_ZmC4170_5
actccatagggcgattgggttcctcgaggccggccgggaaaaaactcccagtctcccactcgctgcagtctggcactgttctcgggagaggcgtattgctgtcctcccgcaccgcaccgcaccgcaccacgttagcggctcggggtcgggggtcgggccaatcccttccccggcagacggcagtcgcatcgcatcccctccgcctcgttccttgctcggctcgccccaacttcgctgccggccgccgccgcattcccctcggctactcgctcctcgtcgctccccggtgatgtctggcggtaacgcgtggtcgccactgccttcgcacggatttggatccgagtctagcggcatggcgaatcgcgccggcgagcctgtggcgaggaccaacagcgatggcggcggcggcggcagcaaggactcgggcagcttcgagtgcaacatctgcctggacctggcgcaggaccccgtcgtcaccctatgcggccacctcttctgctggccctgcctctacgagtggctccacgttcacgcgcactctcaggagtgccccgtctgcaaggccgtcgtcgaggaggggaaactcgtccccctctacggccgtggtggcagctccgccgcaccccgtgcaagatcggtggccggtgtggaaatcccgagcaggccgaccgggcagcggccctccactgccccgcagccggaccacaataaccattacccgcaccagaacccctggttcaatggtgctggcgccccccct

SEQ ID NO: 4144 - DNA, 810 bp, Zea mays
  Clone ID: TF_ZmC4170_8
ggaccctcgggctggccgggaccccacgcgacgcgtgggggttcaccagtctcgtcgtgtccgttcgcgatcgggcaaacctgcaaccctttcctcttcgtccccccgctctctcgttgccccaagccggagtacggagtacggcagtcgcacccccgtcgtcccgttccttgctcgccccaacttcgccgccgcgtccccctcggctcctagtgatgtctggtggtaacgcgtggtcgccgctcccttcgcacggatttgagtacgttctctcaagcaattgtttgcgcgatggtcgctccattgcctgtttattcggatctgttccgtccacataactctctctttgatccacgcataacgcattgggtattgaacgaattgcatctactcctgattgtggcagcgacgactcctgcttgcccttttttattttgctcgtgtcgtcggatcgtggcttgattgatctccgcatcccgcagatccgactccggcggcatggggagccgcgcaggcgagcctgtggcgaggaccaacagcagcggcggtggcggtagcagcaaggactcgggcagcttcgagtgcaacatctgtctggacctggcgcaggatcccgtggtcaccctctgcggccacctcttctgctggccatgcctctacgagtggctccacgtgcacgcgcactcccaggagtgccccgtctgcaaggccgtcgtcgaggaggggaagctcgtccctcttacggccgtggtgggcactccactcaccccgtgcagggtcgtggccggtgtggaaatcccgagcaggccg

SEQ ID NO: 4145 - DNA, 520 bp, Zea mays
  Clone ID: TF_ZmC1176474_1
atacatttttacgtccacgccgcgcgtgtgtgtgtgtgacaatgggagccatgccctgtatctgtaaatgcgtactgcccaagacgaatagaaaaaagattaaggtatgcaagaaagaaccaggtgccctgcactcctactatcctagaatgctctgctcatggtatggtcggggaatcgtgtgtgtcgctgaaagacaccctccaaacgaaacgcgcgcggcggcggcggcggcggcctagaccgcgcggcggcacagcgggcacgacgcgtgccggagcagccagacgtcgatgcaaggcaggtggaacgtgtgcccacactccggcaacctccgcgccgtctcgccggcctcgaagtcctgaaggcagatggggcagccgatgggctccccggaggcgtcggtgacggtactctcggtgacggccgtgacggggagcgccgcgatggcggcggctggcatgcccgcggcggccgtctcgaacatgtccgccagtgtcggcgccgtgtcctgcgagtc

SEQ ID NO: 4146 - DNA, 807 bp, Zea mays
  Clone ID: TF_ZmC588778_1
ctcgcggccggccgggactctcgatctcactccatccccagtcactcgtctcactgcgaccgaaacagcgcggcctcactaaactaacccagccatgctggccgtgacggtgagccaggttgtggcgctgctctccaaggcggcgggggccgaggccgagcgctggcggcgacgttgcggcggcggccacgaccgctcggcgccgtcgccggcggtggggtactgctgcgtgtgcatttcggcgtgccgcgacgacggggacgacgtccggaggctgccctgcggacacgccttccaccgcgactgcgtcgaccgctggctcgcgcgctgccgccgcacgtgcccgctctgccgcctgcacgtggccggcggacctaccgtgggtttcgtcgaccagcagcagcttcagctcagcgacgacctcgtcatctggttctcttcgctcttcgtcgccggcttgtagttgtaggtagctacagggctcgccccgcccgcgcacgcacccgccgtagggataagctagcaatgtgcctctgccaactgcctgcgtacgcgcataaaagtattaaagcttttcctgtggttattaaaaaaaaatgttcggaggacaaaagtctcttcggtcctgctacatcatttctatatcgactcctccaaatctaccgcttggtttaaattatgtaaaccaacacgttgtatagtggaagagttgttttcgaaatctatcgtaactgcttccacaatgtatataaagatggttggtttaattccctgataaaaacctcctcaacggcaacctttattttt

SEQ ID NO: 4147 - DNA, 1937 bp, Zea mays
  Clone ID: TF_ZmC15150_3
gtaccctccagacccccaaaaggcaatgcggccctcgatgctcgccgggctgcctcgtccggtcctctcggctctcggtgtgggaagggaaccaaaccgagacggaggcggagtacgacgcctgccttccctcttccgccgagcgcccgctgcgtcattctcgtccctcctcttcatcttcatcggccaaccgattgccgctgaccccggccatcggcgactgtcccccggtttttctttaacgatttccgattcgattccatggccggctggaccgattccaccggcagcggcggccgaggatcaggaggaagaggcttcacgacaccccgctatactactaattccaccaatgacatgatccatggaggtaccagcggcggaggcggaggtagcggcaggtggagaggaggcaggtcaagggggtggccgcccccgcagcctcaccatcgctaccgccgtgtggatgccgttcatcgtgactccgcgcctgtctctctatcggagctacaggcggcctcctccacatccagccgccaccggtaccttactcgttccatctcagcggacaagtcttccgcctcgggaaccgcgggttcaacagataccaaggagcctgacgacaaggctaaccgcagcgctgccaactttgagtgcaacgtctgctttgacatggccgctgaacctgtggtcaccaggtgcggccatctcttctgctgggagtgcctctatcagtggctccatgtccattctcaccaccgtgagtgccctgtctgcaagggtcaggtagctgatgatgctatcatacccatctatgggcgtggtggatccgcagcctctgtggacaacgctcccccaaggcccactggagccagagtagagagcacaaggcagcaacaacaacagctgccaattttccatcctcccaatgtttttgaattcataggccttggcttggccgctgcagccagaggagagcactccaccgagcagctgctgctgccaactttctcccaccccacggtgtttgatgatgacgacgggcatgaatgggacatggatcttgtgaacaacggcattgatcctttggacctcataactcccggcacccaagacttggacatggatgattatgatggcactattgatttcgatgatgatgattatgaatatgactaccatttggcgggtgctacgttgtttgcttctgctgggactgaggccagcaatcccagctcttcacaagcacatgctggtatgatcaatattagggacaacattcttggcactgccaccagcatctatcatcagcaagagtttggctactctggcgtgagacctcataataacaggggacggcgccggcaccgtaatcgcgcaagggcatcagcaaatcactcaggcgctgatgaaatggtgatcgaggataccagtcatttctaccttcagaacggtggcagttctaacattagtgcaggcgctgcttttcggcccaacggtggctggactgggagaagaggaagaagcaacctgaactcgaattcaggtggtggaagcaacctgaactcaaactcaggtggtggaagcaacatgaactcgaattcaggtggtggaagaggagggattcagggtaccagaagacagaggacaaattacaactgatagtgatgttgggacatgcttcgaaataggagcgataactgatgagataaacaaacttaatcctttgtcttccattttttttctttgtttctctcgtattattaatccttttgtagcctgtggctattggcaccttgtcaaacatcttctctccgtttcccctgaattgttatgcctggttaatgttacttatttttagtaccaccatccacaaaaaatctaaggaatataggatcctggttaagttgcggaaaaaaaaaaaaaaaaaagcggcc

SEQ ID NO: 4148 - DNA, 828 bp, Zea mays
  Clone ID: TF_ZmC3359_1
ggcggcggcgtacgaggtgctcgtagcaggcggggaggggctgttcctcaagaccaagcccccggccgccagatccgccgtcgaggcgctcccgtccgccgtcgtcgcggccggccaggaagtccagggggatgagtgcgctgtgtgcaaggacggggtcgcggtcggccagcgcgtcaagcggctgccgtgctcgcaccgctaccacgacggctgcatcgtgccctggctccaggtgcgcaactcgtgcccgctctgccgcttcgagctgcccaccgacgacccggagtacgagtcctggaaagccggccggaccgacgccgcgtgaaccggccaaccaggcagtggccgcatgctcttatggtatggttttattgatagtgttgtatgtatgggttgggtttgaatcgggtgctttggttataaggttgctactcagccgtatcaaaggcaaagtatagaggcagtagatgcagagatggtttttgatcggtttcctttttctccttaaagagggactcatgaagtttttccaagtgaccgaggttggcatatacttgttagttgttactaaaaaaaaaaaaaaaaaaagcggcctactgctgtatttattctaaatgaatccagagaggttagctggatatcttggtgcagggcagctgtatatcctgatgcaatgggacgatctacttgctagatattatgatgttacattttaactgatcgttgtttggtgactctctaatattatgtctagtttattagagcatcaaattacatttccacatcttgtttatagtggcacaggtgatacccattgattccctt

SEQ ID NO: 4149 - DNA, 567 bp, Zea mays
  Clone ID: TF_LIB5072-065-A1-XP1-E8
tcgggatggtcatcgtcctcgccgcgctgctgttcgcgctcctcttcgcgctgggcatcaactcgctcgcgcgctgcctcatccgctgggcgcgccgcgcgccggcagcggagggcggcggcggcgggctccagaagcgcgtgctccggagcatgcccgtcgaggtgtacggcaccgcggccgtcaccgtcgccgacgtctgcgccatctgcctcggcgagttcgcggacggcgagaaggtgcgcgtgctgccgcgctgcgcccacggcttccacgtccgctgcgtcgacacctggctcctgtcgcacgactcctgccccacgtgccgggcctccgtgctcgacggcgcaaaggccgccactcccgccggtgggggcagccggcggcaggggccgcagggcagcgaggctgctgccatcgccgttgtcattggatgacgtggacaggaagggcccgcgtgcccattggtggtggtggtggagccacacggcaggtatgccagagcttccttccgtggttgggagatattttgctgtgaaagaccgaccagtgggcccagaccctttg

SEQ ID NO: 4150 - DNA, 1137 bp, Zea mays
  Clone ID: TF_ZmC17955_2
cattgggtacctcgaggccggccggggcttttttctttccgctccccacacccctgttcgtggcggcctccgcctctccctctcaggctctcgccaccgtctgcaagtggttgccgcggcgccgctcccccctcgtggtggcggtggacgactacggtcggggatcgacggcttcttcgtccgttggttgggaggcgaggcgatacatcgaccaaccaaaagaaatgtcagctggcaggcaagcatactggtgttaccagtgccgacagagggtgaggccacggggccgggagatggtttgtccctactgtgattctgggtttgtggctgaaatggatgatgtagatgctctgatgagccacttcgttgggacggatcctgatttccatcgcgacccacggttcgggatcatggaggcgatctccgccgtgatgcggcatggtatggcagggatgaaccgggaggttgatgtcagagggaggccgaacttcttttcagacctggagatggagttcggttcagggccatggctgctcttccgtggccagctccccggccatctcaccgaggacaacggtttcgatgttttcgtcaatggacgacgtggcggcggcggcggcggcggcggcgtcggccatgaggagggccaacatcgcggactacttcgttggccctggactggatgatcttatcgagcagttgacccagaatgatcgccgaggaccaccacctgctgcacagtcctcgatcgacgctatgcccacagtgaagatcacccagaggcatctcagtggggactcgcactgccctatctgcaaggagaagttcgagatggtatccgaagaagcaagagagatgccatgcaagcacctgtaccactccgactgcatagttccttggttagagcagcacaattcctgccccgtttgccgttacgagctcccgtcacagggctctgccacgggtgctagctgctcgcgcgcgagatcaaccgaccagagccagagctccagtagttcaagcagcagcgggagaaccagtgggcgtcaaaggagaaaggacccgttctcgttcctgtggcctttccgctcatcaagtagttctcgctagattagcctctggtatctttgctcaggt

SEQ ID NO: 4151 - DNA, 1224 bp, Zea mays
  Clone ID: TF_ZmC22858_1
tgtccggggaggggagtccgtgatgagtgatgaccctaccagaaatcgacccgatacggctccagcgccagatcgtccatcaatagcccgaatcacactcatcacaagcctcaaacttttccaaaccaatttagatgcggcgtgagtgctaaagcgctctctggactctgtttcgcagtggccgcagctgcagcgtcccttccctttttgccatccagcatcacctgtgccgccggcgcgtaattgcaccgcggtcactggttagtaggaagaagggaaggaggaggggggagcggtgtcggggtatcgtctcgtgcccatgggcgtgcacgccaggtcgatgagctggtacatggggtcgccggcgccggggagcgccgccgagggcgaggggcagcgcgcgctgagaagcagctccggtggcagcgacggcagcttcgacaccaacatggtcatcatcctcgccgcgctgctgttcgcgctcctcttcgcgatgggcctcaactcgctcgcgcgctgcctcatccgctgggcacgccgcgcgccggccggggaggacggcggcgccggcgggctaaagaagcgcgcgctccggagcatccccgtcgaggtgtacggcgcgtgcggcgccgacggggcggcggctgtcgccgccgacgtctgcgccatctgcctcggcgagttcgcggacggcgagaaggtgcgcgtgctgccgcgctgcgcccacggcttccacgtccgctgcgtcgacacctggctcctgtcgcacgactcctgccccacgtgccggggctccgtgctcgacggcgcaaaggccgccgcctctgctcccgccgccgggggcaaccggcggcagggaagcgaggctgctgccatcgcaattgtcattggatgacgtggacgtgtgggggcccgcgtgcccactggtggtggagccacacggtatgcgagactagcttcgttccgtggtagtgagatattttgctgtgatgagaagccgacgagtcgcggcggcccatctctcagtcaagactacagcatggccttcaggatattatcccttcggtctgtacttgtgcatggtcgtcgcagctgatcctgtttgtgtatactaggagtggatgacggggtatgccgctataggcttgcaataatacagttttgtttgtacgctggcccacttgcctagttgaacgctacatgcttggagtgtactgctcgcta

SEQ ID NO: 4152 - DNA, 426 bp, Zea mays
  Clone ID: TF_LIB3228-004-P1-K1-F1
gctttggcttgtgtgattggaattgctgtttgttgctgccttccgtgcattattggtatcttgtatgctgtaactgatcaggaggagggagcatctgaagatgacgtaaacaacctttccaaattcaaatttcggacaatgagtgatgcagacaagctagctgccggcattgcagcacctgtgggtggagtgatgacagaatgcggagtgctgtatctgcctatgcccgtatgaagatggcgtggaactacttgagctcccttgcaaccaccattttcactgcagctgtatagacaagtggcttcacataaatgctacatgcccattgtgcaagttcaacatcgtcaagagcaatctccacagagaagaggtctaggtcaataaggggaaaaaaataatcattgcaacacatttcggcatgttcca

SEQ ID NO: 4153 - DNA, 2281 bp, Zea mays
  Clone ID: TF_ZmC5544_1
ggccgggggctctagctctcactctctcaggcccatttctgacgggttatttcgcggcgcggagacgccgaggctcccgagacccgattccccgtcccagagacgagagacggcacaacccttgctgccgtcctggtcgccacacggccacaccaacccaacacctcttcttcctccgctctcagcttaccccaccacaggcgagggaggcgactccttcctcgcggctacccgctccggccccgatcgcatctcctttgcacgccacggcccgcgcgcagtgtccaccggcacggccgtcctccgtgtgtgggggcgcatctggtgctagcttgccgggctagggtttggcttggcctcgtctaccgccccgtctcgtctgataggcacaggttccgtgcacgcgatcgtcgtctctccatccgttgtgactgcttgccgtcccccgcttgcttcgtcctgctacgggagggccactgctgccatcgcgtccaccgacgaatttccccacagagcattagagcaattatcttggagttgcagatctgcacctgaagattcatattgaaatctggaagcttctgctgttgagtacagagaaatatttcttgccttttgaggaagactgcagagcccctaaatgtgaaacttgtttcttttcttgtctactcctgaatgctgacgaactcagcctctcacgttacttagctgaaggtcgtactggtacagacaccgaggatggagcaagcaacaggtgtaagtggtcctgaacacataattgatattccaagggaaattggtcctcctgcttcggtttctcgtagtgctggtagagagaaccatgaagaatcgaatcctgtggacaggccttcaacaagagctctagtacctgccttgcaggcaccatcagcaataggtgctgtacctattacagggcatacttcaggcactaggagaaatgacaactatgttcgtcggcacagaagcccattgaattctggactgtggatttcaattgaagttattgttaactttagccagattgttgctgccattgttgttctttgtgtgtcaagaaaggaacacccacaagctccattacttgagtgggtcataggttacactgttggttgttttgcaacgttaccccatctctattggcgctatatacaccgtaatattgtaaatggtgagcatgagtcatcacatacacctcaagggtccgctcataacaactcaaatgaagcgactcatgctgcaagtgcatcagaacgccgtagaaatgctgcccgaaatgctgtgcttgctaatcctaggatcaatgcgctgtttgaccacttcaagatggccctggattgtttctttgctgtctggtttgttgttggaaacgtgtggatatttggtggccgttcttctgctgctgatgcaccgaacttgtacaggttgtgcattgtgttcctcacttttagttgcattgggtatgccatgccattcatcctatgtgcaatgatatgctgttgccttccctgcattatatctgttatgggttttagagaagatacaaacaatacaaggggtgcttcctcagaatctatcaatgctttgcctacatataaattcaaaatcaagaaacgtcgccatggttcaggcagtgaaactgaaggccaggaaggagggatattggctgcaggaactgacaaggagcgatcactctctgctgaagacgcagtttgctgcatctgtcttgcaaaatatgcgcacaatgatgagctccgtgaacttccatgtgcacactgtttccacaaggactgtgttgataaatggctcaagataaatgcactttgccctctgtgcaaatctgagatagtgagctcgtctggtacttctgatgcccgccaatcagaccagaacaccgttcctgtgcaggagatcgaaatgcattaggttggtctgttcccgcagcttatcacataaggatacatctgatttgtggctctcaatcttcatgtataaagttggagattgatgtatggattgtagagacgcgtaggttttttttttgtatttaacactgctatcttggagaagttacagctattctcgctgtcacccaactatggcaagccaatactacccaggttttcccccatagcgtgggctgcacctaatgttctgctcttgatggcattgcatgacttctttcgagtttctagagcgaaataggcaggcgagtttctttaagcgtgtatgtggacgtgtaaagtaacgttttgcattgtag

SEQ ID NO: 4154 - DNA, 692 bp, Zea mays
  unsure (1)..(692): unsure at all n locations
  Clone ID: TF_LIB4732-093-Q1-K1-A9
gatcgagtcgaggcaccaccgctgcaccccagccatggactggtgcctctgctgcatccgcgtgtacacgctgtccatcgccaactcgttgtacctgggcgtcacggggattctcgtctacgtgctcgcgcgatcgcactcccgcaccacgtccggcatcgtcgtggcctccgtcttcctcgtcctctgggtgagcatcggcgccgtcatctacgcctccttgtgtttcgccttcttcccgtgggctgcgcttgagaacgcgcgcctctgctgcgtccgttgcaccgccgggtggctgcggcgcccaagtggcggcggaggcagcgccttgccgcagtatgcggcgaggagtcggagtcatgccatgaacgagcttccgggggagcccacggtgcgtgccggcgaggcgcgcgtagccgcagcggctgacatcccggcgtacgagctgcgcgacgacgcctggcaggggcagcctgatggctcgtctgattgcgcggtgtgccttggcgagatggtcaagcggctgccagtgtgcctccacatgttccaccagcaatgcgtcgacaaatggctgaacaacaactcgacctgtccggtgtgcangnntgcgtcgtgttcgcgccgctgccgtcgttaaaatggtggtggaccttgatctatttctcatttccnttctctgagttctgtcttct

SEQ ID NO: 4155 - DNA, 1758 bp, Zea mays
  Clone ID: TF_ZmC348_1
cacccgtcagccgcggtctgacgaggcggggccgtttcctcgccttttcccttgccgtggacgcgtgccgcggtcgtcgccggccgcgggaggagatcgattccacgcggcggacttggtctacagtctactaatctattctctatctctagcagtggtaccatttggcggcgatcgccgtgctattgcttgggccttggactgagtaggtttggaggtagcgatacgagacactcgcccccgattcccctcccgttgccgaagcctgtgttgcagggatcgttcgcggaagcggtttttgatcggagagagagaaagagagagcgagggagggaggtggcagggatggacgcggcggcagcggcggcggcgcagatggagaggcactcgtcggcggcggcgcacctggagaggcactcgtcggcggcggccttcgtggagggcggcgttcaggacggctgcgatgacacctgcagcatctgcctcgagaccttctccgacagtgacccctccgcggtgaccagctgcaagcacgagttccacctccagtgcatcctcgagtggtgccagaggagctcccagtgccccatgtgttggcaggcaatcagcatgaaggaccctacgagccaagagctccttgaggccgtcgaggaagagcggaacgacgtgcaggaaaaccacgcgcgcacaaccaccgttttccgtcacccgctgctcggagatttcgaggtaccggtggatgcagacgacgccgagatcgaggagcggatcatgcagcacctggccgccgccgcagccattcgccggtcgcaccgccacgccagaagagaaggccgccgcagcagcagggcggcggcagctcatggccatggccacccacaaccacaaacacaagtcctgttctttccgtctgctggcgaggccactcctggtggttctggttccccgtctccgcatccgcggcaagaacatgctgcttcttctgtggtttctcctccgccattgcccgccgttgcctccgcagaaggaacggatgcagacagtactgcctcggttggtggcgctgtcgggccagatgacagtgtttccaggagccagtcttcgcctgtcaaccacgatgaagctggaccatctgctgacgcgcagtcattctcagacacgatcaaatctaggctgcagtcagcctatggcaggtacaaggactccataacgaagagcacgcgcgggtggaaggagaggtggttcgcgcagagcagcgccatgtcgaatcttggctcggagatgaggagggaggtcggtgctgggatcgccgccgtttcccgcatgatcgagaagcagctggagacacggccggatgggagtgggacagcgccgtcgcctgctaccgcttcgtctccagctcacgcccaccctggttcggatgcaagtagtcagggtcagggagctgctgttcccgctacacctgcagccgctctgaataacgctacgcctgcagctgctgctgctctgaatgacgcctcgtcgtcttcgacagcttgaacgcgcgccaggatcatgttcagtgagtttgcactaggtgtggttttcaagtgctttagatgcttgcaatgcaatgcgtcgcgtgtatagtcagtttgtcaattagcctcattggtagccagtgaaacagatagtggatgccaagctactgttcgatcagtgaatgtttcagaataaagttggatacttggatgcgcacaagaacacccgagagaccac

SEQ ID NO: 4156 - DNA, 914 bp, Zea mays
  unsure (1)..(914): unsure at all n locations
  Clone ID: TF_ZmC5151_3
ccgggcccaaatcgcgccacccattgttgtcgcttctcacttctcactcaccaaccaacccaaccgagcaacttggctcgtaccgtacgtactacctgctccgacacgccgaggagctagagaggaccgcgcgcgtgctgctgacctgcgggagctaggacagacacgatacgacagataccatgtcgacgacgacgacgaaggcgagcgacccggggtccgcgtggttcggcagcggtgcacggacccggtcggcggcggggataagccacaacgcgcggctcgtcaccaccgcggtcgccgcgttcgtgtccgtgctcggcctcgccctcttcctccacctctacgtctgccacgtgcgccgccgcaaccgccgccgcgcggcggcagtgctgccgacgaccacgcncccgcggggnnggggnggcggccccgaagcgcgggctggatcccgcggccgtcgcggcgctgccgaccgtcctctacaggacgcgggcggcgccgacgatggcgccgagtgcaccatctgcctcggcgccgtgcaggaaggcgagctggtgcgggcgctcccggcctgcggccacgtgttccacgtcccctgcgtcgacacctggttcgcgtccagctcgtcgtgcccggtctgccgcgccgaggtcgagccgccgccgccgccggcactgagctcatcggctctgttcgtgcaggcggagaaggtggtgcaggacgccgtcaaggaggaggccggcagctccacgccggagagggggatcggtgcctgcgcgtcgctgatgaagatgctcagcagggagaggccggcgccgcggaggccacacgccgacgccggggacttggacgacttggaacggcagcagcattctgttgccgtcaataattagcctattgttttttattag

SEQ ID NO: 4157 - DNA, 962 bp, Zea mays
  Clone ID: TF_ZmC17955_3
cctcgaggccggccggggcggccttcgcccctccctctcggctctcaccaccgtctgctggtggttgccgcggcgccgctcctccctcgtggtggcggtggaggactacggtcggggatcgacggcttcttcgtccgttggttggcaggcgaggcgatacatcaaccaaccaaaagaaatgtcagctggcaggcaagcatactggtgttaccagtgccgacagagggtgaggccacggggccgggagatggtttgtccctactgcgattctgggtttgtggctgaaatggatgatgtagatgctctcatgagccacttcgttgggacggatcctgatttccatcgcgacccacggttcgggatcatggaggcgatctccgccgtgatgcggcatggtatggcagggatgaaccgggagtttgatgtcagagggaggccgaacttcttctcagacctggagatggagttcggttcagggccatggctgctcttccgtggccagctccccggccacctcaccgaggacaacggtttcgatgttttcgtcaatggacgacgtggcggcggcggcggcatgaggagggccaacatcgcggactacttcgttggccctggactggatgatcttatcgagcagttgacccagaatgatcgccgaggaccaccacctgctgcacagtcctcgatcgacgctatgcccacagtgaagatcacccagaggcatctcagtggggactcgcactgccctatctgcaaggagaagttcgagatgggatccgaagcaagagagatgccatgcaagcacctgtaccactccgactgcatagttccttggttagagcagcacaattcctgccccgtttgccgttacgagctcccgccacagggctctgccacgggtgccagctgctcgcgcgcgagatcaaccgaccagagccagagctcaagtagttcaagcagca

SEQ ID NO: 4158 - DNA, 1595 bp, Zea mays
  Clone ID: TF_ZmC42210_1
ggcgattgggttcctcgaggccggccggcagaccagtcaacgtcacctccggcagctggctaacggcgtgaccttccccctcaccgccctcctcgtgcagtctccgtcacccgcgacgtcacagctgcggcagacgccgtcccacataaaaccggcctcgccgccggccggcccttcccattcccctcccctgtcgtcgtctcccctcacccgaagccccgattcgaaaccggcggcgttcgatttggggatttcggcgtctcgctccccggaatttcttggatctgagtctgtccgccgtcttcgatttgcggctgcagtgagcctgcgagttttccggctctgatttggtcggggtcttcgatttcggggatggcgtcgtctccggtgtcctactggtgctacagctgcagccgcttcgtgagggtatctccgtccaccgtcgtctgcccggagtgcgatggcggcttcctggagcagtttacgcagccgccgccgcgcggcggcggcgggagcggccggcgcgggacgatgaacccggtcatcgtgctccgcggcggatcgctttccgggttcgagctctactacgacgacggcgcgggcgaagggctgcggccgctgcccggtgacgtccagcacctcctcatggggtccggtttccaccgcctgctcgaccagttctcgcggctggaggcggcggctccgcgtccgccggcgtcaaaggctgcggtggagtccatgccgtcggtgacggtggccggaggtggtgctcactgtgccgtgtgccaggaggcctttgagcccggcgccgccggccgggagatgccgtgcaagcacgtctaccaccaggactgcatccttccctggctctcgctccgcaactcctgccccgtctgccgccaagagcttccggccgcagccaccccagatgcggaggcggatgctggcctcaccatatggcgacttccacgcggtggattcgccgtagggaggttcgccggagggcctagagagcagctcccggtcgtctacactgagctggacggcggcttcagtaacggagttgggccgaggcgggtgacgtggccagagggagatggccaagtggatggcggtgaaggtcggattcgccgcctacttaggaatctatttggctgttttggtcatggcagctggccagctagttcatcgcagtcccgtagtggctgagcacagttttccttggtaacaagttttcaattgatagcactgaagaactagggctagtgtaagaatggaacccagattataatttcttggggcttttgatgtaaatgaaggcctagcattcccccttcctttgtctcatctaagaattattaagagatgtctatgagcaaacatcttggagcgagctttgcaaccaaattaggccaaacacaagtgcaagccttcaagaaaggaatagcaatgagtgttttggggaaataaatctttttcaatattttaggtagagagaacaattgttgtatttgcaaacccactgttcgtgtacatactggattggttgaacatgaattcccattctgctatgtgctatatcttatattgacatt

SEQ ID NO: 4159 - DNA, 967 bp, Zea mays
  Clone ID: TF_ZmC9753_2
ccggccgggaaaaaaaaaaaaaccttccttgcgaactccgccaccgcgtccctgcgttatagggccgtcgacgacgacgggttgcgcgtccccgcctcattcgcgcgaccatggacacggacacggacacgacgacgtccaccggctcccgcctccatcccgcggccggagcgcgcgccggcgtacgctcattggccgcccggggcgccgagagcctcgtcacctgcgtcttcgcgacggtgggcacggtcctcggcgcgatcaccggtggcctcatcggcctggccacggagacgggcgtgctgcgcggcacgggcgtcggcggcatcacgggcgcgctggtgtccatggaggtcgtcgagtcgctgtggcgctccgacgagccggcaatctggagcgtcgtctacgtgctcgatgtcatctggagcttgctcaccggccgccttgtgcgcgagaaggtggaccccgccgtgctcagcgccgtcgagagccagatgagcgcagcggacacaccggccttgcatggagaccacgccgacatcttcgacacgggcggcaccaacggcatggcgagggtcgccatggacgcgctccccgtcgtcaggttcaccgagcgcagcaacgtcgacgccaacggcgacctcatcgcctgttcggtttgcctccaggagttccaagccggcgacagcgcgaggagcctgccggtgtgccgccacacgttccacctgccgtgcatcgacggctggctgctccggcacgcctcctgccccttgtgccgccgcgctgtctaggccgcgcccgttcctctacccccaaagatagccgccacaagagctgctgacaagcgacacccgttccttcacgctgtagccgtacgcacactggcagcgtgatttttctgtagctcatcagatgattcagatgagcgttatgtaaacattggttagttaacagatgcaattggtgc

SEQ ID NO: 4160 - DNA, 948 bp, Zea mays
  unsure (1)..(948): unsure at all n locations
  Clone ID: TF_ZmC27511_1
aactgaangccacactatcgcagacaaagatcactcgcgttcggccagttcttggccccgtgcggccatgtccatcccatccatgtcgagctcgagcccctccgtggggagccctttgccgccggcgcacgacggcgggccgggcccgctcgtgtggcggcagaaggagcagccgcatccgcagccgcagcatccggactacagcttcaccggccgcgtcctgctcacggccgtcgtcatcctcgccatactcaccgtcgtcttcgtcctcatccgcctgctcctgtaccagttcgtggcgcgcggacggggccgcctggccgtgggcgtccgccgctccttcggctccttcggcatgaggagcgcccgccacgggctcgccgcgtccgcgctcgccgcgctgccggtcaccacgtaccgcgtccgcggggcggacgacgacgggcctagctccgcctccggcggcgccgggaccgggacggcggactgcgcggtgtgtctgtcggagctcgcggacggcgagaaggtgcgcgcgctcccgggctgcagccacgtcttccacgtcgattgcatcgacgcgtggctgcggtcccggaccacgtgcccggtgtgccgggccgaggtgcggcccaaggcgacggcggacacgcgcccctcgccgcctccggcgttgatcgatgccgctgggggcacgttggtcgtgaccgtggtaggcggcgccgcggagaccggggacgcacaccgcacgtccgtgctgggctccggtcaaccggccggtgccgttgggtaggtaggcaaaaacgacgttgcgactccttagcacatagtgtattatactatacatcataatacatgtaattagaaacattgtgtactactttatcttctgtaattctgtgaagatgacaccttagcatctccaacaaaaataattatccttcgcctcag

SEQ ID NO: 4161 - DNA, 1187 bp, Zea mays
  unsure (1)..(1187): unsure at all n locations
  Clone ID: TF_ZmC3483_1
ggattattnccttggcgaagaactagcccgtcatggctgtcgaaggtcaaagggctgaacttcccacttcctgatgagcatcagtcgagaaccaggcagattgaaactgatgagatgtttgcccgcagacttcaggagcagctcaatcagcaacagctaggatctcagcattccgaagcgactgatacgacaatagcctggacattacatgagcgggacgctgagcatgccagatttgctgcaagagaaggccagtctagttctagccagagggacagatcaatggcacacctatattcttatggacgtcattcacccgttcaaaattttgctccttggcatccaatcatactccaattccaatgtcaagaagaggcggcttgcaaagaaactccaactgtcctcaagcggagcaacgcaatatgcttatctctcagttaaccagaggatgcttcagagaagacatggatctacaaacgagattggctgtactggactcactttctgaagcatttaggaactgcgaggacacacactctccagattcggatgatgatgattacgaggaccaaatagcgctcggcgtcgacagccagcaaagaggcgcctctgatgatcagataaacagcctgccactatcagtaatcgagggtgaaggtcgttccgatgaaccctgcaatatatgcttggactgccctgctgctggtgattcactccggcgtttgccatgcatgcacaagtttcacaaagagtgcattgacaggtggctcgggatgaagatatggtgtccggtttgcaagtcaaatgtgttctcccagtaggccgtgagcatctcttatactttttggagcagcatcgaagctagattatagttggctgatacgaggcattgttacggctgcagtgtgtacattgcgttcttgacttgtgctctcttctgctccgtggggagcatttgaatgctctttttccgcggagagtttttttggctgtgagagaaggcacggaaaacctcattctgctattcccatttcttgtataccttatcgtaggctgatatgcccaacagtatgtcaggtttaggcggtgccataggacatgaggctggatccagtgccatttttcgatcatactttttatctattaacctgtcccagtgtnnnnnnnnnnnnnnnnnnnnnnnnnnn

SEQ ID NO: 4162 - DNA, 712 bp, Zea mays
  Clone ID: TF_LIB4756-051-R1-K1-B1
gggtacctcgaggccggccgggaaaaggttcgttaaggcttcatagccttccgacacaccaactgcaatcatcagtaaactccatttcagctcaagaaaactgctatagaagcctagaactagaagaggtacttgaggcagcgtgcctgcctgcatacgcaaccagacagccggcgagccatctccatccgagttgggcgccatgcaatttgcaatgtcaccggacaacctcctcttcttctgctccgtaacggcgtcggtggccgcctccttcgctctcgtctcgctgtgcaggcacctggcgcaccgccgaccgcagcagcccaccgcggacggcctagcgacaagctcctcaggaggctccgccgagccagaggagctgctgccgctgagcgccgttgccgcggccgtccccacgttcatgtacaaccggctggtgaggcactgcggcaagggcgcgagctggaccgagtgcgcggtctgcctcggcaccatccaggtcggcgccatggtcaagcttctgcccgcgtgcagccatgtttaccaccgcgactgcatcgacctgtggctctcgtcgcgctccacgtgcccgctctgccgctgcagggtcggtcctccctccgagacaggcgccggccaagagaccgcccgggagcttgctcaaccttcccctccaataagatgaatcctcactcgcccgtcacagatgttt

SEQ ID NO: 4163 - DNA, 1114 bp, Zea mays
  Clone ID: TF_ZmC12693_1
cattgggtacctcgaggccggccggcgaggcgtcgtcaacgagtcgggttgttacctcgaggccggccggggacctgtccacagtccaccatacatatcactctccgctccgccattgttgctccttattagtagttcgtcccgcgtcccttgacagttctatctatccccaccacaaataagagaccacctctctgccttcttctcggaggtcggagaagagctctctgcttcattcggccggtccaactccaccgaccgatccaatccaacccactgaccatggggttcccgccggtgtgctgctgcgcccccatccccaagccggtcgtcgccttctgcaacctgctcggcgccatcaaggacgccgtcctgctgacgctcgccgccgtgggcttcccgcacgacgccgcgcgcggctcggcggacgcccaccagcccgaggaggtgaagacccggctccccgccgtggagtacgcccagctcctggccgagcagcagccgtcgcccgccacccacgcggcctgcatcgtttgcctggacacgctggaggcggcggacgaggtgcggcggctgggcaactgcgcgcacgccttccaccgggcctgcatcgaccgttggatcgacctaggccggacgacgtgcccgctgtgccgctccgacctcctgccaagcccccggggccgggccgggctgctcgggctgggccggctcgccagccgtctcacgcgcgttcgcgtttggtgaggaccgtctcggaggccacttttaccttttcggtggccaggccgcggtcgcagcccatcccggtggtgccggaacggcgcggacacgttagcgacggcgaccgggccgccggatggtcttaaatctgctctgccacttgccaaccgctaatcaaccagcgggcttaattagcagcggattggcttggtgtctgacagtcgatattatgacagctaaataagcagttaaatgtttctataggattgagtatacacggcagctaaatgtttcgtatacagtggcggacgcaggacgaaaatatagtacatgaatgtcctctatccgatcctttcatatagtataacagttaaattattcatcagctgtg

SEQ ID NO: 4164 - DNA, 405 bp, Zea mays
  Clone ID: TF_LIB3066-035-Q1-K1-F7
atatgctgctgcctgacctgtataatctccgatctgggcgtccatgaggatttggatatgaacagaggcgctaccacagaggcaatcaataccttggtggcatacaagttccaatcaaagagggttcatgatggggatgtgggaggagatggtggtggagctttgaaacgttggaactgacagaaagcgagctattactagactaaaagctctatgctgtatctgcttgatcacgttttaatactacgaagacctgggcgaactatcctgtgcacatgcattccacacggaatgcatagataagtggatccagatgaacacgttgtgtcctgtatgcaaggctgagatcatgggatcataagcgtcctgtgatccatagagtgactatgaggatcccgacaacac

SEQ ID NO: 4165 - DNA, 255 bp, Zea mays
  unsure (1)..(255): unsure at all n locations
  Clone ID: TF_5761830
agggatgaagggaaccagggacgcgcgactagccgagccgtgccatgccgagtaggccggcgcgccggcgcggcagcaggtgggagcggcaaagcgggcacgtcacctcgcccaggtcgatccaggggtcgatgcatcgcgtgtggaacgcgtgggtgcagttgcccagccgccgaacctcgnccttggcctcaagccactcgaggcacacccggcacgtcggctccgcccccagccccgacgacggtgacgacg

SEQ ID NO: 4166 - DNA, 1991 bp, Zea mays
  Clone ID: TF_ZmC28561_1
ggccggccgggatacaatccccctgttcatgtgttatggcagggcatcatcataataacacacatgcctccaggatggatcatgtgaacaggttccagagtgaagcacagccttttggcccaaagttatttatgcattctagaactgatgcagcaaatggagctctaccatcaggttatgtgggcgcaccaataagaccaaatggcattccattctcaagtcacaccgggcaatctcatattcagcacagtgatgctcctggaaccatgcttgcatcctattctggctatcctcttgctggaagctccagtagcacctatgcaccacataatactcatcatctgcctgctttgagctatccacataggtctgatgataacttcattctgagttcccatatggatgacagaagggttgcactgaagcggagaaatccaattatttatccagtggatggagtcaataatgggagctgttatgctggcagttcatctaatcctcagttcccatgctacatgcctccaaatcctattcctgctcctgaaccctgccctcctcgaataacatcaaatatgggttcaagctactggactgatcagccctttggtagcaatggaggatctcagaggaatgtgagaggtcgccatgatcacaatcctatccatttgggacacaatccaggtgtagcttgcgcaacaagcagcactcatgggccaccacaccatgctaatgtaattggtcctcaaagtacagcagtgccacaaaatagagcatatttttctatacctccaagagtgactgccccaggcagcgatggaaactgtagcatggttttcagggaagggacatactactctgctccgcagaggaccaacataaatgccccccctgtcctagcacctcctggttcttctgatagtctacattttgtgcatggtgggtatgccccaagagcagcccctcctaacagcatcagcacatatcctgccccggcttttgcgactcctaacaactcagtgacagttacccatgagcctgatatcccttgctatcgacctgccgtccctggctatccgcctgctacctcagcagcagcagcagcagcaagtgttcatgctgaaggtgctgctgcatcttcgagacatctaggtcatgtggctctaggttccagtggtagtgcaaggagtagaaggctgagggattcataccatgcttttcgtccactggttattgaagaaaataacttgagaggaccagcaaccgagcgttttatgatgctaaatcagttatttatccatgaatcgagagaagattctgaccctcactgggacatgaggctggacattgatgatatgagttatgaggagctgctggctttgggagaacgaataggcaatgtcaacacgggcctagctgatgaaaaactttcaagctgtgtgacggagataccctgctgcagctctgcccgtactcatgatgataatgagagcgcaagatgtgtaatttgcctggaggattacaaattcgaggactctgtcgggaagctaaaatgcaatcacaagtatcacgcagactgcatcaagaaatggctgcaggtgaagaacgcttgcccagtctgcaaagcttctgcggcagatgacggcggaggcaccgaatgaagcgccctgccgcccccattcaccctatctcaggcgaagctgtactggctgatctggtttgctgtgtgtaaataatggtcctgaaacggattatttgtgagctgaattaaactcgacatgtaaatttaatcctcaagctagttgcaaattgatggcagcggttagccctacgtgtcagccgtctgacgtaactgcagagagaaaacgtttgcatgcatatgtacagctcgatccaatagaggttattaaatgttaacaatttattagttaaaaaaaaggtctttacgacgtccaaaaaaaaaaaaaaaaaaaaaaaaaaaaaatttaataaaa

SEQ ID NO: 4167 - DNA, 1299 bp, Zea mays
  Clone ID: TF_ZmC3771_1
ggtacctgagcacacgccggcgctcttcttctctttcccttcgcattaatggccgctctctccctatcccctttcgtctcgctctcggagtaggacactcgcccgcttccggcttaaccttcaagattctccctcctcctcctacttcttcccgcttgggcgggcgcggcaccttccggttctgggcctcctatatatatacgcgcgcgaccgtcccccttccatactccctagcatgctcggctcgcaccccggattgatcgagctcgcccgtcgccgcgatggattcggtgccttccccctcctcttctacccgggccaccgctgctcccggtccctgctgccgctttgacgcgctgcggagggcgtgcgccaggcacgccgccgccgccgcgcgggccgccgggtgggcgctcggcgcgctgctcacctgcgtcttcgccgtcgtgggctcactcgtcggaatcttcattggtgccttcatggggatgtctacagaaagcggcatgttccgcggggctggtgtcggagcagtctcgggagcagtcttctccattgaggctgttgagtcctgcatcgagatttggaggtccagccattcgggaaaatacagcattctctatgtgctggacatcatctctagcctcttcagcggaagaattgtgtgggagaaagtcagtccagcgctacagcgtgcagtgcaaagccagatgagtctaatgagcacaccgttcatcgacaacaatgacctttttgaaactggcagtacaggaggcatgtcaagggctctgattgataggatcccaaagatgaggttcagtgctgcaagcaattgtgacaaggaaactgatagcagctgctgctcagtctgcctgcaggattttggagcacagcaatttgtgagggccctgcctcagtgccaacacatattccatgtgcggtgcatcgacaattggctccttcggcacgcatcctgcccactatgccgggccggcgttcatattgaccatatacatatgtaaataaactcgcagggtggcacctggtgtattttcatagtgaatacccgtgctcctgttggatatcacaagtatagctggatgtatacataggttttctcctttttttttgttacttctccggtcttatgtggggctatgctttcagctgcacgtttttgtcgaagtaatacctggattggctggatatgtacatcttgagaacggattgactaacaagctccctgaattatggtaaaaaaaaaatcaaaaaaaaaaaaaaaaaaaaaaaaaaaaacac

SEQ ID NO: 4168 - DNA, 1565 bp, Zea mays
  Clone ID: TF_ZmC8011_1
cggaccgccatccgggtcgacccagcgttccccccgcgtccgcccactcgggcacctcgagccggccgggaatcggcctctcttgtatcatcggcctgccgcctgcccgcctgctcctcctgccccattaacgccgccggctgccgtgccgccgcgtcctgctccccgccaccgcgttcctcgcccgaagcaccgccgcggcctcgcgccaccgcccagaaaccatctccgggcctcgttcgaccgaagcgccttgtgtcatatctccgcgacctagccgccgcccgccgccgacgctgccgtcgtcgtcatcctcgctggcggtgctgtacctgcgtgcagcgcagatccatccgagctcggattgatttcttcctttgctgtactgtcataaccgaactaaaacagtttctgagaggaagcatcgcgattgccatggaagctgggagaatggatcagccatttatggctgctatcaatagccagcctttcgtggaggatattgagccagtgaagaaagccagtggggacatgcctgcgacaacaggaagcggatgcttcgaatgcaacatctgccttgattttgcatcagaaccagtggttactttctgtggtcatctctactgctggccttgtatctacgagtggctgcgccctggggtggagtcagctgccagcgacaacagcagttcggcaaggcggcaatgtcctgtatgcaaggcaacactctcaacggacacccttgtgccactatacggccgtggaggcaactcaaagaagtcacttgatggcatggccatcccgcgccgccccatggtacaccgggagactgttgagcaacagaatgcacagagcaatgtcaatgaccagcactaccaccagagcatggaagacaactctcagcgccagccattgctgcaagcgcaccaccatcccattcccactgggtttgacttcatctaccctccagcaccagtagggcgtggcttgatccactcaactgccggaggggtgctcggagggatggcagagattgtgcttcccttggcgctccgtggccagatgccagcgagcttgcactacacgaatccataccatgttgcgacacagaacgtgaaccccaggctgaggcggcatcagatggaaatcgagaggtccctgcaccagatctggttcttcctctgtgtgtttgtggtgctgtgcctgctcttgttctgagacaagactattctatacacctctttgtagatattgaaagtgggagggggatactaatggatgatgcgtatagtaaacagggtaatggtctgtgtcgacaggcatgtgcttaagcatgctgatgtagagttgtaatatgatgagacacggaggtgaaatgcatatttcattcttctctatcactgtcggcctgttaggttgcctacctgacatcttcatgttaggtttagcatcatctgttgtgtattggttggtgtcactgccaagggccttttgatttgtatataaatagaaaatgatggtttgtctaccaaaaaacaaaaaaaaacccacgcgtccgagaacgc

SEQ ID NO: 4169 - DNA, 2482 bp, Zea mays
  Clone ID: TF_ZmC8011_3
ccccgaggctggccgggaaataccccttgacggagcctccctccgaaatccgcctctctcctatcatcggcctgccgcctgctcctcctgcccccattaacgccgccggctgccgtgccgccgcgtcctgctccccgccaccgcgttcctcgcccgaagcaccgccgcggcctcgcgccaccgcccagaaaccatctccgggcctcgttcgaccgaagcgccttgtgtcatatttccgcgacctagccgccgccgccgctgccgtcgtcgtcatcctcgctggcggtgctgtacctgcgtgcagcgcagatccatccgagctcggattgatttcttcctttgctgtactgtcataaccgaactaaaacagtttctgagaggaagcatcgcgattgccatggaagatgggagaatggatcagccatttatggctgctatcaatagccagcctttcgtggaggatattgagccagtgaagaaaagccagtgaccacaaacatatattggagattagggcgtacaccttgagcctatctcatactttcctttgttattcatatctgctcttttggtcttccccagccgtttgtctgaatataatttttttaaggatctgtggtaataactggtaatctgttcaggacctgccagcttgccgaatcccatgttttgcaagtttttttagaactcgaacagtattctattttcttcccgaggcaatttcgagctggcaataatagttctaaccttgaacaaggagccaagtcttggagtcaatattttatgctgccatgcacatttcatataaggtagtggttccatttccttgctgacataagtttccttatctctgatagctagattattggataacttgtcgatggcacaaaaagtagcacgcggataaccataacaaaggggacagaaacaaagcacaaaagttgtaggccccagtacaaaagggatagaatcaatgactgctgctgacgcacactacactactaggtactaaaatattagaatcatcactgctgactcggtctactaggaaagacgatggattcttgggtaaaagcgcaaccagcatagactctcatggacactcgcctcttaccacgttttggagatttacgtaacaggagcttaagtaatcaaatttgttgaatggcttcgcccagccgctccaggacagggatggtggggggtgcgcctaagaactgcttactacgtggacacctctatgtacttcgatcattactggcgattgtgtctactacctcagcctctgcctcagaagcaagcacatctcaatccctatagatgtgactggagataccctccagcgccggtagggcgtggtttgatccactcgactgccggaggggtgctcggagggatggcagaggttgtgctcccgtgggtgctccgtggccagctgccagccagcttgcactacacgagcccataccatgttgcggcacagaacgtgaaccccaggctgatggatcagccatttatggctgctatcaatagccagcctttcgtggaggatattgagccagtgaagaaagccagtggggacatgcctgcgacaacaggaagcggatgcttcgaatgcaacatctgccttgattttgcatcagaaccagtggttactttctgtggtcatctctactgctggccttgtatctacgagtggctgcgccctggggtggagtcagctgccagcgacaacagcagttcggcaaggcggcaatgtcctgtatgcaaggcaacactctcaacggacacccttgtgccactatacggccgtggaggcaactcaaagaagtcacttgatggcatggccatcccgcgccgccccatggtacaccgggagactgttgaggagcaacagaatgcacagagcaatgtcaatgaccagcactaccaccagagcatggaagacaactctcagcgccagccattgctgcaagcgcaccaccatcccattcccactgggtttgacttcatctaccctccagcaccagtagggcgtggcttgatccactcaactgccggaggggtgctcggagggatggcagagattgtgcttcccttggcgctccgtggccagatgccagcgagcttgtactacacgaatccataccatgctgcgacgcagaacgtgaaccccaggctgaggcggcatcagatggaaatcgagaggtccctgcaccagatctggttcttcctctgtgtgtttgtggtgctgtgcctgctcttgttctgagacaggactattctatacgcctctctgtagatattgaagagggggaggagggatactaatggatgatgcgtatagtaaacagggtaatggtctgtgtcgacaagcatgctgatgtagagttgtaatatgatgagacatgggaggtgaaatgcatatttcattcttctcgtcaaaaaaaaaaaaaaaaaaaaaaaaaaaaaaaagaaataa

SEQ ID NO: 4170 - DNA, 3927 bp, Zea mays
  Clone ID: TF_ZmC219_12
tttttttttttttttttttgcacgcgctgcccctgccatccgtagtagcggcactgcagcagggcagggcgagcgccatgtgcaaacacagtgcgccactcgagtcgacagcgaaatggcagggaaacttgtttatagatcactaaaacaagtactactactacgagtaataagagttcgttcattcgttcattacagatcactgtacacttgcttgcctcttttactcccatccttgggtgctgcctcaaatcaaatgcctcaacgacaacgaggaggagagcaagacgagaggtatggaggaacggaaccatgatttgaggatccttcactgcggtttcgccggaggcgacccgctggtctcgccgccgccgccgccgagaccagactccaagtcgccgtcttcattctgcggctgctgctgctgctgctgctgcgccggcgggggcgcggccgtggcgccgccgcagccaagcagtcgccgtagggcggcaacactggccgcctccacgaccgccgcgactccggcgatgggccctgctgctgcaaccggctgcgacggcgcggcgccggcgccccgggtgctgacggcgccgtcctgggagccgaagaagaggacgttggtggggaagttgggcgagtccgggtccgcctcgggcgcccgcggcgcggcgtcgtcgccggcgaccgcgcggcggcggcacagcgggcaggtggagtgggagcgcagccacatgtcgacgcactccacgtggaacgcgtggccgcagcggggcagcacccgcgcggcctcccccgcggccagctcgccgatgcacacggcgcagtccccgcccgccgccgccgcctcctccctcggcagcgccgcgatggcggcctcgtccagcccgccgtggcaccccgcgccgcccgcgaacacgaagcggggccgggccctgtcgccgccgatggtcggggcggccccgcggtaccgcttcgcgcacaggaagaggtagaagcagatgacgaaggtgatgaagatggctgccgccgccgccagcatcgtcgccgccgctgccaccgaggttcccgtcaccgccatcgggggctccggctccagatcccttgtcttcctgctcctcgtccaaggaagcagcctgttccccagctttcttggctagtagcactgttcttggccgcggtggagaccggcggcgcgctctgagattgggagtagcgactagcttagctagtggctcgtgccgaattcggcacgagtaccgatccagccggcgagatggacatcgtggtgggtgcgctgtcgggcatagtggacgcgttgccggggaagctcggcgagctgctggagcaggagtatgcgctgctctccggcgtccgcggggatgtcatcttcctcaaggatgagctatcaagcatgcgcgccgccatccactactgcgagtccctcgaccaccacgactcccagaccactggatggatcagcctcgtccgcgaggtcgcctacgacatcgaggactgggttgacctcttcagcatccgcgtccacggcggtgcccaatccacttccgggtttcgtgcctggcttagccgcagcgtggacaagttaacggcgctccccgctcgccacaccatcgcgagcgagctccagggactcaaggagcgcgttcttgagattagccggcagcggaaccgctacaggctgggccaaatggttggcaccacctcgcaacatccccatgatcccagactttctgcgctcttcgtcgaccccggccgcctcgtcggcttcgatgggaaggtggaggacgtgtccaagactgtcatggacgccggaggtagtaatgggctgagaatcgtctccattgtcgggatggccggctcagggaagacgacgctcgcaaatgctgtgtaccggcgtctccaagcagacaacaccttccagtgctctgctttcgtctccatcggaccgaagccggacatggtgaagacagtcaaggatatgctctcaagactcggcgacggccaccgaggaggcgaggacattagccaactcatcccgagggtcagaggaatactggagaagaaaaggtacctcgcttggatcgatgatatatggagtagtgaacaatggggagtaataaggtgttgttttccagacaacagtcttggtagtaggataatcaccacatcaaggaatgatgcgttgcccaccaatcatcattacggttcaagcaaatttgtctacaagatcggcctccttactgacaatgaagccagggagttgtttctgaagaaagctttcagcagccggaatgactgtccacaacatctggtggatgcttttaccaaggttctgagaaggtgtgctggcttgccacttgctgtggttagcgtagctgccaagttagcacacaagcaatcaagagaagaatgggagaagcatggattgaacttgctatacagctcacattcagatgggtcagatgggctgaagcaaatactccatcttagctacagcgatctacagccacaactcaggtcatgtttgctgtacctgagcatatttcctgagaactcagaggttgagacagatcgcctagtgaggcgatggattgccgaaggactcatcgctgcaagcaatgaggatacggcaatcagttccctcaatgagctaattgggagaaacttggtacaaccgttggatctgaaccatgatagtatcccaaggtgttgcagagtccacccagtgatatatgatttcattgtttgcatgtcgatgcaagacaactttgccactgtaacggatgctcaacatgtcccaatcaacaacaaaactgtccgtcggctgtccctgaatttgaagagcaacagcaagcaagatcagcctgcagcacgaaatgagactactgatttgtctcatgctcgctcagtcactgtcttcggtcacgctagtgccacccctcatctgactgatctgaaagtggtgcgtgtgctggatctcgaaggctgcaaaggtcctgtgtgcttggatggcctatgcaagctggtgctgctgaggtacctgagcctcagaggcactgatgtcagtgaactgccagcggcaattggggatctaaggtgcttggagacacttgatgtgaggtcaacgaaggtggaagagcttcctcccagtattgtaaggctgcaaaagctaatgcatttgcttgctgggagtgccaagctgcctgacgggatggataagatgaaagccctgcggtcattgtcatgcgctgctaccacaaagagctctgccaacgtcgtggaagagctcagcaagcaccataacttgagacaactggaactgtattactatgctactgaaacgcctgggaatgagaagcaaatcaagttccccgctgatgggctccagactgtgaaacaactgtgcatccggtgcacatcaccatcggtgacatttgagccccgtgtactgccaaaggtccaagcacttgtcctgagattcgagaaaggccgtgctgatgacacgattggcgtgtctggcttagagcatctgtcgagcctcaagcatttggtacttgagtttgagcagcatgatgcgggtgccatggcgacagttactgcagtgaggatggctgctgaggggctccatctagatcatcaatatataactctaaaggtggatgggaaaaagtactgaggctatcttcagcaaaggcgtgtatataaacgtagaaagcactgttttacaattttttgtttaaccgtgcagtgctatgtaagctactaactttgcgctggtgcggatgctgatttccctccccctagctttttgtgaggctactctacagcttgattcagcttgctaataatgtttgcctctggacataaaaaaaaaaaaaaatagtctgatctgtcttcagctcgtgc

SEQ ID NO: 4171 - DNA, 1067 bp, Zea mays
  Clone ID: TF_ZmC748101_1
aaaaaggaaagctgctcgacaattaacaagccccctacatcagcatcagctcaagctgctcaattcaaattaacacactgatccccacacccacgccaggcgccattataccaactccatccaaccggctgcacctaaacctctccaagaacgcgccaataaacatcccctaaatctcagccacaagtcaccacacaagatctcacgccgaggggcgatccaaggcacgagagaccatgtcagcgtcgccggagaacgtcgtcgcaggcggcagtggcccgccggtcgcgtggtggagcgcggcctcgccggtgggcggcgacgtcgtcctctgcagcgtagccctcctcttcgtcgccctggccttggcgttcgtcctgtaccactactccacggccacggtcagtcgccgcggcggcggcgcgggggtggggggcggcgccaacgagcgcccagcagcaccagcagcacggcacgctgggacgaggacgcgacgccaccggcggccttgacccgtcggtgctccgggcgctgccggtgacggtttacgaggcgaaggacgaccaccgggcaggcgaggcgctggagtgcgccgtgtgcctcgccgagctcgccgacggcgagcccgccaggttcctgcccaggtgcgcgcacggcttccacgccgagtgcatcgaccagtggctgcgcggccactccacgtgcccgctctgccgcgtcgacgtcggcctgctccctgcgccggcgccggcggccgtcctcggccctccctccggcgctcccggcgcccgccacctaccccacggacctgccgacgaacgtcctgttctggggatcccagggcgcggtcaccgtggcgagggcggcggtacgcagcggcccgagcgctccccgtggagcgccgccgccgctggtcatccatgtcagggaaacggcaccggcaccgccaccgcctccgccgccgcgtgaaggcggcgcggcaaaagcgcagggcttggcgcggctgagttctctcaggcggctgtggagccgagggaggcatgacgacgctgcggctgcgaccaccc

SEQ ID NO: 4172 - DNA, 1190 bp, Zea mays
  Clone ID: TF_ZmC18438_1
cggcccgacccacgcgtacgcccacgcgtacggccacgcgtcctttatttctctagtaaacctttcaacactgttcaaaacagaatttgttactgtccttgtgtctgcattttctctactatacctctgcaacacatttcaaaaagtataatgagccaactcctctacttgtaatgtcaaggaaagcaacacaggaaatgatgtgcatggtgtgcctaaagattcaacccgttggtccgttctgccaaaccccatcttgtaacagactatcgatggcaaagtactactgcaacatctgcaaatttttcgatgacgaaaggactgtgtaccactgcccgttttgtaatttgtgtcgtcttgggaaaggtcttggtgttgatttctttcattgcatgaaatgcaactgctgtcttggaatgaaattaactgagcacaaatgtcgggaaaaagggctagagacaaattgtccaatatgctgtgacttcctgtttacatcaagtgccgcagtcagagccctcccttgcggccacttcatgcattcagcttgctttcaggcatacacttgtagccactacacttgtcctatctgctgcaaatctctgggagatatggcggtgtattttggcatgcttgatgccttgttggctgctgaagagcttccggaggaataccgtgataggtgtcaggatatactgtgcaatgactgtgagaggaaaggcagatgtcgatttcactggctataccacaaatgcggctcctgtgggtcgtacaatacccgagttatcaagactgacactgcagattgctccacaccaaattagctggagggaacatttgtgcttatttgtagcctttttttttctcttatgtaaatatcttctagcgggaaggaaaaaagagatgtcctgtaggatagttaacataatttcattcgtagcgatatcagttttgtaagtgtagcagtttacaatttactaggtctagtgcgttgtactgccaaaatggacggttctgctggacaaaggacataatccgagaaaataggctagttagaacaaaaaaaaaaaaaaaaagtactcgtgagcatgttctgcaatttggcgggcactcagactatcttcaattatatctactatattccttctttaagaaaaaaaatctttcgtattaattacggtgaaattgtgaca

SEQ ID NO: 4173 - DNA, 685 bp, Zea mays
  unsure (1)..(685): unsure at all n locations
  Clone ID: TF_LIB4570-011-R1-K1-B7
ccggggctctctgtcgccgacgactacgccaggtcttcttcggggcccaggtcgctgccgcctacatcaggggccccaagttttcctaggacccctcgccggcgacgagcaccaccagcttggttcactcccaacaaaatgtcagccaatgtgggtgaatcaactagcggtgtcagcagcagcgatgcagctggggggagctttgagtgcaacatatgcttcgagctgcctcaggagccaatagtgactctctgtggccacctcttctgctggccgtgcctttaccggtggctgcacattcacgcacactcgccagagtgcccagtgtacaaggccctcgtggaggaggacaagctcgtccccctttatgggcgtggcaaggatcgcgtcgacccgaggtcgaagaacatgcccgagggcgagattcctcaccgcccaacgggccagaggcctgccacagcggggaactcgcattctcagctgctttcgggggactgttccctatgcttagcttccaagttcatggggtttccagatgccgccgcttacgcgcagcctgctgggttccactatggatacgggcatgggcatgggcatgggggtccaccatggcgggcatatggggacagcacaagcccatgggcgtncaccgacaggcaccggttggggcaacaacagcagcagg

SEQ ID NO: 4174 - DNA, 1380 bp, Zea mays
  Clone ID: TF_ZmC26341_1
ccccacgtccgccctccgccccatcatctctctctccccagctctttctaccgtttctcttctagtcgagcggggaaaacaaagaaacaaaaaagcaaggaagcagctgcacgcacgccgtcgcctggccggccatggggttcccgtcggtgtgctactgcgtgatcctgccgcagccgctcatcctggtgctgcagctgctggacttcctgcggcacgccgtgctgctctgcctctcctcgctgggcctcgcggcgccgccggccgccgacgaccatccggcctacgcctacgcggcgccgccgccgccgccgtcggacctctgggcactgcagccgtcgtccctgcagcagcagcagcagcaggcggcggcggcggccctggcgccgccgcccacgccggcagccatcaaggcccgcctgcccgccgtccggtacgccgacctgctcggggcccgccgcgccccgccgggcccggccgtctgcgccgtgtgcctcggcgcgctccaggcgcggcaccgcgtccgcgagctcggcaactgcgcgcacgccttccacaaggcctgcatcgacaagtgggtcgacaagggccaggccacctgcccgctctgccgcgccttcctcctccccggcctcagcgccggagacggcgacggcgacggcgacggcgagctcgcctcctcctccttccctttctccttctgaacccacgcgtagtacgtacgtacgtacgcgcgcgtgctccagccgacaagcaaaagtgaaggcgcacggccggcggcgtgcgtagtacgtgtacgtacgtccctgcagcccggcggccgattgggaggcagagcaaggtcagtagcaaagccacctacctacttactacactactcctgctagctgatgagacacgagccccgtcgtacggccggccccggtcctgtgaccatccatggatcccgatgagacgagcaaggaaacagaggagagagaagaggaggtgtcagtgagcgtgaggtggtgcagtattattggtaggtgaggcacaaattatgaggaggacagggatggctacctgcattggatctggtggatgcgtagatccatccactccgcactgctccacccttttctcctgcagtgcagctccaattcacaccccccctctctctttctctctcttttgtttattaattaataattattagtttccttttctttttttttctttctctctctatctttctttcttttttctgtggtccctcctatatattattaacttgatctgcgaggggaaccaggagagatgtgcgttgtacatagctgcctccacttgacaataatattattgcaacggaacaaaaaaaaaaaaaaaaaggcccctagggcc

SEQ ID NO: 4175 - DNA, 1083 bp, Zea mays
  unsure (1)..(1083): unsure at all n locations
  Clone ID: TF_ZmC26341_2
tcccggtgcaaanaaacaaaaaacaagggaacagctgcacgcacgccgtcgcctggccggccatggggttcccgtcggtgtgctactgcgtgatcctgccgcagccgctcatcctggtgctgcagctgctggacttcctgcggcacgccgtgctgctctgcctctcctcgctgggcctcgcggcgccgccggccgccgacgaccatgcggcctacgcctacgcggcggccctggcgccgacgaccacgccggcagccatcaaggcccgcctgcccgccgtccggtacgccgacctgctcggggcccgccgcgccccgccgggcccggccgtctgcgccgtgtgcctcggcgcgctccaggcgcggcaccgcgtccgcgagctcggcaactgcgcgcacgccttccacaaggcctgcatcgacaagtgggtcgacaagggccaggccacctgcccgctctgccgcgccttcctcctccccggcctcagcgccggagacggcgacggcgacggcgacggcgagctcgcctcctcctccttccctttctccttctgaacccacgcgtagtacgtacgtacgtacgcgcgcgtgctccagccgacagcaaaagtgaaggcgcacggccggcggcgtgcgtagtacgtgtacgtacgtccctgcagcccggcggccgattgggaggcagagcaaggtcagtagcaaacccacctacctacttactacactactcctgctagctgatgagacacgagccccgttgtacggccggccccggtcctgtgaccatccatggatcccgatgagccgagcaaggaaacagaggagagagaagaggaggtgtcagtgagcgtgaggtggtgcagtattattggtaggtgaggcccaaattatgaggaggacagggatggctacctgcattggatttggtgcacgcgtagatccatccactccgcantgctccccccttttctcctgcagtgcagctccaattcacacccccccctctctctttctctctcttttgtttattaattaataattattagtttccttttcaaaaaaaaaaaaaaaaaaaacaaaaacc

SEQ ID NO: 4176 - DNA, 2189 bp, Zea mays
  Clone ID: TF_ZmC12362_1
cggacgcgtgggcgcgttcgcctagtctccttccttttcctctcgctctccgcctccatcagctcgagccgcttccttccacccaccacgcaccacctgacctcccttccctcatcggctcctcctcgttcccactaggcaggaacgccgcgcgccgagccgagctagcggccggaatgcccgcgcagaagcgcccgctcccgtcgtctgcctcgcccggctccgacgccgacgtcgaggaagctcctggcgccgacgcggacggctgcggcggggccgaccaacggtcgccgaaggtgacgctgaacggagtggaggagcgggacggcgggccgctgcaggccaaggaccagcgccacgattccgacgctgacgacgaggaggaaggagaccgcgaaggcggcggcggcggggacgggagcgggagcggaggcgacgacgactgcgacagccagtcgtcgcagagtgacggcgtgatggacgagtttacgcttgtgaaattagtggatgttcggaaggaagtgcaatgccctatatgcctaggaattattcggaagacaaggacagtcatggagtgtttgcaccggttttgcagggactgcatagataaatcgatgcggcttggaaataacgaatgcccagcgtgccgcactcattgtgctagtagacgttccttgagggatgatcctaactacgatgctttgattctagctttatatccagatattgataagtatgaggaagaggaacttgcattcagtgaagaggaaaggacccgtaacaaaaggattcaagaatccattgctgagacatttcggaggcaaacagaagcacttgtgaagaagcgctccactgtaaaagcaacagatgcagcttctacaaggaagactcgacggaatatgcgaccaaggaggagaggacgaattagttctcctgatattgccccaactgattttgacgatgatgatagagaagagaacggtgatgatggaagcaaggagtcgtcttctgttgatgatcactccccagatgtaaggccaaaaagatctcggaggtggcccatgccacgccgttcccctgctaaggccattggcaataccgacaatagcattgaggataatgacgactcaggaggtgctagggactttatgactgcttctccgctgcggggagagatgcttgcatgggggaaaaatggcacccgcagccaaacccggcatggcaactccagtggctccagcggaaggatgggcaggagtggccgtgttgccaagttggtagatcagttccgtaatgctgatgacttcgataatgagttgaacctgtatcttgtcctgcttccacttgatggtcaaagtgtgcctaaactggaaaagccctacctcagttgcctgccaacactatctgttcggcatctctgccagtttgttgctctccagttgtctcggcaacccaaagaagtcgagatatatatcaggaaaagcaaggatgcatgcttgtcagccaattacacctgtaaatacgagacaaagccagaacagcctaatggtttagagagactgtgggaagagaagtctctttcggatctctacccttccctcgccacccgtcaaggagatctggaattgttatactctctgaaagcacaaggacaggggtagatcagatattcactatcaactcgaccagtcgcctcaacgccactgtctgcaaggaccttcaactggtggaagcttgtacataaggctttcaatatagaaaaagatctgaaagtagcttacttgttttaaatttgctctgatatcttgtgaggtatatggtatacccaggttcattagtaaaaatgtgtggagttgagcagtagcaaaccaaccatctgaaacaggctgagcaaagcttgtctatttctgcagccagtattaattgtgtcccatttgaactgatgcaagtactgaggacctctgttccaggatgatccgtggcttgctgtcgtcgccttgtgtgacgcgttcgcgttatccatgttgtcacgccacgtgtccgcgaattagaatgtccagttgttaaccagtaggaaatggtaaacatctgcagctttgtagggacagtattgaaatttttgttgtttatacaataaagctcacgggtcgttgctgaaaaaaaaaaaaaaaaaaaaaaaaaaaaaaaaa

SEQ ID NO: 4177 - DNA, 526 bp, Zea mays
  Clone ID: TF_ZmC147852_1
ccacccgtccgcccacgcgtccggcgcttgagcaggaaatccctggcgccggccgcgagctgctggtccgggctggccggggcgatctccgccgccgccgtcagcggctgcggtaccgggtggaagaagagcaggtcgtccaggctgggccgcgtccgccgcgccgccctttgcggcggcgatggtacgggcggcggcagcgccacggcggcgcggcagagtgggcaggacgcgtgcgcgcggagccacacgtcgatgcagtcggcgtggaacgcgtgcgcgcacagcggcagcgtgcgcagctcgtcgccgtccgcgaactccagcaggcacaccgcgcactccctggacgccccggagccccgcgacgacgcgccggcgccggcgccggccaggtactgcgccgacggcagcgacttgatacggcgttcgtcggccgtagtaggtgagaagtgtggtagtagttgtcgtacgtggtgaaagacgcgaaggagtcgtccccgctgcggcgcgccgagggggagcc

SEQ ID NO: 4178 - DNA, 1867 bp, Zea mays
  Clone ID: TF_ZmC2185_1
attttattttccagtacctctcacactttaaccctccctaattcacagtttatccttgtctcaatacataatatcgtgatatattactccccgccatgtcgataatgttggcttcccctaaataacgaatgcccaccgtgtcgcacccattggcggcgcagacgttctttgaggcatgagccgcaatatgatgccctacaacctaggggcagaccagatattgataagtaaagaagcgccggttcccattgctgtcttcgagagagcattcagaaatggcggctcccacctctgatgccacctccggtggaggcgtagaaggaagaggagggcgcccgccgctgccgagcaggggcgcctgcaggccgaggttgactgacccggagccacagggcggactcgaagacgattcggacacggagggtgacggcggcgcggacggcgacagtgaatcctcgcagagcgacggcggcggcaccgacgagtttatgctagtgaaattagcagagatacggaaggaggttcagtgccctatctgcttaggcattatccggaagacaaggacagttatggaatgtttgcaccggttctgtagagactgcatcgacaaatctatgcgactaggaaataacgaatgcccagcgtgtcgcacccattgtgcaagcagacgttctttgagggatgatcccaattatgatgcactgattgcagccctgtatccagatattgataagtacgaggaagaggaatttgctttcagtgagcaggagaggattcggaataaaaagatacaagaaaccattgaggaaacattcagaagacagtctgacgcaattggtaagaaacgttccatggcaaaagcaactgcaaccgcctttgcaaggaagtacaggagaacacgggggagagttagaaccattccccctgatattgcccctactggctcttctgaggaggaaagtggagaaggaaattccaaagagacaatcagagagcaatcttctgctgatgatcattctccagatttaagacagaaaagatgcaggaagaggtctggaccacaaggatcacctgctggaaccattggcagtatcgactacagctttgaggagaatgatgaattagttggtggaaaagaaattttagccacctctccgttgcagggagaaatgcttgcttgggggaaaaatggtgcacggagccaaaatcgacatggcagtgttggttcaaatggcaggactggaaggagtgggcgcattgcaaaattggttgattacctccatactgctgatgaaatggataaagagtttcagttgtttcttcttctccttcctgtcgatggacaaaccatacctaacttggaaaagccttatctaagctgtcgaccaaccttgtccattaaacatcttgcacagttcgttgctcttcagttgtcttgtgaagtcgaagaacttgagatgtacataaggatggaccgccaccgtgtaagtgttggctcgaggccttccagtacaggtgaggcaaaatcacgtccatttgatgacttggaaagactgaacgaagaaaaacttgtttcggagcttcatccttcatttgtctctagcaacggtgatatggagttacgatatgctttgagaactcgggagtagatcagtttttatcctcagctatcaatttatgaagtcatactgtccttgtgtaaaaaaaatgttcgatgtgaacaatgttgacgctgtttttctcattggtcatgctaagttaatttaccatctttgtaatatacataatgaactgattagcaaatgacctcagtaggtgaacccagttgtatgctatgtactgttcatttatgcgagtcgatggcagg

SEQ ID NO: 4179 - DNA, 693 bp, Zea mays
  Clone ID: TF_ZmC341_33
attctgcgttgctctggcttgtattattggtattgctgtctgttgttgccttccttgtatcatagcaattctctatgcagtatctgatcaggaaggagcatctgaagatgacattcgtcaaatcccaagatacaaatttcggcggacggatgagcctgagaagcaagatgttgaccccatgggtccttttggtggaataatgatagagtgcggaaccaatcaacctattgagaaagtgcttgcagctgaagatgcagagtgttgtatttgcctatcggcttatgatgacagtgcagagttgcgcgaactcccctgtgggcaccatttccactgcacctgtatcgataagtggcttcacatcaatgcaacatgccccctgtgcaagtacaacattcggaaaagcagcagtagcagtggaagtgaagaagtatgaatgcagtctgcttgacaatgcaaatctgtttcaacttctgttccgttgctaatgtaactccaggccttgatgagtgtaaatttttgtatcaaaaaaatgtgctgatagagtcagttatttatcaaagttactcaaagtgctgtcaatatgtcgtataagttaataaatagttgggtatgcttctgtatttactgacaggaatatattattagttgcattgttatccttcaaaaaaaaaaaaaaaaaaggcccctagggcc

SEQ ID NO: 4180 - DNA, 1499 bp, Zea mays
  Clone ID: TF_ZmC341_57
agccggccgggatatttccattcctacgaagaaagtatttccttcgtcctgaatcctgatctctcacggagttcccctgtatggcgacgcctcgctcaccgagccccagcgccgccgcgcgtctcgattctgcgccgctgctgggcggcgcctccggcggcgggtcccgtcgccgaggtggagcgcttcgccggccctccctccgcggcgcggcgcggctgctgcgtcgcggcgggcggcgggccatgcgggagccctcggtgctggtgcgggaggccgccgcagagcacctcgaggagcggcaggctgactgggcctactcccgccccgtcgtggcgctcgacctgctgtggaacctcgctttcatcaccgtcgctgcggtcgtgctcgtgctcagccgcgacgaggactcgcccatgccgctccggacttgggtcgccggctacgcccttcagtgcgtcgtacacatgatttgcgtcgcaatcgagtacaggatgcgccacggccagcggggcggcgccggcgctggcgcagcgcccgcagacgtggaaaggggcagcgacgcatcgtcctcatccagtgacgaggatgacagggagctcgatctccatggtcgccgcactgattacgccagtattgcgaagcacttggagtctgctaatacaatgttctccttcatatggtggataattggattttattggatatctgctgggggtgaggaggttattcgggatgcacctcaactttactggctttgcatagtctttctggcatttgatgtgttttttgttgtattctgcgttgctctggcttgtattattggtattgctgtctgttgttgccttccttgtatcatagcaattctctatgcagtatctgatcaggaaggagcatctgaagatgacattcgtcaaatcccaagatacaaatttcggcggacggatgagcctgagaagcaagatgttgaccccatgggtccttttggtggaataatgatagagtgtggcaccaatcaacctattgagaaagtgcttgcagctgaagatgcagagtgttgtatttgcctatcggcttacgatgacagtgcagagttgcgcgaactcccctgtgggcaccatttccactgcacctgtatcgataagtggcttcacatcaatgcaacatgccccctgtgcaagtacaacattcggaaaagcagcagtagcagtggaagtgaagaagtatgaatgcagtccgcttgacaatgccaatctgtttcaacttctgttccgttgctaatgtaactccaggccttgatgagtgtaaatttttgtatccaaaaaaatgtgctgatagagtcagttatttatcaaagttactcaaagtgctgtcaatatgtcatataagttaataaacagttgggtatgcttctgtatttactgacaggaatatattattagttgcattgtaacttgtgtccttttgaatgatccgggtgttttcctgcttggttaatg

SEQ ID NO: 4181 - DNA, 1585 bp, Zea mays
  Clone ID: TF_ZmC341_66
ctaaatcccgtcccccaattccattctcggaagagaccatttccttcctcctgatctctcacggagttcctctccatggcgacgccccgctctccgagcccccgcgccgaagcgcccctcgattccgcgccgctgctgggcggtgcctccggcggcgggagccgtcgccgaggcggagcgctccgccgaccctcgctccgcggtgcggcgcggctgctgcgccgcggcgggcggcgagccatgcgggagccctcggtgctggtgcgggaggcagccgcagagcacctggaggaacggcaggcggactgggcctactcccgccccgtcgtggcgctcgacctgctctggaacctcgccttcatcaccgtcgctgcggtcgtgctcgtgctcagccgcgacgaggactcgcccatgccgctccggacctgggtcgccggctacgccctgcagtgcgtcatacacatggtgtgcgtcgcaatcgagtaccggatgcgccatggccagcgcggcggcgccggcgcagcgcccgctgacgaggaaaggggcagcgacggatcgtcgtcgtctagtgatgaggatgacagggagctcgatcgccatggtcgccgcaccgattacgccagtattgcaaaacacttggagtctgctaatacaatgttctccttcatatggtggataatcggattttattggatatctgctgggggtgaagaggttatccgggacgcacctcagctttactggctctgcatagtcttcctggcatttgatgtgttttttgttgtattctgtgttgctctggcttgtatcattggtattgctgtctgttgttgccttccttgtatcatagcaattctctatgcagtatctgatcaggaaggagcatctgaagatgacattcgtcaaatcccaagatacaaatttcggcggaccgatgagcctgaaaagcaagatgttgaccccatgggtccttttggtggaataatgacagagtgtggcaccaatcaacctattgagaaagtgcttgcagctgaagatgcagagtgttgtatttgcctatctgcttatgatgatggtgcagagttgcgggaactcccttgtgggcaccatttccactgcacctgcatcgataagtggcttcacatcaatgcaacatgccccctgtgcaagtacaacattcggaaaagcaacagtagcagtggaagtgaagaagtatgaatgcaaccgcttgacaatgccaatctgtttaaacttcgtgcctgtgtcgttgctaatgtaactccagggcttgagcagtgtaaatttttgtactaaaagaagtgctgatagagtcaattatgtattaaagttactcaaagtgctgtctatatgtcgtataagttaataaatagttgggtgtgcatctgtatttactgtcaggaatgattagttgcactgtaacttgtattctttcgagtgattcgggcgttttcctgctgggctatgatggcagtttgtcttccatggtttctactgacaagaaattttcgactggccattatttacagcagcgacatagctgatgaaagaagccaattggtgatgg

SEQ ID NO: 4182 - DNA, 2447 bp, Zea mays
  unsure (1)..(2447): unsure at all n locations
  Clone ID: TF_ZmC6308_1
ccggccgggccgggactgggcaccggcgcacgaacgccgcgtgctccccgaccaccagctccaattccctccctccaaagcccccccaatcccttcacacggttctgcccaacacccaattgaagacgtcccaatcccaaccctactcccttgcctccccctaatgacatcgcctggcggcgtcttctccgccgcgctcgtcgccgaggacttcccttgggtggacatggaggaggagatggggatggccccggacatgtaccgcgaggtgttcgacctcgcgcagcgcgggacacgagcctttcgcgaccgcctcttcgacgaggcaatatcctgttacactaaagctcaaaatttgagaccagatccaattatccttggcaatcgaagtttgactttctgccggttaagtcaactgttgagggagagatcagcagctgactctgaatatcagcccttgaatggccttgatcctacaactcatgcagagttagctctgaaggatgcagagaagatattatctatcaacagtaattctcctagaccatatattctcaaggcatatgcgctatttctgatggagcattaccatgaggcacgtgagacccttcttgctggtcttcaagttgatcccctcagtcatgtcttgcaaacctgtctgaatgatctggataggaatacaaatattgcagctggggcaaggcgtgcaaggttagctaggattgatgattttgagtgcacattatgctttaagctattgtatgaacctgtcactacaccatgtggccattcattttgtcgctcttgtctacatcagtcaatggatcatggtaataagtgccccatgtgtcggacagtattatttatcggtccaagaacatgccctataagtgtaacattaagcaacataattcaaaaggcttcttctggattctggggtttcttaagtggtttattttaagtcaagcgatctgctgtacggcgatgcaatcctccttgtatatttttatctgataatggatgtaatatggttcggaaaatatccgttcggatccggattcgaagatggtgaacgctggttcagatggaattttcggatatccgaatggttgctatagattcggcaacgggtactgtagctggttgtggctgtgaggtggaaatttcaatgtgtgaaacactgtcggatatgcgcttttattgataggtggaaggcacacgtcggtttcgtatcgtgcgatcatgggctcgagtaggtgatagagttgctgaagttgaatggttgaaagatttacctctgccacaaggttcacaaggaagaagagaactaatggaactggccaatggagcttcacagctggccagggcatatatcagacatgctagagataccgtacggactgcaaggcgaacaagacatctggatcttgagggcatgcctgggccacaggacccggaaaaatttagtttctggctagccaacttgataagtttgaggccctcggatagattagatacgttacgccttcgcgacactagggagagaatttctagtagcatcagtttgctccgtgattccgaacaaggctgccgtgtacaatgacggaaacagtacaagaatcgtttccacagaccaattcgttcgtctaggagtatatcgatttggagctactccgtgattccgaacaaggctgccgtgtacaatgacggaaacagtacaagaatcgtttccacgtaccaattcgttcgtctaggagtatatcgatttggagctactccgtgattccgaacaaggctgccgtatacaatgacggaaacagtacaagaatcgtttccacagaccaattcgttcgtctaggagtatatcgatttggagctagggatgtaatatgattcagaaaatatccgtccagatccagactcgaagatggtgaatactggttcggatggaattttcggatatccggacttttttcggataacggatacaaatacggatattttattcggatatcgaattcgaatacaatatgtctgatatctgtcggatatcgaatatccggatattttctcggataaatcttctcggatatccggatagctgtgtgtattttgttgattttttgtagaaagaaattaataatacacaaatatcctcaaaaattcatgaaaatttatggaggcataccatatgtccacatataatcctccaaaatatttggaccataaaatccacaatattgtagtgtttctttcatttcactttcacttgtgtgaattacacgggaaatcactctaattatccaagttcactttatcatttttatgaaaccaatacgaacggtctaacctcaattaattcggctaccgctctataagatcctagcttacgtatctggaggcaaaaaaaaaaaaaaaagggcggcgcacgcgtcnagaaaaccggg

SEQ ID NO: 4183 - DNA, 706 bp, Zea mays
  unsure (1)..(706): unsure at all n locations
  Clone ID: TF_LIB4764-057-R1-K1-C6
ttgggaccctcgaggccggccggcatttctttgtgctgccatttgtccctgtattgttattctattatgttgtgttatcttctgaacacgtggtcatggttgacaggtgctcggtctgcctagcagaatacgaaccggacgagaggcttcagaagatacctccctgtgggcataccttccacatcaactgtatcgaccactggctctccacaaacaccacctgccccctctgccgagtatcgctccttcccgcccccaaggcaaccagcaccggactggatctggaagcacagactgcggtagaagaggagtctccgaacgcacatcatcgccaggaggagggactcgttgatgccaacacaccacaggaaggtgaggcggccggaggtgacggatcaagtagcgtccaggttgaagaactgcacggcgatgcggccgagccattggcggtgacggtggtcgctgtcgctgcgcctcaggctgacgctgaaggttcaccgagtacagcatgccaaactgttaaagggaagaaataaggatagcctagcccatcgatgtatttctattaccattgtgtgtttagctgggaaaggaaaaaaacgcataaagatggggccattgatgttatgattgccatttttctggngaggaagaagaagagcaagagttcagttgtggggaaatcttattgatacagcacttaacc

SEQ ID NO: 4184 - DNA, 1851 bp, Zea mays
  Clone ID: TF_ZmC2248_1
tattctgtacctcgaggccggccgggacttctcgtcccaactcccaagttgcaacccagccacctcgtctcctcccctccaactccaagcctactcccacccgatcccccctgccccgcccccggcgccgccggttctcgcattcgcggcagtccatctcgctgccccttcccggcggcctctgatccgtgctgctcgtcgcccacgcgaaacctgccgcctcccttgttgccgcgaccgcgagccctcttccctcccctcgcggccctgatctcagttccactgtgccccgaccgtgatccgtccgcacccgcttcatgcccagcagcgttcaatccgtcccctaatgccgctgcctccaaatagttctccgtgtgctggttcttgcggattgcgctgtcaggtccacataatattggggacggtgcagagtgtcctccgttttttcctctctcgcacctaaagttttcgggagcagttagttagagtatattcgattccccctgatatagtttgtttatttcacactacgaagtctatgcactcgagagaaaaatcactggtagcgacggcatcaattcttgtgacgtttagtggctagaacaccctcactagcgctcattcatgtttacccgaccttgtccttttcccttccgccttccgtgtgctggtatcaatttgttgtaatttggggaggccaggagttttctcgccttcttgcccttgttctgcccgtagtaagtgcttgccgtttggttgattggaactcccaagtgttcgtcggtcacatttatatagctttacctcactaggataatcataagcaaggtttccccaaaattcttagaccagttgggatcaggacccgaaggtagattgtgttggctatttgccggtagggcattgtgactccgtgatgtcttgcacctctccagatccaccagactactgctcagccgaatcgcctgagctcaagctgtaccaggccttcatcttctcggtgcctgtcttcttcacgttcgtcttgcttctcttcttctacctcttctacttgaggcggcgcagggccaattggcagtccttgcggatgaggacaaataatttgatacgaggagataatgccagactggagtgtggcttaaagaaggagatgcgggaaatgttgccagttgttatcttcaaagagagtttcttgatcagggagacacagtgctcggtctgcctagcagaatacgaaccggacgagaggcttcagaagatacctccctgtgggcataccttccacatcaactgtatcgaccactggctctccacaaacaccacctgccccctctgccgagtatcgctccttcccgcccccaaggcaaccagcaccggactggatctggaagcacagactgtggtagaagaggagtccccgaacgcacatcatcgccaggaggagggactagttgatgccaacacaccacaggaaggtgaggcggccggaggtgacggagcaagtagcgtccagattgaagaaccgcaccgcgatgcggccgagccactggtggtgacggtggtcgctgtcgctgcacctcaggctgacgctgaaggttcaccgagtacagcatgccaaactgttaaagggaagaaataaggatagcctagcccatcgatgtatttctattaccaatgtgtgtttagctgggaaaggaaaaaaacgcataaagatggggccattgatgttatgattgccatttttctggggaggaagaagaagagcaagagttcagttgtggggaaatcttattgatacagcacttaacataaccgagattagtagtacttgtgagctgtttttcatctggt

SEQ ID NO: 4185 - DNA, 714 bp, Zea mays
  Clone ID: TF_ZmC208303_1
ctagttctagatcgccagccgccgccctttttttgttttgttttattttcaaacgggcccttgcattcatcaaaaaaagttaagagctcacagccttgtcttgatactgcgccactcacgcaagtgcgggatgtacaaatgatgaggaaaacgaccaaactaaaaaggccgtcttttttttagagaaaaaaaataatagagtaattaattattcacggcaacagcatactgctgccgttccaagtcgtccaagtccccggcgtcggcgtaggcgccctggggccttcgcggcgccggcctctccctgctcaacatcttgatgagcgacgcacaggcaccgatcccccggtccggagtggagctgccggcttcctgcttcacagcgtcctgcactttctcctgcacgaaccgagctgagcccaccgccgtcggcggcggcggctccacctcggcgcggcagaccgggcacgacgagctcgacgcgagccaagtgtcgacgcaggggacgtggaacacgtggccgcaggccggaagcgcgcgcacgacctcgccgtcctgcacggcgccgaggcagatggtgcactcgtcggagccggcgcccgcctcggccgcgtcgttcctgtagagggtggtcggcagcgccgcgatggccgcgggatccagcccgcccttgggggccggcgccgcggccgtggtcggcagcaagacggctat

SEQ ID NO: 4186 - DNA, 743 bp, Zea mays
  unsure (1)..(743): unsure at all n locations
  Clone ID: TF_ZmC50086_4
ggagggcgctgagtgcnccgtctgcaaggaggatttctcgcctggagaggtggccaagcagatgccctgcaagcacatctaccacactgactgcattgtgccgtggcttgagcttcacaactcgtgccccatctgccgatttgagctgcctactgacgatcctgattacgaggggcggaagggcactaatcctcagccggctgttggtgtggctgctgctgcatctgggagctctactgctgctgagggacagatggaggagaggcaggagaatccaagggtggttgagaggaggttcaatgtgtcgctgccgtggccattcagtggactgggagggcaaacatcgcagcagaatgggaacagtggaggcagtggtagcaactcacaaggaaatgcacaggatggtgacccacccagcaacaagaattgatcacaaatcagctggaggttacaccttgtggcgatccgttgagaagtctgcagtatttatgtgtcaccatgacttctatacctacaggaatttacagtctatttgttatggaacaatcgttttgttttacttccctttgtcgctgttggttaggtcatgtagacaaggcagcgaaagctgccctgcagcggaatccgcgcgttgagagggtcgagactttgtgtagatttattggttggtcctggtgtatgatgaaatggtgaaatcccaaaaaaaaaaaaaaaatagcgaaaaaaaaaaaaaaaaagcggcc

SEQ ID NO: 4187 - DNA, 1040 bp, Zea mays
  Clone ID: TF_ZmC628035_1
cctcgaggcgcggcgggaggcttccttgcttccttatcacggatcaccccaccaccacacccatgggcccgatcaatggccgccgccgccgccgtctcctgctcctcgccgcggttgctctcgccggcgccgccgtggacgcgcagcccgactacttcaaccccaagaatttcaacccgtccatggcgattgtcatggtcgtgctggtcacggccttcttcctgctcggcttcttctccatctacctccgccgatgcgcggggcccccgctgggcgggcccgacgaccactaccatgtgaggcagctgggtctggggctcggcaacaacagctacgcgccgccgcccagcaggaggatgcgcggcctcgaccgggccgtgctcgactccttcccgaccatggcctacgccgacgtcagggcgcacaagggcgcgctcgagtgcgccgtctgcctcagcgagttcgacgacggcgacacgctccggctgctgcccaggtgcgcccacgcgttccacaccgactgcatcgacgcctggctcgcgtcgcacgtcacctgccccgtctgccgcgccatcctcctcgtccccgacgctgccgagcccaccgcgttggctgctgcccctgtcactgcagcgccggatgatgaccatgccgtggtggtcgacgccgcagccgctgccggggagaccgaggaccagaggctcatggagggaggaggccgccgagctgctgcggatcgccagcgccaagcgcgcgctgcgaagcaacaagtcgcagttcccgcgctcgcacaccacggggcactcaattttaggagagtcgctgcttggttgcgctcctccttcactccttctggacgcgtgttgtattcattttttcttcaacaaaaagcatgtacataaaattagtagttttttctttgaaattaagatacatatatactacctctaagtacaagcacacacgtaccttatctcttatgaataaatattagaattgatgaagtcatttttttaaaaaaaaaaaaaaaaaaactcact

SEQ ID NO: 4188 - DNA, 653 bp, Zea mays
  Clone ID: TF_ZmC146415_1
ttgggaccctcgaggccggccggggctgcggctgcggacacccaaatcttccccgaaaccactcctcagcccggtgagcgctcgaccatcagaaatgggcgccggcgacggcaatggcacgcgccccaaggcgaacgaggtgacgatctcgtgcgacgagggtcccgggcacgcgtttccgttccccaagccgcacgcccccgaccccgacccaccgcaggcgtccgacccggcgaactacgccgtcgctggcaagatactcctcgccgcggcgggggcgttcgcgggcgtgctcctggcgctcgtcgcgctgcacctctacagcagcacccggcgccggcgcctcggcgccggccagccgcggctgctccggagcttggccatcgccggtggcgacgaggaccgccgcgacggcgacggcgacggcgcgggggcgccttccccccgcggtctcgactacgcagtccttgccgcgataccagtagtgtcgatcgaagcaggcgcgggggcaggggactgcgcggtctgcctcgcggagctcgagtcgggggagaaggcccgcgcgctgccgcggtgcggccaccgcttccacgtcgagtgcatcgacgcctggttccgtgggaacgccacatgcccgctctgccgcgccgacg

SEQ ID NO: 4189 - DNA, 775 bp, Zea mays
  Clone ID: TF_ZmC7896_6
cattgggtacctcgaggccggccgggaccacattcttttttctccggacgcgctcgttcgttcgggaaggcgccccttcctgccctcacatccgctcctccctccccgacaccgaccgacccctcgtccgctcgcctccctccccgatccccaccgccatggccgccgccgccgccgccgcgtcctcctcttcctcctccggggttccgatcgccgcccgcacctgcgtctccgtcggcgaggtggcggtgggcgcggtggctacaggcagcggcgaccgggtggcggcggattgcggggtgtgcgccatctgcctcgacaggatagcgctccaggagacggccctcgtcaagggttgcgaccacgcctactgtgtgacctgtattttgaggtgggcatcctacaaggagaaccctctctgcccacagtgcaagcatccattcgaattcctcagcgtgcaccgctctctcgacggctggtaaccccttgttcatctgaaatggtgggagggtggctgaaaattttcaggtagaatgtgagcttgatgcttgtttcttttcttcagcctacatgactacctgtttgaggagagtgtttgcctccttctgagggcagcttggtttgaacctctgatcgtagaggctcacgaggaggctctggaagaagaagagtttctccaccagcagtaccaatacgatgatgacgaagatgatcttgacgaggaatcttattacatgaacagggtccccaagcatccgtattggtaacaggagat

SEQ ID NO: 4190 - DNA, 1551 bp, Zea mays
  Clone ID: TF_ZmC3507_2
ccgaattcggcacgaggcccgtctccatcctcgctcgccgccatggaaggttcgaaggggagtggaggtggtggggccggtgccgggtccgaaaagccaagcgccgagtcgaaccctagtctgaatctgccgccacctaccgcagcggatgtcgaagccacggatgacggtggcgccacggccgcggctgcggctgcggccgaggcggccaggcggcccttcacggccctcagccaagaggaagctgacctcgccctcgcccgcgtcctgcaggagcaggagcgggcgtacatgttgctccggatgaacgggggcggtggcgagggcagcgactacgggagctctgatgaagggagctacgaatatgacgaagagggagaggaggactacgaagaggaactggagcaccacctccgcgtccaccaccacgagcacccctcgggcgatggtgagggagagggcgggggagggcgagggcgccgaggggagcgactacgacgaagagttcgaggaggacgaagaaggggagccggaggtagatcccgcggagtttgaggacgatgaggcttatgcgcgtgcgctgcaggatgctgaggagcgtgaggtcgccgcacggcttatggctctcgctggtctcagcgattggcgaacagtggaggtggagcatgaggaggatcatgcgaatgatccacaggaggcatggcaagaggttgatccagatgaatactcttatgaggagctagtcgcattgggtgaagtagttggcacagaaaacagaggtctctctgctgatacacttggttctttaccttcagtaacatacaagctgcaacatgttcaggatggcaacacagagcaatgcgtaatttgccgtgtggaattggaggagggtgaatctttgattgcactcccctgcaagcacttataccatcctgaatgcataaaccagtggctgcaaataaataaggtatgccctatgtgcagcgcagaagtatcaacctcgggtaacaaggagccatgactgctcctccgatggctatcttgggaacttggtgggaataactagcggcatcactgcagcatctgtattgttgaaacaaaagcagaaaaaacggtctacatacatgcaaggagatcaggatataatcctcttgtcagtctaaagttctgcccttggttccctgctaactggattgattggccttgccgcttattatctcagttccctatgaacgccttatggctgttgtatgatccataaattatgctaattatattatattgttagtcatcatcctattaaaaaaaaaaaaaaaaaaaaaaaaaaaaaaaaaaaaaaaaaaaagaaaaaaaaaaaaaaaaaaaaaaaaaaaaaaaaaaagggcaagcaaactaaaaaaatcaaaaattaggggggccccgttttaaagaacccaactttttttacccgcgttgcgactggaaaaacctttttttggggccacctaaattaatttggcgggcccccttttttaacccattggattgataaaacaaaggctttccccaatt

SEQ ID NO: 4191 - DNA, 658 bp, Zea mays
  Clone ID: TF_ZmC3507_4
catgaggaggatcatgtgaatgacccacaggaggcatggcaagaggttgatccagacgagtactcctatgaggagctagttgcattgggtgaagtagttggtacagaaaacagaggtctctctgctgatgcacttgcttctttaccttcagtaacatacaagatgcaaagtgttcaggatggcaacacagagcaatgtgtaatttgccgtgtggaattggaggagggtgaatctttgattgcacttccctgcaagcacttataccatcctgaatgcataaaccagtggctgcaaataaataaggtatgccctatgtgcagtgcagaagtatcaacctccagcaacaaggagccatgattgctctcggatggccatcttgggcatttgatgggattaactagcggcaccactgcagcatctttatgcttcaagcaaaagcataaaggaacgtcttacatacatgcaaggagatcaggaaataatcctcttgtcaatctaaagttttgtcctggttttctgctcactggatttattggccctgcagcttatatggtcttagttcccttcggacgccttatgatccataaaacatgccaattatattatattgttagttattctttttactaaaaaaaaaaagggcggcgtgcatcagaac

SEQ ID NO: 4192 - DNA, 875 bp, Zea mays
  unsure (1)..(875): unsure at all n locations
  Clone ID: TF_ZmC420590_1
ggctgccgcttccggcanaacatccaggagcagcagcagctaccagctagctctcgcaatgagcatgggcacgcccacctcgtggctgttcgcgtcggacaactcgcggtacagcacccgggcgcggctgctcttcatgggcctctccttcgccatcggcatcctcacgttcctcctctacctcgccatctggtacctctgcagccgccgccgccaactccgccgccgtcagcgcggcgagctcttcgcgcccggggtgggcgacacggacggcgaccacggcatgagcgcggacgcgatcgccgcgctgccgacgttcgtgcacggggcggaggcgccggcgctcgactgcccggtatgcctcggccaggtggaggccggggagaaggtgcggcggctgcccaagtgcgcgcactccttccacgccgactgcgtcgacgcctggctccgcgcccactccacctgccccatgtgccgcgccgccgtcggcaccgcagccgccgccaccgccaccaagcagcaggccgaggtggcggccgtcgtcgtcgtcgtccccgtcccgtccccgccggcggaggcgttgccacctgtgtagtgtggcgtacgtctgtcgtgtggatcgatgcgaggagatggaggaccaccgcgcgccgcctgggccggctgggaatgcttgaagctgactgatcgcacgcatgattggagaacagcaacggcgagttgctacaacagtgatagacacagcacagcagtgctatctttagcttagctagagtggtaacgtactaggatcgtatcaccatcgtacgtatctggctgcgtgttcacatatagaggcttattattatattagttaattaattaattgattaatt

SEQ ID NO: 4193 - DNA, 759 bp, Zea mays
  unsure (1)..(759): unsure at all n locations
  Clone ID: TF_LIB4828-050-R1-N1-D2
actccatagggcgaatgggatcctcgaggccggccgggggctgcccgtatcctccaaattggttcgcgaaacactcatcactagtaccaatggaaacaacactccccatggtccggggcaatggccgcctcctgcccttgtcccttctcttgctcgctgccgccgatttcacaacggtgcatggccaggggcagcagcctgaagggccgtactactcgcgaagcttcaacccatccatggccatcgtcatcgtcgtgctcatcgccgccttcttcttcctcggcttcttctccgtctacgtccgccactgctacggcgacggctctagcggctactccgcgagcccggcccccggcggtgccgccgcgcgatcgcggcgccagcagcgcgggctcgactcggcggtgctggagtccttcccgaccatggcgtacgccgacgtgaaggcgcacaaggccggcaagggcgcgctcgagtgcgccgtctgcctcagcgagttcgacgacgacgagacgctgcgcctgctgcccaagtgctcccacgtcttccacccggactgcatcgacacgtggctcgcctcgcacgtcacctgccccgtctgccgcgaggcttcccgcctgnggatcgcggtcgacgcggaggagcgtccagactgacgggtcgagcaagggcggtaggacagttggcgacgccggcgcaggcgccaagtctttctgacatgacgacccagcgtgcgcgcctggacagcgtgnttgactg

SEQ ID NO: 4194 - DNA, 1235 bp, Zea mays
  Clone ID: TF_ZmC6833_1
gcgcggtcggctcctgcgcgcggtgtggtcgcgccagccgccgtggcaccggcgcgtgcggggggccggcggcggcggcttaacaggcaggcgggacgagccgtcgtccgtcgtccgcggcgacgggcggcggggcctgggcctgccgctcatccgcatgctccccgtcgtcaagttcactgccgcctcctgcgacgccggcgccggcgctggtggcgtggcgccgaggatatccgtgtcggagtgcgccgtgtgcctgagcgagttcgtggagcgcgagcgcgtccggctgttgcccaactgctcccacgccttccacatcgactgcatcgacacgtggctgcagggcagcgcgcggtgccccttctgccggagcgacgtcacgctgccggcgatcccgtcggcgcggcgcgccccggcggcggcggcggcggtccttcccaccagcaggcgccgggacgacgcgctcgccagcgaaagcattgtgatcgaggtgcgaggggagcgcgagaggtggttcagcagcagccacgggacgacgacgacgacgccccggcgccagccgccgaagcagccggcgccgcggtgcagcaaggcggcggagagcgtcggcgacgaggccatcgacacgaggaagacggacgcggagttcgcggtgcagcccttgcggcggtccgtctccctggactcctcctgcggcaagcacctctacgtgtccatccaggagctcctcgccacgcaaaggtgggacgacggcgacgtcggtcgaccgtgagcccggccggccggccgaccgccagctgcgcatcattccaggacggacgcccactaccactacgtacaagacgaagcagcgatttgttttgcgcgccagatcaggcagccatcaacgacgctggtgttgggtgacccaacccccagtcccagtgcacgcggattggacatttccggggcgaaaaaggtcgctcgctgcatgcgcgccgagagcttacgacgggcgcgctggggcctctcagcctagatcggggccacagagccgtaggccagcgcggcgagcatgcaggtgtcgcgcggcagccccctccccctgggcgtgtgcgcgcgagtggccacgcaccgccgactgctgggggcgagggccggcgcgcgcgcgccaccggccacgcacgtaccggccatgtgcgcgcttcgctttgcgggtacgtaagccgaagtggacgtgccctggatgcacc

SEQ ID NO: 4195 - DNA, 838 bp, Zea mays
  Clone ID: TF_ZmC6833_2
cccagcgtccgcggccgcgtggggtcgtgaagttcacggccgcctcctgcgacgccggcgccggcgccggcgccggtggcgtggcgccgaggatatccgtgtcggagtgcgccgtgtgcctgagcgagttcgtggagcgcgagcgcgtccggctgctgcccaactgctcccacgccttccacatcgactgcatcgacacgtggctgcagggcagcgcgcggtgccccttctgccggagcgacgtcacgctgccggcgatcccgtcggcgcggcgcgccccggcggcggcggcgccggtccttcccaccagcaggcgccgggacgacgcgctcgccagcgaaagcattgtgatcgaggtgcgaggggagcgcgagaggtggttcagcagcagccacgggacgacgacgacgccccggcgccagccgccgaagcagcagccgccgctgccgcggtgcagcaaggcggcggagagcgtcggcgacgaggccatcgacacgaggaagacggacgcggagttcgcggtgcagcccttgcggcggtccgtctccctggactcctcctgcggcaagcacctctacgtgtccatccaggagctcctcgccacgcaaaggcaagtgcgcgacccatccgtgcgttcgtgatccgcggatgccatgccatgccatggccgtgcgtgcgtgcagtcagaaggaatacccctgctgtgcctgtgctgcctgctataccttatagcactgtagctgtagatggttgtgctcaatcttttttttttaaattccttgtcactactactactactaggcgctacgtagctgtgactgcaaaaaacttttacgac

SEQ ID NO: 4196 - DNA, 1010 bp, Zea mays
  Clone ID: TF_ZmC3313_1
tgactaaaattccaagtttatgcttgggctaagtttatattgggtattttatacccatgggttaacatgtatgggtgaaagtggaacgttctaatacccgtttacccattgggtcaagatttttgaccaataaccgacccacggataaaatatttagcccacatacatactttaatggagtaaatattcatcaggtcgcgggtacccattgccatctctactgacgcatggtcaggccgcatggtggcacagaccgggtgcgacaacgacacggaccacggagatgactcgctcactcgcccctgctgccggtccgttgcgcgagaggcgacgcaccggcgatgacggtggcacaggtgagcgtggcgccgtgggtgggccgggcggggccgcggcatacagcgtgagcctctggtggacggcttcaacgtggcggtcgtggtgacaggctgccgccggagggcgggcggcggtgccccacgctgggatgcgccgtggacctcgctgccgactgccccgcgcgcccgagcgccatgaggaggatgcggcgctgttcaaggccgagtgcccagacacgaggaccaacgccacggacgtcgaggtgacgccgcaggaccgcgtcaagcccgttgagatcaaggttgtcttgtgccccaagcccgccaccatcgtcgcgggccacctctagcgcgccgcgccatgcatgcgtcgtcctggtgggcgcggcggtggtgtgccggtaccgcaaggaggaggcctggaacgagtcgacgtgcccggtgtgcctggccgacttcgacgacggcgaggtcgtgcgggtgctccccgagtgcatgcactacttccacgccgactgcatcgacacgtggctgcgcgggagcaccagctgcccgatgtgccgcgccgagaccacgcccacgcccacgcctagcccggcctccgtgcgccaccacctcgagctctccgtctccctcgaggagatcctcgtcgcgacgtgagcagcgccccga

SEQ ID NO: 4197 - DNA, 929 bp, Zea mays
  Clone ID: TF_ZmC4566_1
cggctccctcgtggcctctctcccctcctcacacaggcacacacgcactttctgtcagcttcctcccctgcgccgataagcaagcccgtgagccaacagtggtgccagcggcccgagcggcgaggatgcacagcggagcgaggaagctcatgtgggggaccagcccggacaggcccgacgaccacgacgtggtcatcgtgctcgcctcgctgctgtgcgcgctcatcaccgtcctcggcatcggcctcgtggcgcggtgcgcgtgcgcgcgcgggcccagcgcgcaggcggcggctgccgccaacaggggcgtcaagaagtcggtgctgcgcaggatccccaccgtgccctacgccgcctgcagccaaggggaaggggacgacgcggacgagtgcgccatctgcctggcggagttcgaggagggcgagcccacgcgcgtgctgccccagtgcggccacgccttccacgccgcctgcgtcgacaggtggctgcgcgcccactcgtcctgcccctcctgccgccgcatcctctccctccagctgccgcccggcgagcggtgccgccgctgcggcgcgcggcccctggacgacggggacgctgggtggaagcccacctactacagcgccatgccgccgttcctggcgtaagcggcggaggaatcgcccgatccggaagcaaaggaaagcaaagcaaagcaaaccttcgggttaagttcctcggctgcagatttcggtactgcctgtatgtggttggtagtgcgtagcaatctgggaatgaggaaaattaggggatcaattaggttgtttgttgcagctgaaaacactgcactgcagcgtgcgtagtagtagtactagtaccaggctggcgtgtacagtacagtttgtaaatactcaagtaattaatatgcatgcgatgagctttggtatggg

SEQ ID NO: 4198 - DNA, 1343 bp, Zea mays
  Clone ID: TF_ZmC364867_1
ccggccggggtccaacgcctctcctcccccttacccgcgcgggatccaacccgcccataagacgccaccgccccgcatctgcccccacctggatacgacccgaccttcaaccccgacgccaggcagccaggcacgcacgcacgcacctacctgctgcggcggcccagagagatggacggcgggcggccggagatgcggcggaccatgacgctgtccgagcagctgtcgtccacgcccgacccggccatccgcgacttcctcaagatcccccaagacgccgacgtcggcgggatcctccacgacgaagatagcccctcggctgtggacgcgcaggggccccgcgccggcaggacgagcggctggaagccgctgcgggaccggctccggctccggcgcgcggcgggcgcctggcagacgccgcctaataagcccggcgctgccgcggcgcacgccccgaccaacagcggcaatctcagcaacaggtacaactacaaccccggcgaggcggcggcggcgttctcccgcaccttctcccgcgcgccctctctgcgcgcgccgtcactccgcgcgacgcccacgttctcgcgcgtcgcgtccacccgcctcggccccgcctcgtcccgctccagctccaggcgccccgcgacgtacgacttccgcgacctcgacgagcgacgccacgacgccgacgccgacgacgggggcgaggaagaggacgacgagggcgagggcgaggacgacgacgacgagggcgacgaggaggatgagaaggaggaggcgcccgccgcgcagatgtcgctgatggcgctgctggagcagacggacagccagtgggacgacgacgaggacgaggaggagagcggcggcggtggcggcgcgcgcaagaaaggcgagggcgacgacgacgaggacgacggcgagggccgggaggaggagatggtgcacgtgtgctgcgtgtgcatggtgcggcacaagggcgcggccttcatcccctgcggccacaccttctgccgcctctgctcccgcgagctctgggtcagccgcggcaactgcccgctctgcaacggcttcatccaggagatcctcgacatcttctgacggatcgatcgagcttgccgtcgatcaccatcgtctagcttgcttccgcttcatatcctagacgaggatgtgagtggccgatgcgacactccggaatcagtgaaactgaacctctcgtagacgaattcgatttcgagctacccagcaccaaaactctgttgtttgctagattttctttttggggatgtcattgatcgttcaagtacgtatgctaccgtacgttgcaataaaatggtatagtatct

SEQ ID NO: 4199 - DNA, 472 bp, Zea mays
  Clone ID: TF_LIB5026-037-Q1-XP1-B12
gccggccgggtccagagaatcttcgaagccgcaagccctaaaggaaacgcaagaatcgccgagagatccgaagcgaggtggagagatcgagatggcggacgtggggagcctcgagaggatgggccgggagctcaagtgccccatctgcttgagcctgctcacttcggcggtgtccatcacctgcaatcacatcttctgcaacgcctgcctgacggagtctaagaaatctgcctcctgctgccctgtgtgcaaggttccattccaccggagagaaatacggccagcgcctcacatggataatttggtggccgttttcaaaagtatggaagctgcagcaggtattagtgtcgtgtcaacacagctgactcctgcacccaaagctgcagagtgtggtgagtacactgctggaaagcctagaaggtcgaataaaaagaagctagcatccgaaaaaaaaaaaaaaaaaaggccccta

SEQ ID NO: 4200 - DNA, 518 bp, Zea mays
  Clone ID: TF_LIB4744-093-A1-K1-F1
tgggacctcgagccggccaaaaagcgctatgcgccataccaaccatgagcgacctgttatcctacatttccaaggtcatgtgcatcaaggcaagatcggaggcaacacaagccggcgaggacagcggctgcccagcggacgagtgccgcgtctgcctgtccaagattcggctcggcgaggctacccgccgactgccgtgtcgccatgtgttccaccgggactgcgtcgaccggtggctctcgtcctgcaagcgaacctgtccgctgtgccgagtttatgtggccgatgggaacaagcagccggtggcggcaaagcacaccagccgtgaagcacaggcactcgccgacgaccttgttatctggttctccaccgtgcttgttcccggtttctgatgccaaattccttcgtctgttcgttcgtttgaaaaagcttgattgctgattactgaaaataagaagttcgagcaaatatatgttatcgaaatttatggtaacaaaaaaaaaaaaaaaaaagcggcc

SEQ ID NO: 4201 - DNA, 1115 bp, Zea mays
  unsure (1)..(1115): unsure at all n locations
  Clone ID: TF_ZmC28409_2
ttcatacacagggtgcatgggaagatgttgacccagacgaatactcttacgaggagctaattgcgctgggtgaagttgtcggtacggaaagcaaaggccttgctgctgataccattgcctcattaccttgggtgacttaccaggcccaagacaagcaagatggcaacatggaacagtgtgctatttgtcgtgtcgagtttgacgagggcgagtcattagttgcactcccttgcaaacatccataccattttgagtgcataaaccagtggctgcagctaaacaaggtatgcccgatgtgcagtgctgaagttcccacttttgtgaacaagcaggcatgactactgaacctgaagaagatagcggtggcttggtatttatctgccattgatggaagaagcgccaactgttaaattgttcagggaagcaagggaattggctgggttctgattcccgttttcttcagttcgacagacttagtnnnnncccccccccncccccccccccccccgggcctgtacgcatgctaatttctatggccataccgctggttatttatgcattccattagatgccgatgattcattgcttgtagatgtaaatcaacaatcataccaccatagtcaatagcagttgttttaatgccaatagcaacgttcatgtttaaaatggtagcatttttgttccttgttttctagaccggacattttatgttcctgaagatggtgattgtgttacaaaaaaaaaaaaaaaaaaaaaaaaaaaaaaaaaaaaaaaaaaaaaaaaaaaaaaaaaaaaaaaaaaaaaaaaaaaaaaaaaaaaaaaaaaaaaaagggggggccgttttaaaggatcaaagtttacttccgcgggcttgcaacgtaatattttttttttaggggcccctaaataaaattcattggccgactttttaaaacgtcaggaattggaaaaaccctggggttacccaatttaatggcttggaagaaaatccccttttccccagttggggtaataccaaaaaggcccgaaccgatcgcctttccaaaaagttgaccaccctaaatggcaaatgggaccccccctgtaggggcccattaagcggggggggtgggggg

SEQ ID NO: 4202 - DNA, 881 bp, Zea mays
  Clone ID: TF_ZmC592_1
ccggccgggaggcctttgtgtgcatcacctgctttatccttattgctttgtggaaaagaaacattgcagtgtaggtgcaccagctgctaatgtggatctctcaccccacaccaagactagcacccactcctcttcggcaagagaataatattgtgatccccggtgaccacggaaccacacccccagagaaagcattctacatattctcatatacactcattagcacatagcgctaggcgccataccaaccatgagcgacctgttatcctacatttccaaggtcatgtgcatcaaggcaagatcggaggcaacacaagccggcgaggacggcggctgcccagcggacgagtgccgcgtctgcctgtccaagattcggctcggcgaggctacccgccgactgccgtgtcgccatgtgttccaccgggactgcgtcgaccggtggctctcgtcctgcaagcgaacctgtccgctgtgccgagtttatgtggccgatgggaacaagcagccggtggcggcaaagcacaccagccgtgaagcacaggcactcgccgacgaccttgttatctggttctccaccgtgcttgttcccggtttctgatgccaaattccttcgtctgttcgttcgtttgaaaaagcttgattggtgtgtattttttttattgcatgcatgatacatgtacgtacctacgttactgttaattgtccttagaacagtttctagaaaatctgtgtgtatgtagcatcttgttgcatgaactgattggaacttctgtgtttgcagctgattactgaaaataagaagttcgagcaaatatatgttatcgaaatttatggtcgttactgttaaaaaaaaaaaaaaaaaaaaaaaggcccctagggcc

SEQ ID NO: 4203 - DNA, 655 bp, Zea mays
  Clone ID: TF_ZmC592_2
gaccccctgagaaaccattctacatattctcatatacactcattagcacatagcgctggccgccataccaaccatgagcgacctgttatcctacatttccaaggtcatgtgcatcaaggcaagatcggaggcaacacaagccggcgaggacagcggctgcccagcggacgagtgccgcgtctgcctgtccaagattcggctcggcgaggctacccgccgactgccgtgtcgccatgtgttccaccgggactgcgtcgaccggtggctctcgtcctgcaagcgaacctgtccgctgtgccgagtttatgtggccgatgggaacaagcagccggtggcggcaaagcacaccagccgtgaagcacaggcactcgccgacgaccttgttatctggttctccaccgtgcttgttcccggtttctgatgccaaattccttcgtctgttcgttcgtttgaaaaagcttgattggtgtgtattttttttattgcatgcatgatacatgtacgtactacgttactgttaattgtccttagaacagtttctagaaaatctgtgtgtatgtagcatcttgttgcatgaactgattggaacttctgtgtttgcagctgattactgaaaataagaagttcgagcaaaaaaaaaaaaaaaaaagcggcc

SEQ ID NO: 4204 - DNA, 1161 bp, Zea mays
  Clone ID: TF_ZmC8390_2
caatcatccatccccgcatttctccactcaacccacaccccaaagagaggggaatcagtctctcccatcccatcaccaaccctcctcctccttgcctaggtactcgcagcagcgtcggcaagcaaggttctcttctcgcgccgcccagatctgagcgctcccatggccatgccgtcctcccgctccccggcgccgccgccaacggcctcctcctcctactggtgctacatgtgcgaccgcttcgttcgcgccgccgcttcctcctcctcctcacccacttcgccgtcctcctcctcccccgcctgcccgtcctgcggcgggggcttcctcgaggagatgggcgcgccgccgccccgcgcccgccggccccgccgcgccgcccgccgcggcgccgactcccgcgcctcgcccttcaaccccgtcatcgttctccgccgctccccgcccgccgacgccgacgccgatggctcctcctctcccgccgccgccaccggcagcagcttcgagctgttctacgacgacggggcggggtcgcgtgggcgcccgctcccggagagcatgtcggacttcctcatgggctccggcttcgagcggctgctggagcagctggcccagatggaggccggcggcggtctggcggcgcgcgcccgtgacgcgccgccggcgtccaaggccgccgtggactccatgcccgcgctccgcgtcggcgccgcccacgtcgcggccgacgcgcactgcgccgtctgcaaggaggccttcgagctgggcgccgaggccagggagatgccctgcgcccacatctaccatgccgactgcatcctgccctggctcgcgctccgcaactcctgccccgtctgccgccacgagatgcccgccgacaacgccgccccgcgcgctgccgccgccgccgccgcggacgaggacgccagggtcggcctcaccatctggaggctccccggcggcgggttcgcggtcgggaggttcgccggcgggccgaggcccgacgagagggagctccccgtggtgtacacggagatggaaagcgggttcaacttcaacagcggccacgcgcccaggcggatctcgtggggcgccaggcaggccgcggccacggacaggggcaccgtccgccgcttcctccgcagcgtcttcgcctgcttt

SEQ ID NO: 4205 - DNA, 574 bp, Zea mays
  Clone ID: TF_LIB4172-009-Q1-L1-C10
aattcggcacgaggccaccgctctgcaatggcggctccgcttcccccacttctccttctcctctccatctcccccgcaatcttcctctcgtagtgctgctctcattcttccaccaaccgaaggttctgcggccgcgagagtgctggggggcgaacaatggaggcggcgtggaggaaggccaagagggcgctgggctccagcctctgcgtgcaccaccccgccgtcgccggcgaccgcgaggacggcgccagcgagcgccgcgcctcggatgcgctctccctcgacactaccgcggcggcgcacgcatcgacgcccaacgcgccggcgccgccggaggccggcgcgctgcggaggtccaagtccggaggcaagtccaccaatagaatgtgtgcaatatgttttgattccatgaagccaggtcgtggacaagctctattcactgctgaatgttctcatatgtttcacttccactgcatctcctctagtgtgaaacacggcaaccatgtatgcccagtttgccgggcaaaatggaaagagatccccttcaatcgctcattatcttctatagttccat

SEQ ID NO: 4206 - DNA, 1540 bp, Zea mays
  Clone ID: TF_ZmC299_2
tttcctctccccgccaatccgcctttatttttatgttccgaccgacctcgaaaccctagcccccagaccatgcgactcggaaccgccatgccggacctcccctgcgacggcgatggcgtctgtatggtctgccgcgtcgcatccccgccggaggtcgacctcctcacctgctccacctgcaccacgccctggcactctccgtgcctctccaagcctgttctatctggggatcctgagaccgacaagcaaatccgtagagcaacaaagcgtgctcatttatctgttgctgaaaggctgcttaaagagtttggttgttctatctgccgggcggtgattaaagagccacttacaacaccatgtgctcacaacttctgcaagacttgtttgcttggtgcatatgatagccagtcctctatgagggaaagaagccgtggtggtcggactctaagggcacagaagattgtgaagacgtgcccttcctgccctactgacatctgcgacttcttagaaaatccccagatcaaccgagaaatgatggagttgattgagtccttgcaacgcaaggctgttgaagaaggcaagatggctgcaggtgatgccgaggaatctggtgatggtgactcggaggaaaatggtggtgctttggtgaagggagaagatgatagcaatttgaacgaggaaggtcaagacggtgtagacgctgatggttctgtgaagattgtggttgaaatggagggtgcaaaagatgataaaaagtcaaagatgggcgcggctgaagtggtggatgtgttagttgaagatgctgctgcgaaacagccgaagaagcgcacggctgatgaagatgctgctgcgaaacagacgaagcacaaggctgatgctgagactggtggcaagagggtgaagagcagtgctgcagtggaagaggttgatgtgtgcgtcactcctatgaaacggaccaggaagagtggtgatatgcatgatgacggcaacggcagccctgctgtgagcagcggccgcagggtgactcggagcagtgtgaatgccacgggagctgatgacagtccagcgaggaggaccagaagccgtggcagagcatgctgaaggtagtgggtgctgggcgccctcttttttgggtgtggaacctttgctgtgcgcagtgttgcagccatttcttttggtttgggggagaccgacctgctacaggtattccccatgcttctttcttccaggatgcaattcctatttaatttcaaggtagctgctgcactcgatctgcgagatgcaattttgttaactggcagccaggtgttggcttacgccatgattttggcacaacaggttcctagagagaaacaagatagctgatgttcttgcaaaaaaaaaagcaagacgggcaactaccccaaatccatgccttttctctaggggcttcattctccaacctgtaatatctagcatgtgttttgaaacttggattgttcggggcaacatgaccccccatctttgtaacatgtttatgatgtaataaatcttgaatttg

SEQ ID NO: 4207 - DNA, 667 bp, Zea mays
  Clone ID: TF_ZmC8696_1
gtgagcgagcggcagcggtgtgtgccgaacaatggcagcgcaggaggccgcagcaggcggcgggagcccgcaggtggtgatgcggtggcggtacggggacgtgggcgacagcaacttcgcggtgcacgggcgcgcggtgccgctgctggtggggctgctgtgcgccgtcgtcttcttcgtcgcgctgtgcctgtacctccgctggaggtgccaccgccacgcgcccgacgacccggaggcggacgccagctccccgtcgtcggccgcagcggcgtcgctccccggcctcgacgccgacgccatccgcgggctgcccgtgacgctgtaccgcccgcccgcgtcgccgcgcctccgaggggaggccggcgacgacgacccggcggcggcgctgtgctccatctgcatcagcgcgctggtggccggcgagaaggtgaaggtgctcccgccgtgcggccactgcttccacccggactgcgtcgacgcctggctccggtcccagcccagctgcccgctctgccggtgcctcctcgccgccgctgccaaggacgccgtgtgagtgccaacgccaacggcaggcgcttcgatcgtcgcatgacaagcgggcccagctaccagcgtccctcgagacccgcggccttttaaatcagcgcactagttaatgatagcg

SEQ ID NO: 4208 - DNA, 774 bp, Zea mays
  Clone ID: TF_LIB4738-004-R1-K1-A5
ggccgggctgcagttcccgccccgtcgccttcggcccttcgctgtcgccttgactcggaatagaacgcactcgtactgggttggaacctttggttattgctgcaattcctactatgaagtacaattgtgaggctttcaactctaaagacgatgtccagtgctcaatatgtttaggcgaatacagggagaaagagatactacgaatcataccaacatgccgccacagctttcaccttgcctgcttagatttatggttggaaaagcagacgacttgcccaatatgccgggtctcactggaagagctgcaggctgccatgccatcggtatgtagcatcagcaactcccgcccgagcccgaccccgaccccgacccagagaattctgataacccagcacctcagtgtttccaacctgctcgtcaacatcccagagatcaaaataatagccaggagacgcacgaatcagtagaagtgattattgaaattcgacgatgaatagaaacattgacatgaatgtagaaagctaagcgacggaggcaaatatggaacatttcctgcaaccaagcaccggcgttttctttagggctactgctaatcaattagtcatgtcgcccgcagcattgtctcggtatcatgacgtttcatctcccaattcctttgtagaggaaaaagaaaagtttatgtacgattcacgtagtaggtcatcatgttatattattgagaatctgaggcctttgagatcattttgatgttgtaaatatacattgtatcaatat

SEQ ID NO: 4209 - DNA, 1351 bp, Zea mays
  unsure (1)..(1351): unsure at all n locations
  Clone ID: TF_ZmC188828_1
ttttttttttttttttggcgaaaaaaattgntaagttccatatgcaaataaatactaggatcatgtgtgtacagcaagcgtgcgtgtactagatactgtactcaacaagcgtgcgtgcagacggctgctggactgtacagcaacaatagaactaatcttttgcatttcaattggattataaaaaaataaagtgtgccatatgcaaataaaaaaatagatcatgtaggtcttcgagacagtggtcttctaaaccggacaagcgttcatcctacttgcagacggctgctggactgtacagcaacaatagaactaatcttttgtatttcaattggattatacttaatgaaagtgtggttcagacactagaaagaataggaacttcatgtcttcgagacagtggtcttgcaaaccggacaagcgttcttccgagaaagccactgctttatgcagtgcacgtgatagctgtggccacagctcagcttcccagtttcctcgtgtacttcgaactcttcttgacagatgctacatctcctgtccatttccgtagaaaaatgtctggggttgaacgcggagtactttaccatcctaaggctttgaatgatctcgtcctcacgaagccctgtacttacatatccaatccggtcctcaagatcgagcaactcctcatatgtcatgttgtcgacatcgaggcgccaatcctgatactgatcataaatacccattcttcccaataacatccttgtctggaacatcatctcttcctcaacccgtgcgtgggagtgccggcggccactcacatgtcggatgcgtccggaaggtgcacggtcgacatcaacgaacggcatgacatggtgcggcggtgaactcagaggggacgaggacatgtgctcccgcatggtgaccctcctggccggaggtgcgccaggcctctctctccgcggcctgtcggcctcggcgcggcggcgcgcggccaccgtatggtgcggcgccaccacgcagtccaccgaagaggcctcggcggcgaacggtatgcccggcgtgcaccagacgtccccgccgacgcccatcccggcactggccccaccaccaccactgacgccgccagccctcgccttccgcctctccctctcgttcctccgccgcctcacgcgccactcctcggaacgccggggcgcttgagcctggaccgccggtgccgctccagccgcgcacccaagcctgcgccagtccgccgtgggccgggccgcttccaccgcggcagccggcgcgtgcgcctgggccgccgcggcgcaaccgagtccgcgccagtccgccggaggccgcgggattnccggcgcgatagcctcccgat

SEQ ID NO: 4210 - DNA, 648 bp, Zea mays
  Clone ID: TF_ZmC188828_2
ggcgtgaatatatgctgtccattgaaccaccaatgcaagctggactgctttgggccaagtccgactgccatgcgttcagtaatacaacaaacacatggaagaactcatgcagtaagtccgactgtcatgcgttgagtaaggcagccagtactagatactgtactcagtaggccatggtgaaaaaaattgtaagttccatatgcaaataaatactaggatcatgtgtgtacagcaagcgtgcgtgtactagatactgtactcaacaagcgtgcgtgcagacggctgctggactgtacagcaacaatagaactaatcttttgcatttcaattggattatacttaatgaaagtgtggttcagacactagaaagaatagggacttcaggtcttcgagacagtggtcttgcaaaccggacaagcgttcttccgagaaagccactgctttatgcagtgcacgtgatagctgtggccacagctcagcttcccagtttcctcgtgtacttcgaactcttcttgacagatgctacatctcctgtccatttccgtagaaaaatgtctggggttgaacgcggagtactttaccatcctaaggctttgaatgatctcgtcctcacgaagccctgtacttacccggggattccgtgaccgg

SEQ ID NO: 4211 - DNA, 1304 bp, Zea mays
  Clone ID: TF_ZmC366351_1
ggccgcttttttttttttttttttgcagctctgaccctttatgttattcaatattgatacaatgtatatttacaacatcaaaatgatctcaaaggcctcagattctcaataatataacatgatgacctactacgtgaatcgtacataaacttttctttttcctctacaaaggaattgggagatgaaacgtcatgataccgagacaatgctgcgggcgacatgactaattgattagcagtagccctaaagaaaacgccggtgcttggttgcaggaaatgttccatatttgcctccgtcgcttagctttctacattcatgtcaatgtttctattcatcgtcgaatttcaataatcacttctactgattcgtgcgtctcctggctattattttgatctctgggatgttgacgagcaggttggaaacactgaggtgctgggttatcagaattctctgggtcggggtcggggtcgggctcgggcgggagttgctggatgctacataccgatggcatggcagcctgcagctcttccagtgagacccggcatattgggcaagtcgtctgcttttccaaccataaatctaagcaggcaaggtgaaagctgtggcggcatgttggtatgattcgtagtatctctttctccctgtattcgcctaaacatattgagcactggacatcgtctttagagttgaaagcctcacaattgtacttcatagtaggaattgcagcaataaccaaaggttccaacccagtacgagtgcgttctatcgggccatcgagttccgcggcgaaatccggcgatggcggcgcacgggtgtcaccacggcgttcgcggcagcagatgaacctcacacagacgaacgccgcgaaggctgcggtcatgccgaagccgagcgccgcgctgactaggttcagccccgacccaaacatgcccgctgatgtgcttcacaccgagtttgccccacctcccctccgcctccgtcctcacactgaatcactgataccacctaccagacactgaaaggcgatagcctaccgcttgaacagacgggctgccgctgccgcggatagataggagagcggtgaggtcgcggcccggggcgcccatttggtggggcacgatgcggagctagccggttgaggccaaccgggtgcgatgcgatggggccgcgaagaaaggggcgaccggtgcggcagcggccggtggcgaggtgcggaggaagggagcggacgagcgccagatgatggaggctgaaggggcggctgctacagtggctcgccccggccggcctcgaggtacccaatg

SEQ ID NO: 4212 - DNA, 1874 bp, Zea mays
  Clone ID: TF_ZmC4447_6
gccggtagaagttcccttgtacattatcagtcattagatacgcaccaccattcacgcttggttaaacaaaaaagcaagtgtttgtgtttgcgaagagaattaaagggaggccggcacaaaagcttccccgacgatgacgagggggcattggcgtcggtccttctttgggtcacctttggtgccaagatgacgccatagtccttgatatagtagtcgtcgaacgtgcaccacatggggaagttgaaaacattattcaaacaaaagaaattgcatgcaaggctcttctttaaatactactcccttcatccaaaaatataattcaagaatctcggtgatatttatctaatactacgcattgtgcaagggtagtaggtgggcttggagagagatatcgatgtagtagatgtgttttctattatagatgtagacacatgtggtgtagtggtagctattggtagtatttgtttgagaggtcgtgggttcaaatccctttggggtcatgtttatttttttaatttagctaggcgttggctgtacgagggaataagaatgggaacatgagaatggcctgtgtggaatggccgactactattgcagccttataagtagtagagatttctaaatggttttgtgaaagcacgaacgccattgcagtgcaggcgatgcaagccaggaacgggccacggacacgccagtacgcgcactttggtcgtcgtctccgatcctcgcattggagggtccttctagaagaccaccatgcctgtggattttttccaacctcaccatccctgcttcccgcctaccttcccaatgcaagaccccgacactgctgcgctgcattcccctacgttacatatatggacaatggggatgcgagggccacgccaccatcgtccccgacaccgttctcactctgctagctgtctgcctgcctgcatccgatggacgcgggccggggcagcagcgccaccatcttcccggtgccgcaggtcccggcgctagctctgctcttccccccgccgccgccggcggcggcggcattgccatcttcttccctctccctttcctcctcctcctcctcgcgccacgcgccatccatcaccagcttcccgatcctcgtgctcacggtgctgggcatcctcgccgcctgcgtcctcatccttgcctactacgtcttcgtcatccgctgctgcctcacctggcaccgcgaccgtagcgcgtccgacgccgtctcccgccgcccccagcgcgcccgcgcccgcgtccgcaccagcactggcggcaccccggcctccagcgccgagccgcgcggcctcgaggacgccgtcatccgggcgctgccggcgttcacttacaggaagaagcccgccgacttaccgccgtccgcacccgcgcccgcgagcgagtgcgcggtgtgcctcggcgagttcgaggagggagacagcgtgaggatgctgcccgcctgcctccacgtcttccacgtcggctgcgtcgacgcctggctccagggcaacgccagctgcccgctctgcagggccagggcggacgtcgatgccgccagctgctgccgcctgctcccgccgccgccacccgaggaggaggaggacgtagcggccatccaggtcgtcgtcgtcgtccccggcgcagaggaagacgaccgccaaggcacggtgccacagcggcagcgagaaaccaccgtggctcctgctgctgctgccgaggttgaaggagaagatcctcctcaggtcggtggtgaaaaggagaggaggaaggatggagatgttgcaccgaggacgaggtccttctccacggacggtgacggtggcgaggaggttcagagcatcttgcagaggaacggacagggactcccgtag

SEQ ID NO: 4213 - DNA, 613 bp, Zea mays
  Clone ID: TF_ZmC54317_2
cctcgaggccggccgggatctccttcctcatccgaaacaactgacatcgccccgcagccaagaagctcggctcagctcagctcagttggttcctccattttgagtggaggactgactgtctcgcgatgctgatggggttccccgtggggtactcggagacgcccaagctgctgctgcacctcctcttcctcctcgaccacctgcgccgcctctcctcctggctgctccgcctcgcgggcgccgccgacgccgacgccgacaccgacgccggccaccctcgccacccctgcgccgccgcccagcgcctggaggagcactcccccgcgttgcgcttcgactcgctgtcgtgcggaagcggaggaggggtgacggcgccgcgcccgctgcccgagggctgctgcgtctgcctgggcgacttccacgccgccgccgaggtgcgccgcgcccggggctgccgccacgtcttccaccgcgcctgcctcgaccgctgggccgcgcacggccaccgcacctgcccgctctgccggacgccgctcctcccgccgctgccgctgcccctgcccctgcccctcccgctgccgccgtcgtagcgatccggattacctcctacctg

SEQ ID NO: 4214 - DNA, 1263 bp, Zea mays
  Clone ID: TF_ZmC25614_1
ccatttcagccaaagcggtgggccgcgcttccttcctcagtcctcactactcactcgtccccttccagttccgcttccgatctgcgcttcgatctccctcttcgcagaggtgcttgtgagcatgtatctgctaggcaacaaaagtggaaagaagaaagtgtatgtcgattatatgaatgtccctctaccgtatgccatcgaagagaattacggtgggcgcttctttgacgacgacgacgatcttgcccaagttcttcaagatcaggaaatattgtatcatttaattcaaggaagtaatggtggtggttcatctagaactcattcgattccaagttctagctatggccatgatcggacatcaaatgcacaaaaattgtcaggagatgtaaactgtgagtgtgagttgcaactagcagttgatgaagctttagctagagagttgcatgaaatggagagcaaactagccaacacttcacttaatgacaataatggaagaaagacaacatcatcttcagcatttgatagaggcaataattctgcaagtagacctcctcaggtattggaggaggatgtgattgatccagataatatgacgtacgaggaactgcaacagctaggggaagccattggtacccaaagcaaagggctgcctgaaagtgtcatagcactcttgccaacttcaacttacaaaactgggatattctccagaaaggaaaaacatgatgaatgtgtgatctgttgtatggcatacaagaaccgagataggctgactaaattgccatgtggacatcactaccatcaagcttgtgttgctaaatggttacagatcaataaggtatgccctgtttgcaataaggaggttttcagctagcagtatcaaacagtgcagattcgtctgatggccaactccagcaaccgtctgtagtactgcatagatgtgcattatttgtataagcatgctgccctgttgctggcaggtaatgcgccgcattgctcaaggaccatatcacggccaaattagtgatatctccagcgaaagcaataagatctctgcttttgaactttttgacattcagagtttcagacttggtgccacactacagtcctttttatcatcgcctgtatactattcatttcagtatcttgtctccagtccattcagcatactttctggaatgttgcaacttggattgaaacagcgagaaatgttgaaatttaggcactggtatttttttaaagtaaaaaaaaaaaaaaaaaaaaaaa

SEQ ID NO: 4215 - DNA, 462 bp, Zea mays
  Clone ID: TF_cC-zmle18900088d08a1
acaacacaagatttccttttctggggtaaagtgatacaaaaatgagtgctttgagtaagaaaaaggaaggaaaagaattccaaaagggaaaatgtgagaggtgcggaggggataaaggatatgaagaatctataaagaaacatgaaacacgttgctacttggttttcagggcaacagatttgcatataggacaccggttcttctgccgaagccagtgctctatgcaggaaaggtggtagtagtgtttacacgccatcttgcccacatcctcacccgataaatactcctcctggcatatgctgcattttgtttcacaatcttcatgagaccctggagctgtgggcatgtagaggctcctatttaggcacgtggacaatgcatcgtctgaaagacctgtttttacagtaccaatccgctctcccaaagcaagcaactcttcgtaggacatgccgtcgatatcca

SEQ ID NO: 4216 - DNA, 1366 bp, Zea mays
  Clone ID: TF_ZmC47563_1
ctcgtgggatcatcactgccatctctctctgactctgtgtccgtctctaaactctagtctgtgcgaatctgctgccagcagcgaggaacagaacagtagccaatttgccatctcacagttgcgttcctccgattccccgtcccccgatggacctgtctcccagctcgtcggcgccatccgcgccgccggtgccgtgcgagtggtccggcgccgggctcggctccgcggcgtgcggcctcgcctgcagggtgctctgcgccgtcgccacctgcgtcttcgcggccgtggggtcgctggtcggggcggtgacggggtccatggtggggctggcgaccgagagcgggatgctgcgcggcgccggcatcggggccatctccggcgccgtcttctccatcgaggtcgccgagtcgtcccgcgacctctggcactcgggcgactccggcgtctggaccctcctctacatggtggacatcatctccagtctcttgagcggcaggctggtccgggagaaggtggggccggctgttcagagcgccgtgcagagccagatcagcgccatcagctcgccgttcgaggagacgagcgacctgttcgagaccggcagcgtgaggggcctccccgaggccgcggtgcgccggctgccggagacggtggtcgcggaggacggcgccgtggacgcggccggccaggcgctgtgctgctcggtgtgcctgcaggacttccgggtgggcgaccgcgcgcggaggctgcccgggtgccgccacctgttccacgtgccctgcatcgactgctggctcctcaggcacggctcctgcccgctgtgccggcgagacatctgaaactgtgaatccatcgcccgcggtcgtctactctgtgactgtgaaccgccatccacgtcgccggaaaccgggtgtagtgttgctgctttggacgagatggtcagttagttgagtagggttcctactttgtaggacggcaccccgatgcccgtaagggaaatggtgcgctctgacgctctgttaactaaaaaaaagaagagagaaaacagcccctcagcttcaaagaatcaaaaggggaaaaaaatcataatagtgaacaaacgttcaacgacaaaacggcacaactgacggtcgcatgcaggttcaggccgagcttatctgcggattcagaattattcgtagttagctatagttggagaatgaaaccctaatcagggtgattagggttgatagtgaatatatatagctgagtgttatgggtcaaagctaattaacgaaggtatatacagagacgtaaaccatactctaaaaccccgtagtctcattatatcatgtacaagtgtcgataccggagcgaaactcacgaa

SEQ ID NO: 4217 - DNA, 709 bp, Zea mays
  Clone ID: TF_ZmC47563_3
agtgccagcaacgcaggagagaagctcatggtcagcgtcagcctgctgtaagcatgtaactgacctgtttcttccgtctgtttgtcgtggacgcacgcagatcagcgccatcagctcgccgttcgaggagacgagcgacctgttcgagaccggcagcgtgaggggcctccccgaggccgcggtgcgccggctgccggagacagtggtcgcggaggacggcgccgtggacgcggcgggccaggcgctgtgctgctcggtgtgcctgcaggacttccgggtgggcgaccgcgcgcggaggctgcccggttgccgccacctgttccacgtgccctgcatcgactgctggctcctcaggcacggctcctgcccgctgtgccggcgagacatctgaaactcggtcgtctgctctgtgaaccgccacccacgtcgccggaaacgtggtgtagtgttgctgctttggacgagatggtcagttagttgagtagggttcctactttgtaggacggcaccctgatgcccgtaagggaaatggtgcgctctgacgctctgttaactaaaaaagaagaagagagaaaacagcccctcagcttcaaagaatcaaaaggggaaaaaaaccataatagtgaacatacgttcaacgacaaaacggctcatctgacggtcgcgtgccggttcaggccgcgcttatttgcgggttcggtatttttcg

SEQ ID NO: 4218 - DNA, 1030 bp, Zea mays
  Clone ID: TF_ZmC10261_5
tcccgcgttcaggaggtccttaagttctgctgccatttctcattctacttgttcatgcgtcccattgcagcaccgggggaattcattctcatcacatgagattaggaatcatcagcccggatcacgctttcgtcctcctgccaccctccccggatcatctaccgccgcctgtgcatctgccacctccggttcacctgccacctccggtgcatctcccaccgccatagcttcaagggaaggaggcagaccaatgtcagagatccgcaatgtcttcgatcagattcgtcaggggagaaatgcaagattggaggatttgcttctcattgatcggtcacttattatgagacgcgcaaatttgattgatagacatcgggatatgcggcttgatgtggataatatgtcctatgaggaattgctcgcactaggtgaacgcattgggtacgtaaacacaggacttagtgaggaaaaaatcctaagtaacttaaaacaacggaaatatgtcttaatatcattggaagatcctccaacaggtgttgaaccatgttgtatttgccaggaagactacgcggaaggcgaggacttgggcagactggactgtggtcacgacttccacaccgcatgcatcaaacaatggctggttataaaaaatgtgtgcccaatctgcaagaaaacagcactggacgcctaagacatggctgcattttccctccctagggaaaatccggtagccggcactaagggcaagtggttgtcatctaaccacaccatgcacccaaagactagcaactggttacaagcatgttacaccttcccattatcaacacacatgtgggaatttatactataggtggtacatggcacttacctgaagccaatggctgtagaccccggagtttcatccttgttttgtttaaacctagatttgggatttataatttattgaatgacattcgatttacttgggcaaaaaaaaaaaaaaaaaaggcccctacagcaatacctgctatcatcattggtggctaaatcaaaa

SEQ ID NO: 4219 - DNA, 1678 bp, Zea mays
  unsure (1)..(1678): unsure at all n locations
  Clone ID: TF_ZmC22858_2
cggacgcgtgggttccacttcacggctgatgagtgatgaccctaccagaaatcgacccgatacggctcaatagcccgaatcacactcatcacaagcctcaaacttttccaaaccaatttagatgcggcgtgagtgctaaagcgctctctggactctgtttcgcagtggccgcagctgcagcgtcccttccctttttgccatccagcatcacctgtgccgccggcgcgtaattgcaccgcggtcactggttagtaggaagaagggaaggaggaggggggagcggtgtcngggtatcgtctcgtgcccatgggcgtgcacgccaggtcgatgagcttccaaatcttcggggcttgcattgcattgtccgcctgcctaagcacgcaacgcaaggaaggtatagtattctctacttcatcttccagtcctcctgctagctagctttgcctacaaagcaaccaaaaagcgagcgggcggcaccacacgtcggtcgagtgcctatcccttgaagcccttcgacaacaccgagaggaacggaacggaacggatcgcccccctttatacaagcacactcgccgcgcaacactcccgaaacgtgcatcgcgactagttagcagttactgccgcggacagagcacggcaggaaggagcgagcattcgtgcgggagagctggtggcacatggaccgccgggactcctccgaggcgccggggccggccgtgaacggcactggcggcgtcggaggcgcgggcgcggcggcgcccggggtcgtcgacgcgaccttcgacaccaacacggtgatcctgctggcggcgctgttcctggcgctgctgctcgccatcgcgctcaactcgctggccaggttcgcgctctggtgcggaggccgggccgcggccgggggcggcgaggtggcggcgtcgccgagcgtcgccgcgtcgtcctgcgcgggcgtccggggcgggatcaagaagcgcgcgctgcggagcatccccgtggaggtttacgtcggcggggatgcgaaagacgacgaggaggagggggccgggagcggggacgtgtgcgccatctgcctcggcgagttcgcggacggcgagaaggtgcgcgtgctgccgcggtgcggccacgcgttccacgtcccgtgcgtcgacgcctggctgctgtcccgcggctcgtgcccgacgtgccgccgccccgtcatggacgccaagcctgccagtgccagtgccacaggcggcaggggagtggcccagcagagcgcccgccgcccggacagcgacaccgtcgccgtggtcattgcgtgagggacgacggaggggagcatgggcgtggccatgggcccatggccatcgcaagcagcagagacctagtggtaggagcgagcacacgcaacgaagcaaggtatagagtagcgctctgtactgttccggcgtcgctgtggataagttcatgtaaaaaatatctccgtagcctgccctgctctggtagccgcatcgtccgatattatccggcgacggctggcccacttgcactagatgacgctacatgcttggagtgtactgctcgctagtgtagcatcttcttgccgttgccgttgccgtcaaatgtagtgcacgagtagctgcccagttgctctgtcacagttttcagtttcggtggtgccgtgcaacaatttgttacagat

SEQ ID NO: 4220 - DNA, 1315 bp, Zea mays
  Clone ID: TF_ZmC2009_1
attgggtacctcgggtttctttttagagttattgcatctcctcagttgtagtttatctcggttgtgtatccacgagtgctgtgtacaccaattcctgtagaaaagatgggtgaacatgttttcattgttcaagaatgttgttatatgtttttaaatcatgtaagacatgttttagttttaccatggggtctcgagaacaatattgtttatttcctcattctgttttgaagccgtcggaattatgcttgtaatcattgctgaagtttttgtgaacatatattttttttcaatcgattttgctcgagccagtatcttttattgcaacaccatgaactcccatggtgctggttcgcattcacggcttttggacctcaactatccccctgctgaaggggctggtgagggggcttcacgtttcagcagtatccctgtctctcatagagagggttcaagcagcatgcctgtacaacacatccaggcttcgagtagtacaccaccggctactggtgagcctcgcattggtatgcgtagttgccccatcgatgtggaagccatcgatgatgatgccgttatctattcttcaagaccactgcctcgagcaagacagcagttgacacgacagaaagtattactatcataatagatgatgattccgaaacaaacctagaaacagcaggcgatgctcttgacgagcatgtgaacttactgctatctctgggcatagaacgctcgcatgagcctacaagtgcaaccaacaccttccctggaataagcatggtggacacaccaaaagtaaacaccttcaagtggatccaggtgcctcctgaacctgtgaaggaggttccgaaggaaccgaagctcagctgcccgatctgtatgaacgagataaccgaagcggcgtcgaccgtatgcggtcacattttctgccagccgtgcatcaaggctgccattaaggcccagaagaagtgccctacctgccggaggaagctcactccaagacagcaacaccgggtgtacctcccatcgccttagtagcccagtgcagagtcattttgctacaagttctgccgtgccgggggctgtatgttggaggcaactgggggggggggggggggagcatagaggtcctgtttggttcgttcatttagtgtcataatcagttaacagggtaatctattaccattgctttatgtttggttagactatactgtaaacgattgcagtgggatgcaataccagccaatacaaaattattgccgctgctttttgactgtttaaaaaaaaaaaagaagggcggccgccgacaagagagctc

SEQ ID NO: 4221 - DNA, 1289 bp, Zea mays
  Clone ID: TF_ZmC21544_1
cattgggtacctcgaagccggccgggaaagccttttgccctgtcgtcacgcgcgaggtttcatcaacctcagcgggaactccccacgtacctcaccctcctctcccggagagcctctcgcctccgctccgctcctctgccctgccctgcccttccccgccacaccaaccaaggcgccaaaaataaacgccgcgccactgcgtggcgagggagcctgtcacattgcttgccgctgcgccctgccgcctcgtcttcgcggaggcctcgtcgcgcgacgatatggagctcgccgaggcgccggcgcccgtgcccgacgaggacgggctggacgaacgcggcgtggcgctgcacctcccgaggctgctggccggcgtcgtctccggcgccctcactggcatcttcgctctcgctggagctctgaccggggcagtcaccggcgcggtggcgggcagggcttccgacagcggcggcgtcctgcggggagctggactgggggcggtcgccggagctgtcctctccattgaggtccttgaggcttctcgcgcttactggtgctcgtcggaccggctgggctcgcacggcggagcatcgtccatggctgatttcattgagcagcttcttcgtgcccggtttgtgcaagagcaacttactgcttcaggatatgcatcatatcgctggcaggatgacctatacgacatctttggggacatttcatctgaagggctctcgcaagagtcactgaagaaactaccacatcatgtggtcagtgaccaccagacgcgggacttactcggcgaaatcctgtgttgtcctatctgtctacaggacattgtggccggtgagacagcgaggaggctgcccggctgctctcacgccttccaccagccttgcgtggacagatggctcgtcggccatggctcgtgccccgtctgcaggcaacgcgtgtaaaagatatataggcgacctgtgtctgtgtacgtagatagacgtggagtgaagagaaacgaccgtgcgcatctggcaatctcacttcgtttcttgcaccccggttcccaacatgtaatggcaatggaataagattgctgtcggagcagttcctgtttctgtaacaatcgtgcgtatacggcaatgtgaatttgacttggtttcttccaccccgtcaccaacgtgtaatgaaataagaacgctgccgttgcgattctgtaataacaaaaaaaaaaaatggtcggcacttagcctagctcccggcgctgcttccattccaccaaaaaaaaaaaaaaaaaagggtta

SEQ ID NO: 4222 - DNA, 1112 bp, Zea mays
  Clone ID: TF_ZmC21544_2
cattgcgtcaggggcgaggtttcatcaacctcagtacctcaccctcctctcccggagagcctctcgcctccgctccgctcttctgccctgcccttccccgccacaccaaccaaggcgccaaaaataaacgccgttgccgctgcgccctgccgcctcgtcttcgcggaggcctcgtcgcgcgacgatatggagctcgccgaggcgccggcgcccgtgcccgacgaggacgggctggacgaacgcggcgtggcgctgcacctcccgaggctgctggccggcgtcgtctccggcgccctcactggcctcttcgctctcgctggagctctgaccggggcagtcaccggcgcggtggcgggcagggcttccgacagcggcggcgtcctgcggggagctggactgggggcggtcgccggagctgtcctctccattgaggtccttgaggcttctcgcgcttactggtgctcgtcggaccggctgggctcgcacggcggagcatcgtccatggctgatttcattgagcagcttcttcgtgcccggtttgtgcaagagcaatttactgcttcaggatatgcatcatatcgctggcagctcagcatatcatattttggtcaggatgacctatacgacatctttggggacatttcatctgaagggctctcgcaagagtcactgaagaaactaccacatcatgtggtcagtgaccaccagacgcgggacttactcggcgaaatcctgtgttgtcctatctgtctacaggacattgtggccggtgagacagcgaggaggctgcccggctgctctcacgccttccaccagccttgcgtggacagatggctcgtcggccatggctcgtgccccgtctgcaggcaacgcgtgtaaaagatatataggcgacctgcgtacgtacgtagacgaagaaatagctgggtggagtgaagagaaatgtttgctcgggcacttcgtattagaggtacatacgaatctgcctgttttcactaccggcggaaacggccgtgcgcatctggcaatctcacttcgtttcttgcaccccggttccaacgtgtaatggcaatggaataagattgctgtcggagcagttcctgtttctgtag

SEQ ID NO: 4223 - DNA, 1235 bp, Zea mays
  Clone ID: TF_ZmC21544_7
agagcctctcgcctccgctccgctcctctgccctgccctgcccttccccgccacaccaaccaaggcgccaaaaataaacgccgcgccactgcgtggcgagggagcctgtcacattgcttgccgctgcgccctgccgcctcgtcttcgcggaggcctcgtcgcgcgacgatatggagctcgccgaggcgccggcgcccgtgcccgacgaggacgggctggacgaacgcggcgtggcgctgcacctcccgaggctgctggccggcgtcgtctccggcgccctcactggcatcttcgctctcggtacttgcacagttgcacttacttgcgcaagctcctttcgcctcccttttgccctgttgttagctgtcctgaggtcgagctcgatcgcagatggctctgtgtggtgcgtgcgtgcatgtgccgcgtacgtccgcgtgtaaagctggagctctgaccggggcagtcaccggcgcggtggcgggcagggcttccgacagcggcggcgtcctgcggggagctggactgggggcggtcgccggagctatcctctccattgaggtccttgaggcttctcgcgcttactggtgctcgtcggaccggctgggctcgcacggcggagcatcgtccatggctgatttcattgagcagcttcttcgtgcccggtttgtgcaagagcaatttactgcttcaggatatgcatcatatcgctggcagctcagcatatcatattttggtcaggatgacctatacgacatctttggggacatttcatctgaagggctctcgcaagagtcactgaagaaactaccacatcatgtggtcagtgaccagacgcgggacttactcggcgaaatcctgtgttgtcctatctgtctacaggacattgtggccggtgagacagcgaggaggctgcccggctgctctcacgccttccaccagccttgcgtggacagatggctcgtcggccatggctcgtgccccgtctgcaggcaacgcgtgtaaaagatatataggcgacctgcgtacgtacgtagacgaagaaatagctgggtggagtgaagagaaatgtttgctcgggcacttcgtattagaggtacatacgaatctgcctgttttcactaccggcggaaacggccgtgcgcatctggcaatctcacttcgtttcttgcaccccggttccaacgtgtaatggcaatggaataagattgctgtcggagcagttcctgtttctgtag

SEQ ID NO: 4224 - DNA, 1509 bp, Zea mays
  Clone ID: TF_ZmC8011_2
cattgggtacctcgaggccggccgggagcctgctccttatcgccggctgccgtgccgccgcgtcctgctccccgctcccgtgttcgtcgtccgaagcaccgccgagcgccgcggcctcgcgccagcgccaccgcccagaaaccatctttccctcccgcgccgctgagcccatagcccatatcggggcctcgttcgacttcgaccgaagcgcgctgtgtcaaatttctgcgaccttgccgccgccttcatcattctggagctcggattgatttcttcctttgctgtgctgtcattaccgaactaaaaacagtttctgagagcaagcgtcacaattgccatggaagctgggagaatggatcagccttgcatggcttctatcaatagccagcctttcgtggctgatactgagccagtgaagaaagccagtggggacatgcctgcggcgccgacaggaagcgggtgcttcgactgcaacatctgccttgattttgcagcagaaccagtggttaccctctgtggtcatctctactgctggccttgcatctacgagtggctgcgccctggggtggagtcaaccgccagcgacaacggcagttcggcaaggcggcaatgccctgtatgcaaggcaacactctcaccggacacccttgtgccgctatacggccgcggagggaactcaaagaagtcactggatggcatggccatcccgcgccgccccatggtacaccgggaggctgttgagcaacagaatgcacggagcaacgtcaatgaccagcactaccaccagagcacgggagacagccctcagcaccagccattgatgcaggcgcaccaccatcccgttccccctgggttcgacttcatctaccctccagcgccggtagggcgtggtttgatccactcgactgccggaggggtgctcggagggatggcagaggttgtgctcccgtgggtgctccgtggccagctgccagccagcttgcactacacgagcccataccatgttgcggcacagaacgtgaaccccaggctgaggcgtcatcagatggaaatagagaggtccctgcaccagatctggttcttcctctttgtgtttgtgctgctgtgcctgctcttgttctgagacggaggactgttctatatgcctctttgtagatattgaagagggggagagagggatactaatggatgatgcgtatagtagacagggtaatggtctgtatcgacaagcatgtgtctaaagcatgctgatatagagttgtaatatgatgagacatgggaggtgaaatgtatatttcattcttctcgtcataacgtcagcggtttcctgatctatcgctgttggcctgttaggtaggttgcctacctgacatgtcttcatgtcagggccttcgatttgctcatttgcatatgtaaatcgaaaatgatgttttggctaccaaaaaaaaaaaaaaaaaagcggccgcgtcctcttcaatccctgttccgaaattgatacggcaattttgt

SEQ ID NO: 4225 - DNA, 2478 bp, Zea mays
  Clone ID: TF_ZmC886_2
ttgggtccctcgaggccggtttgcttccaaattaactgcgaaggcaaagccgtgccgaaggcctcgccgcgccgctcccacacactacaccctcgccgccgctgagactcggcaaactgcctcccgttccatgggctgcgtaggatccaccccggccaccaaagatgccgggggaagtagcgatgtcaatcatggcactaagagagtgaggaaacccaaagcttggaagcatccccaaccgataaccatggcccagctcaggcagatgcgtgaggagttttgggacaccgctcctcactacggtggtcagaaagaaatctgggatgcccttcgagttgcatcagagtctgaggtatcccatgcacaggctgttgtggaaagtgcaggcataattgtttctaatgccgatctgactctctgctacgatgaaaggggtgctaagtatgaattgcccaagtatgttttgagtgaaccaaccaacctgatccgagacagctgaacggcagccggccgtaggaagacccaccgatgtaaaaactgtaaatgactgcagatgccgccaaattggtcccttgcttgtggtaactggagtgcctcgagtaaccttcagatttgctttggcaactttcggcaatagggttttccagttctagtgttcagataaaaaaaaacttttgcgtaccctcgtctattgttcttggttctactgtaaacatgagtctgcttagaattctttggagcgagaatgctgctgagattgttctcgtccactatcatgatacaagctggagcatacgttttagaaacttgtcacatctcgtgcaactaattatattattatgtggtctggtctgacatttgaaatgaaatgcatgataaggagcaaatcgcaatctaatttttacattatcgcaacatatccgatgatactggagttttacattattatcatgagaatgatgctgattcatctagtggtagtgttgcgtggagtctgagaacctgaaccggctgaatgcctcctccatcgccatcaccatcgccagcaggtccagatccatccctcctccgtcttcgtcggcgacgctcctctcgcagagcgcgaaccggcacaccgggcagctgccgtgcccctgcacccagggagcgatgcacccctggtgaaacgtgtggttgcagggcgtgaccgcaacctgctctccaggcaggaacgtctccaggcatatggtgcagaccttctcctcttcactggtttccttccctgtccggaggttacctctgccgccgccgccatgcttctgctgctgcctgtattcgtccttcctcagctgatccatggcctctctgaactcctcgttggtcagtccagcgtctcctcgcctgtgtctcgggtttaggggcgcgccactgccgctgctgccatggacacggtggatatggaatggtggctgcaacgggtgccaggaactggagcgctcgaaaggtggtcttctgaacctgtgctccgaaagcctccaagggtaatccccatgatgcagaggccacggggacctcctcctggtcctggatggcaactgagggtaccaggcgtgctgaaactcacgagggacggggccgtactccggcccgtagctcccgtctgcccgccggccgtcactcatctcatctcccattgtggtgaccaccggggagggtgatgaccgatgagttctttgagggtgtcgctatgtgtagtataaccaaccatcgatccatccattccctatctctgagtctggaaggcgcatctcgagtgatccatggcggaatctgttcacaaactctccgagatggtactccccaacgacctcaagcttgcgcctttagtcatctgtggcagcatctcgattcttgcgcacgctgaataagattatagccattgtcgttctgcggcatagcgttgatccatcaagcctctcgttctgcagtcatccagttcacggggggcggcctcgcggagttgtcggcggagctgaagatatgctcccggatgtcctagaagccgtggccggggtcggagtctacgtagccgacctcgtcggtgacgaagatctccggcgaggcggggtcggaggcgttgaggcggttcgactcgcggcccgtgaggccgtcgatgtcggggcgggtgcggcggagccagccgaggatgtggtcgaagctgcggttctccatcaccaccaccaccaccgtcttgaccggggaatggatctcgtgcttccgccgccggcgcttcagcccgcggtggtgcgcgtccaggcagtgcccggagacgaccagcgccagcaggaggagcgccgcgaggaggcgcgccccgggtccgcggcgggccacggcagccatcgcgacggaccgggaactaggtcttcgccttcgacggcgggcggtgcgcttgcaggtagggtaggtgcgcttgcggttcagtcgaattgggaactctct

SEQ ID NO: 4226 - DNA, 765 bp, Zea mays
  Clone ID: TF_LIB4746-060-Q1-K1-B7
cattgggtacctcgaggccggccggggccgttcctattccattcccgtcttctctccaccgatccccgcagaatattccattccagccaaggacgacgatcgcctcatccatccaaatggccacgcctgctccagccggcgccgccatgcccgagctcgccccggggcagggaagagaagccaagcacgggcgcgccggcggcgggccacgccagagcgccggcgcgcgcctcctatcgctctccgtgcaggcggccgtgatggcggccacgctcgcggtcctcctcgtctttgccgccgcgtccgccttactcctcctcgtcctcgtcctcgccgcgcgcgccttccgccaccaccgcgtcacgtcgctcgaccttgccccttcgtcgccgccgccgcctctccgcgcggggctctcgcccgtcgacatccgccgcctgccgagcttcgccttcccctccacgcgtggcggcgccggcgacgataccgccgccgcctccccctcatgcgtcgtgtgcctcgatgccgcgcgcggcggggagcggtggcgcgcgatgccggcctgcacgcacgcgttccacgccgcctgcgtcgaccggtgggtcgccaggacgcctgtctgccccgtctgccgcgctgccgtcgccgtcccgatatgagctaaggccgacgccgcgaacttgcccaccggggcccttcgtcctggtcgggaagtcatgggaggccgatatgaaccggggctggtggaaagaaaaatgcggggga

SEQ ID NO: 4227 - DNA, 1398 bp, Zea mays
  Clone ID: TF_ZmC38662_1
cctcgaggccggccgggtttgagccacttgacagcaacgagttctttgagccacttagtattgcctttgatacactgcagtctactatggtgcatgggtttcagttatttgacatctggcagcgtcatctaatggaaagtggtgcagacttccttgatttacagaaatcttataagcaagcagcaggatctttttctgaatggaggggcaagcttactagggactttggttttgccattgatttgataagcttgttgatgtcacttggtcattactcgatgatattttggcttcgtggtatggcgtttcatctggttgatgcagttctcttattgaactcgcgtgctcttatagtttcctttttgaagaggattaaagctcacatcaagttacggaaggcacttagttcactcgatggagcacttccagatgctacgtatgatgaaatttgtgcatatgatgatgagtgtgccatctgcaggggaccaatgggtcgagctaaaaagttgtcatgcaaccatctatttcatctagcttgtttgcggtcatggttggatcaaggactaatggaaggttactcctgtccaacttgtcggagaccgctcttattgtcatctgaagggcaaagaaggtctacaactgcggaggtagcaaatgttcagcgaattgcggaacaacttactatggggatgaatcagcagagagttcctggtaatgaacatcctgttgaacagcagaacccttcagatgctgtttggagaggtgctggtctggatgctagctggattccaccgtggtcaagccctgtgatggaccatccgagttcctccagtgcagtgaggtcagtaggtcttactggagttcagatgatgatgacgcagttggcttctgtcaccgacaattatgggcatgctgatggtacctggaacctatggcctgaaccgatggcagggtcctctcttgttccttccacttcctcgatttccggcactgcatctgcttctggattgcggctccgtggtagtgcaggcataagcaacgggagtctttcggaggtactcactatggtagatagagtgcgggaagttctacctcatatccctgatgagctaatcttagaggatttgatgaggacaaacaacataaacgcgactgtgaataatcttctgctgatgcaatagtagatacgtcaatacaacatataagtgtgacgtttactggctataaaagcttataagaaaagtatgtgtatagctaagggcgagcctgggtgtaacacgtctttggttctgtaataaaagcccttttttctttatttttgtctgcagaggtctgtatagcaaccaatattatcggaataaaatttgttttgctaataaaaaaaaaaaaaaagcggcc

SEQ ID NO: 4228 - DNA, 945 bp, Zea mays
  Clone ID: TF_ZmC12601_1
cgcggacgcgtgggcggacgcgtgggcggttccacctctcccctccctctcgtgctcgatccatcgccgctgcctaatccccatggcctcagcgaacaacgacaaccgcgaggcggcgggcatcctgcggctgctgatggggatggcggcggcggcgcccgcctcggcattgcctcgggggggcggcggcggcggcggcggcggcctgatggtggtgcagcacgtcatcctcgacgtcgacggggaattgttctcgggcggggtcggcggcggcggcgtgccgccggcgtcgaaggccgcgatcgccgcgctgaaggaggtgaaggccggggagggcgagggcgagggcgaggacgcgctgggcgagtgcgccatctgcctggacgcggtggagggcaccggcaaggagatgccgtgcgggcaccgcttccacgggcgctgcctggagcggtggctcggcgtgcacggcaactgccccgtctgccgccgcgagctgccagcgccggccaaggaggaggaggaggacagcgcggcgtcggcggagggcggcgaggaggaaaggcggaggcccagggccgcggtcgtcgtcagctacctcgtgttcggaggcgggcgggcggaggcgcagcaggagccggagagggaggagccgtggaacattagaatagaggatgtggattagcattggtcgccttcccattggttttcagattggtttgatggcggaggaggttatgtacatactagtaatgtcatgaacgctggaaatgggcgaagggggaatttgtgaatatttcgggagttcaatctgttgatcaatgcttatattgccattaagcactattcttttgaaaatgagcagcggtttgcttctcagctgttttgatgctattctagaaagtctcgaagatgggcaggagtttgttcttctgccgttttgattgt

SEQ ID NO: 4229 - DNA, 1577 bp, Zea mays
  Clone ID: TF_ZmC3294_1
gggtagctcgccgccggccgggccgggacgcgagggggagaaagaggctacacggaaccacgcgctcacggagtcacggctcatcttcggaccttccccagttccccgcgatatcgctagggtttccgcgatggcgacacttcgctccccgagcccccgcggagacgttctcctcgactcggcgccgctcctcggtggtgtcgggcggcgccgcgcgggcgcgctgcgccggccgtctctccggggcgcggcgcggctgctgcggcgtggcgggcgccgagcgatgcgggagccgtcactgctggtgcgggaggccgcggcggagcagctggaggaacggcaggcggattgggcctactcccgccccgtggtggcgctcgacttcctttggaacctcgccttcatcctcgtctccgccgtcgtgctcgtgctcagccaccacgagagcccctccatgccgcttcgtttctggatcgctgggtacaccgcccagtgcgtcgtccacatggtctgcgttgccatcgagtatcgtttgcgatacggccagctcggcgggtcgccaattcctgtcgacgaggagagcggaagtggtagtgcatcatcgtcctccagcgacgacgacagagagcacggctcccatagtcgaagtggtgactgcctcagtatagctaaacatctggagtctgctaacacaatgttctcatttgtgtggtggataattggattttattgggtatctgctggtggagaagttcttacccgtgatgcgcctcaactttactggctttgcatcgtatttttggcgtttgatgttttctttgtcgtcttctgtgtggctttggcctgcatcattggtattgctgtttgttgctgccttccttgtatcatagcaattttatatgcagtgtcggatcaggagggagcatctgaagatgacattcgtcaaattccaaaatacaaatttcggaagatggaagagcctgaaaagcagtctgttggtgtgcctggatcttctggtggaataatgatagaatgtggaaccaatcaacctattgaaaaagtacttgcagctgaagatgcggagtgctgcatttgcctctcagcttatgatgatggcgcagagctccgtgaactcccttgtggccaccattttcattgtgtttgcatcgataaatggctgcacatcaatgccacgtgccccctatgcaagtacaatgttcgaaaaaacagcagcagcagtggcagcgaagaagtataaatctctatatgagaatattgagaattcatacccaacagttctggcttctcgcagcaaattttttatcccataatcccatgagttcgcattcgtatctgtggcagtgtgatgaagaaaatgatccatgtaaattctcttgttcgtaatacggctatagcaataattctgtgtcaactttgctcgtgctgttctcggtgtgtttagatttttatagtatgtgtacttgttatagaatttctgtagagcagcttgtttgtgtagtctaatgttttataataatcatactagcagtacatgttcttgctcaggtcaggttttc

SEQ ID NO: 4230 - DNA, 1089 bp, Zea mays
  Clone ID: TF_ZmC3532_1
ccccgcgtccgaaactgcaaaccagcaacgcatcccgagccaagcggcagatcgttatcaggcggcgtcacgcgctcacgcctgtctcctcgcccccttcggccctccctcctcccggcgagctcctctaccacgggtgtaccaaccaaccaccagtccaccaagcgcgcgggcgccatcaggtagaccggcccctgcgttagacccaacccaaccctatctaccgtgacgctcgatcggcttcgggttagtttgcgccgtgaggctgagtcatggaagtgccgccactgccaacggcgtcggaaggggagcgccgaagcgtagcgacggggtcgtgcctccccaggctggtctccggcgtcctctcgggggccctcaccggcatcttcgccgttgctggaggcctgacgggggcgttcaccggcgcattggccggccgagcttccgacagcggcgtcctccggggagccggcctgggggcctttgcgggggcggtactatccatcgaggttctcgaggcttcgcgcgcctactggagcgcggaccgatcgagcccgcagagcacgtcctccatgggggatttcatagaacagctccttcatgctcgatttgtgcaagaccagtatgagccatcggcatatatggcctatcgttggcaggttggcattgccgacaatgatgatatgtttgatgtccttgaagatgttttatccgaagggctctcacaagatactctaaagaagttgccacatcatgtggttcctgcaccaattggtgaaagcttgtcttgcgctatttgcctgcaggatgttattagcggagagacagcgaggaagttgccaaagtgctctcacaccttccatcagccttgtgtggacagatggttcattgaccatggttcatgcccagtatgtagacaggatgtgtaggtagatcatgatcgattctgggttatcatgcctttgtaaagttgctaccctcgtcatatagaagaaagatacagtacgtagcatgtaaaaagtcctgcacttgttcctattatgaaaaatggtttacacatcagtaattgagttcaaaaaaaaaaaaaaa

SEQ ID NO: 4231 - DNA, 596 bp, Zea mays
  Clone ID: TF_ZmC779404_1
acggcctcgaccgatcgcctgctgctgcgagaggaggcgatggagccggcgcggcggctcctgctgtcggactacgacggcgcgatcgagtcgccgctgccgtcgccgccgccctcctcggccacgccgttccgccccggggtggccgtcgtcgtcggcatcctcaccagcgtcttctccatcacgttcctgctccttctctacgccaagcactgcaagcgcagcgctgcggagtcgtcggggccctacgggagcgccggctcgggcggtgggttcgggtcctccggcaacggcgcgggcggggaccggaggaactccggcgtcgaccgcgccgtcgtggagtccctccccgtcttccgcttcggcgcgctgcgcgggcagaaggaaggcctcgagtgcgccgtctgcctcggccggttcgagcccacggaggcgctccgcctgctgcccaagtgccgccacggcttccacgtcgagtgcgtggacacgtggctcgacgcgcactccacctgcccgctctgccgctcccgcgtcgacccggaggacgtcctcctcctcccggagccgcccaagccgtctaccacgggccctcctga

SEQ ID NO: 4232 - DNA, 972 bp, Zea mays
  Clone ID: TF_ZmC2722_1
gcagcgccggccatgatcgagacaggatgacgtccccgccgacgccgctgccggcgcttgcgcgccaggccatgcagtcgccgtcgccgccgacgaaggtgggaccaccgccgctgccaccgccgccgctgccggccgtggacgcggccgtcatcatgggcgtgctcacggccgtgctgctggcgctcttcctcttcctcatctacgccaagcactgcaagcagcgcggccccggcgagcggcccggcggcctgggcctcggcttcgcgccctcctcgtgcgaccgctgccgctcggggctcagcagctccgcggtgggcgcgcttccggcggtccggttcggcgacggtgacgtcgacgtgggccgcgccaccgagtgcgcggtgtgcctgggcgccttcgacgccgccgagctgctccgcgtcctgcccgcctgtcgccacgccttccacgccgagtgcatcgacacctggctgctggcgcactccacgtgccccgtctgccgccgccgcgtcaccgggggccacgtggacgactccgagccggaggactcggcggcgacgcggcagcacggccggcgctcggcggacgacgcggaggtgcaagtggttgtgcaccgcgcgtgggaccagcggtagtccaccgaaggcttggtgggccgggccgcgtacctcgaggccgccaggcatcggagcgacgacctcggcgtcctggtggtcaccgccgacgggtcctgctaggtagctggatgcgctcgtctgctgctccgagatcgatggagcttctgaatcctaggtagctcacgctcgttcacctatcggtcccgtgcatgtacatagttggggacacacgtcgctaggacgatgagagagagagcatggtagggtgaagactggaagatgcttgtaaactgtaatttgatcttggctagagattgggccacctgaagtttaatattaaaaaaagcctgcc

SEQ ID NO: 4233 - DNA, 821 bp, Zea mays
  unsure (1)..(821): unsure at all n locations
  Clone ID: TF_ZmC54753_1
aggccggccgggccgggaattcccctcgattccatgcggcatccatgaacgccctcgcgatgcccctgtctgccttcaaatatatagctcagtcgccgcttggtccggtacggcttcatgtgtgcgtgcgtgattgaagacggaggcccggaggtgcgctgtcggcactggccatgtcgctggctcgttacgacgccaacgtcctgctggccgcggtgaccgcgctctcggcggctgtcgctttcgtcgcggcgcttcacctctacgcgcggtgcctcctgcagcggcgcgtcgccctcgcggaaggcagccctcgcgtggtcgcgctgcagcggcagcgcccgccggacggctacgtggtggaggtcgtccgcatcgtcgaagacgcaagcgtgtgcggccagcaggctgcggggctggacgccaaggcgctgcgcgcgctgccggtgttcacgttggagtccgagcaggccaatgaagaaggcggcgtcgctgccgagctgcacgggcagtgcgtggtgtgcctcggggagatggaggatggcgagctggggaggctgctcccggggtgccgccacgtgttccacgttgagtgcatcgacacgtggctcggggtgagctcgacctgcccggtgtgccggacggcagctacgcctgccgctccgtcggccgtcggcgtggaccacggtggcggggaagagtccatagctgttgagtgctagtgtgatgtacaaaaaaaggaaggttaatcataaataaatggatgcaaggctgaaatcttttgtgctaaaaaaaaaaaaaaaaagcccctagggccctcn

SEQ ID NO: 4234 - DNA, 1915 bp, Zea mays
  unsure (1)..(1915): unsure at all n locations
  Clone ID: TF_ZmC1258_1
acgacatgatgagcattttctcaaatgacggtgtaggacgctctatagattcaagcagcagtgaaacaaggaggagtcacagaaggatcctgtgggatgcattttccaggcgtggctcaagaggttatccagaatctgatgctgatgaaatgggattttttagtacatggctagaccttggtgatgatatttttgaagagttgggggaatcaagatattttcatcgcaggcgacatggttcaatcagagtaagccagtattcaagatcccggattagggagcatcgccgtgctgtttttgatagtggtaatgaacaaaacactgctgcatgtcctttggggattcatcaaattggccgatgcacctgtaattctttctttattggtgaagaatctagcgccccatatattccttaaagaattggcggattgactgaggcgctatttgaggtgttggatgaaattcaccgtcaacctgcatcactttcactttccatggtctctgttcaggctcctgaatctgtagttgattcgttgccatgtaagagctacagaaagcttgagacaccccaatgcagtgatgatatggaacagtgccatatctgcctaaccgaatatgaggacggagaccagataagaacccttccgtgcaagcacgagttccacctgcaatgcgttgacaagtggctgaaagaaatacacagggtgtgccctctgtgccgtggagacgtctgcgaagtcgcctcgtgaagaccttggcgctgccatccttccgatgtggcgccggtggatagggcaccaccgccaggcgccagctgttccgtggttgaagctggttcggtcaggcaatggtgatcttgtcaacttggacagttgacaccgcaagagcacgtcaactttgactgtctccctgccgaagagaatggccaaaccaaccctgcgaccgatgagtcgctgttcctgtcatcaacttttaagataccgagactttgtatacagtagcttttgtagcctcccgcctcgtgtatgacagcctgtacatatttgtaaattctggaatcaaatgtcacaatcccctgttctcgtgaaaaaaaaaaaaaaaaaagagcacttggctagaccttggtgatgacatttttgaagagttgggggaatcaagatattttcatcgcaggcgacatggttcgatcagagtaagccagtattcaagatcccggattagggagcatcgccgtgctgtttttgatagtggtaatgaacaaagcactgctgcatgtcctttggggattcatcaaactggccgatgcacctgtgattctttcttggttgctgaagaatctagtgcccgagcaagtatatcaagaattgtcatgttaactgaagcgttatttgaggtgttggatgaaattcaccgtcaacctgcatcactttcactttccatggtctctgttcaggctcctgaatctgtagtcaattcgttgccgtgcaagagctacaaaaagcttgaggcaccccaacgcagtgatgatatggaacagtgccatatctgcctaaatgaatatgaggatggagaccagataagaactcttccttgcaagcacgagttccacctgcaatgtgttgacaaatggctgaaagaaatacacagggtgtgccctctgtgccgcggagacgtctgcgaagtcgcctcgtgaagaccttggcgctgccatcccttcctcacggcaccggcagatagcgcatccttcctgccatcaactttttaagataccgagactgtatatagctcttgtagcctctccgtgtatgacaacctgtaatatatgtaatttctagattccaatgtcccattattctgtcctacattcagatcttattctcgcagccctgatgctcaaactagctttaccagantc

SEQ ID NO: 4235 - DNA, 2044 bp, Zea mays
  unsure (1)..(2044): unsure at all n locations
  Clone ID: TF_ZmC17651_1
gcgctagccggccgcgctcgcaccgtcgcgtgtcccattctcctcgtcgttcgaaactggcccctgcctcaccgtgtcgtgggcaccggcggctccacacgggatgtggccacgcctgacacctncacctccatggctgagtgacggatgagcggctgggaggtctcccgcggagcggctccactagccgcctcaacgtgcaggcgcaggagttcgtgccgcgcgctgccgcggtgcccctcccccttcgcaacagaagcggttgccattggtagggttggcaagttcggtccccaccgctgctgcagcgcaggtgcgaaacgaagctcccctggacggagctctatcgcgtagtacggagtccacagggcgaggaaagatgctagcaggcgcccccaccggcgatgcgggccccagctccggcgctgggagcaacccacccactcggccacggaggttccccggggcggcgcagccggagatcatgcgggcggcggagaaggacgatagctacgcagcccacgtcacggaggcatgccgcgacgcatttcggcacctcttcggtaccagggttgctgttgcttaccagaatgagataaaattgcttggtcagtccctttactacttgctaacaactggttcaggccagcaaacacttggtgaagaatattgtgatatatctcaggttgcaaccttgcatggacttccacctactcctgctaggcggattctattcattttgtaccaaactactgtgccctaccttgctgaacggatcagctccagaattgttgcccgtagtattgtactcaacgaatctcagtttgatgaccatcctgaaagtgataattctagtagtgacattgcacaatccaccacaaatagtgacattccttcaagaagcttaagtgtttctgctctgtcagggttcagaggccgagttcatgccttgtggcaatgggttcttcagaaatggccttcaatgctgccatatgctcaagattttatacagttggctatccggacaaatctaatgttcttctattttgaaggtctgtattatcatttgccaaagcgagcagctggtattcgctatgtattcattggcaagccaatgaatcagagacctaggtatcagatcttgggtatttttctgttgattcagttgtgtattcttggagctgaaagactccgaagaagtaatatatcgtcaatagctagttccattaatcaaatatcatctggaggctatccatcgactacaggtcggggcatccctgttctaaatgaagatggaaatatcatcagtgacatccgcagtggtaaagctgcagatatagcttctcattcagagacctccaatggcaagagcaaatgcaccctttgtctcagcatccggcaaaatcctactgccacaacctgtggacatgttttctgctggaattgcataatggagtggtgcaatgagaagcctgagtgccccctatgcagaactccgattacccattcgagtttgatttgtatatatcattcagatttctagcaaatcatttcgcacagtaggagtccatatcatacttcactggcgtcaaaatttccagaccatatttcggcaagaaaactgcatgccaaaatggtttcgtatacttaagtgggagaagagtacgagaccatttcaagaggttaaagatcagagagttgcatacgataatttgttgtaggttgaaagtttagattgaattagggaccacaggtagtagaaattatttattggcagttcggatagtagataacttgtattggacaccgatgtgaattttattggttagaacaatgtccgactcgaatcatcgagctatttagcaatatgttgtgtccattttcgtcgcacttataccagcttgtatgttttgactaagttaggtgcaggtatgttactataattttcatttatgtttgagtatagaatataaaatagctgggtggaaaaaaaaaaaaaaaaaaaaaaaaaaaaaaaaaaaaaaaaaaaaaaaaaaaaaaaaaa

SEQ ID NO: 4236 - DNA, 524 bp, Zea mays
  unsure (1)..(524): unsure at all n locations
  Clone ID: TF_21217091
cacgagcagctagcatagcagtcttgtaaaacccatgtctgaaactgcaactgcaggagtgctgcatctgccttgcgcagtacggggagaaggaggaggttcggcagctgccgtgcgcgcacgtgttccacctcaagtgcgtggacaggtggctcaggatcatctcctcttgccctctctgcaatcaagagctcaagtgactgatgcctactccgctcctgcagagagatgtgggtgtattctgactgcgcctgccgatcagccacacctactacatatataccacgacgacccgccggacgatgcgtgcgtcgcacctctcgcgaggatctcggcgggcccgtgctgacctctagtagacgctgacaaaacgatgtgcagcaggtgaattcggtactcnnnnnnnnnagtctagactagatcaaatgggaaatgtgtaaacnnnnnnnnctnnnnnnnnnnnnnnnnnnnnnnnnncnnncaatgtgatgtgcgcccttgcttcattcaagactgaatgcatc

SEQ ID NO: 4237 - DNA, 532 bp, Zea mays
  unsure (1)..(532): unsure at all n locations
  Clone ID: TF_LIB3594-030-Q6-N6-A1
caaaatcaacacataatgaattaaatctgcttcttaattaattacaaagggtggactggatcatgtagcacagcagaggatgattttgcaaatgcaagaactactacaaacttgtatgtatctatgcgactatgcacaagcaggaaggattcaggcagcaacgatctggctcttgaagtctagatgctcgctggctaccgttccgcatttccctccctgtctgcgccgccgccgacctcggcgcggcagacggggcacacacggcttttgcgtagccactggtcgacgcactgcgcgtggaagccgtggtcgcaccgcggcagcacccggcagcggtcccccgcctggaacgcctncaggcacaccgngcactcggcgcccgcgccggccttgcactcgtgggcatggcacggcagctcgttaaggtcctcggcagacagcccctccgcgcgctcctcgtcctgccgcgactccgctgcgcggaggacgactccccgccggagcgcccagacgactatgaggatgtggagca

SEQ ID NO: 4238 - DNA, 724 bp, Zea mays
  Clone ID: TF_ZmC188299_1
gaaatattccgtacttccatatatagtatagtcacagtcccacagcttttataatttacaaactatacaagcgcacagctagctacctccaaacgaaatatcaaatatatcagtgaccaacccttcaaaccggcggtggcaccggctggccggcggcgttgggttcttccacggcagcgcggcagatggggcacgtcgagtgcgagcggagccacatgtcaatgcactccacatggaacagatgctggcacaccggcagccgccgcaccacctcgccgacctgcaccagccccaggcatatgacgcactgcgcccaccccgccgcgtccccgccgcgacccgtagtaccaccctcccgcttgtacgcaaacgccgggatcgcggacaggacaagtgccgctgaagcttccgtccgccgcccatggctccgctcagcgtgcagcagcagggcctctctacggtgcagggcgacgcgctggcgagcctttaggtagcagcaggagagcgcgactgcgcaggcggtaacgacggaggcgcatatcacgccggcgacgaggtagagtagggtgaaggagaagaagatgccgaaggtgaggagcaccgtgaggttgtggtccctgtcgtcgtcggacggagcagctgatgcgccgtcgcctggactgacagctggctgctggtggtacgagagcccagagatgagaacatgctaatagctagctgcagt

SEQ ID NO: 4239 - DNA, 748 bp, Zea mays
  Clone ID: TF_LIB4740-006-R1-K1-F6
ggtacccccggagctcggccgggatcgcaacccctccgcctcgttccttgctcggctcgccccaacttcgctgccggccgccgccgcattcccctcggctactcgctcctcgtcgctccccggtgatgtctggcggtaacgcgtggtcgccactgccttcgcacggatttgggtacgtttcctcaaccgattgtttgtgcaatagtttgatccattgtctgttcggatccctttcgtgtatatgctctccgtgatccacgcatcgcgtattgaacgaatcgcatctagaaatatcctagattagatgactttggcggatttattcagcgttgtttggcacaaactgtacaatcgattgaaatgccggatcggagtcggcgcatgttccccgaaataatatgattcctgattgtggcagcgacgcctcctgcttgtcctatttattttgctcgtgtcgtcgcatcgtggcttgattggtccccgcatcccgcagatccgagtctagcggcatggcgaatcgcgccggcgagcctgtggcgaggaccaacagcgatggcggcggcggcggcagcaaggactcaggcagattcgagtgcaacatctgcctggacctggcgcaagaccccgtcgtcaccctatgcggccacctcttctgctggccctgcctctacgagtggctccacgttcacgcgcactctcaggagtgccccgactgcaaggccgtcgtcgaggaggggaaactcgtccc

SEQ ID NO: 4240 - DNA, 743 bp, Zea mays
  Clone ID: TF_ZmC19309_1
ccacgccgtccgggggaagcagcagcagagagcaggccaggaacaagaacagcaatgaactcgccgccgggcgacgacggcggcggcagcgcgcacggtttattcgggtcgggcggcatccgcgggttcggctacggcgtcggcgtgtccatcggcatcctactcgtggcctccaccatcgcgctcgccatctacttctgcacgcgcacctccatgcccgagtccgccgccgcgctcgcgccgccgcggcagggcggcgacgccgggcggggcatcgacgaggccacgctcgaggcgttcccggcggtggcctacgcggaggcgaggaaggcggcggcgaaccaggcgtgctgctgccccgtctgcctcgactgctacggcgacggcgacgtggtccgggtgctccccgactgcggccacctgttccaccgcgcctgcgtcgacccctggctccggcagcgccccacgtgcccggtctgccgcacgtcgccgctgcccagccccatgcccacgccgctcgccgaggtcacgccgctggcgtccgcgcggccgtcgtgagggctgtttcttttttctctctcgcgcgttcgtgtgtctggcctctgctgctgcactctgattgcttcgtgccttcgtcccttgtgccgtttcatttctacgtacacagcacggtgtgtgatcagcgcgcgaatcagcaagatgttattttgtctctcaagattatgaaattcgatcactttggc

SEQ ID NO: 4241 - DNA, 1444 bp, Zea mays
  Clone ID: TF_ZmC2062_1
cccacgcgtccgctatgagccaaataaagagagaagccgataaactgtgtttcacgtcccggcgatgagcccccgtgtggtcctcctcttcctcgccgccctccgcccctgcgccgccctcgtccgccttcactccaccactttttccttcactttccttgacgccccagcgcgctttggcccccgagtgagcggcgatgggatctgcggctccctgcgtgccgctgacccggccgaggcgtgtgagaccatcaaagaccgcggcggccgccgcggcgcgggcaggaaggctttcgtgctgatcgcgaggggcaactgcagctttgaggagaaggtgcgggcggcgcagcaagcggggttcgacgcctccatcgtgtacgacgatgaggagaaggccagcctttactccatggttggtgaatctgatggcatacacatacctgcgatatttgtttccaagatggctggtgaaacactaaagaagtttgccaggggtgaagatgaagagtgctgtattaactcgtcgatggatgagactgcagggacagtgttggtaatgtcatttgtgtcacttgttgtcatcatgtcagttcttgcttcttttctatttgctcgaaactgccgacttctacgccatggagttgataatcacccaccttacgtcaagaaacaagtggtggaaaagtttccctgctcagcgtacagtgctccctgttctagtgaagataatttccaggaagcttgtgcaatttgcttagaagactacaataatggtgatatgcttagacatctcccatgcaagcatgaatttcacaagatctgtattgattcttggctcacaaaatggggcatcttctgccctatatgcaagctagaagtaacattgggcgggtaggcacacttcattactgcatccaagtgctggcagttctattgaagattgttgatcttttgatccattgcgaggttcaatattcattttaatgattgatctttgagaatgaagtacagatctcagttcctcaggttgggccttgtagtgtgctactagactactgcgttcaggttaatatttcgatcatctgtttgatatccttgtttggtgtgtggaagagctcaaggagctctgctgctgataaatgtcagcacttctgttgcagtgtattgccctgtattcctagagaaattaggtgttgtgtgcaagcaaagtgtaatcgtaagtccaatgtaaaccccttttataccaggttacgttaccttgctcattttattttgtgggcacagataaatgctcgttaattaggcaggggttgatcttactctaaaaaattgtcctaaggctcagaaataacgatgtttgaagatgcatttgttgcaaaaaacgatgttgggatcagattttgatgaatttattttcctaaataaaaaattatacatataaaat

SEQ ID NO: 4242 - DNA, 797 bp, Zea mays
  unsure (1)..(797): unsure at all n locations
  Clone ID: TF_21209483
atgagttattggctcgccaactccaggagcagctctacaatgaatctgctcgttttgccccaacagaagagattgatgcaatcgtagcaatgtcacttcaacatgaagaagatactcatcggacatctaggaccttaaggaggttccaaaaccatactagaggtgctcgggctactcgtttgagttcttatcgaaatgctcttagggctgaattagcaacagcaaacaatatgatttcccgtcagcggaatactgctccaataaatttgggattgagagctgctttagcaagatatcctggtgctttgcacattcaaccaaacattgacttaaatgactatgatgcactgcttgctctggatgaaaataaccaccagcacactggtgcttcagaaagccagatcaataatttgccacagtcagtagttcagtccaatagcattgaagatccatgttctgtctgccttgaaaatccttctgtgggagatactatccgccatttgccttgctttcacaagttccataaagagtgtattgacgagtggcttaggagaaagaaactgtgcccagtctgcaagtttggggattaactgaagtttgccgtaccagtctacagtggagttctacttggtagtggcagcgacgangtgctgcaatttctcatacggggatgccttttcctggcaaaagatttttttttttggtcntaaggttaaaaaaaccaatgtnattgccggtggaaccgcgccttttgggggcancaatttgggtangccccgcncggtttttggcccccc

SEQ ID NO: 4243 - DNA, 1611 bp, Zea mays
  Clone ID: TF_ZmC107_1
cccacgcgtccggtacagtatagttagcttgattgacaaggattacgttgaaacccaactgattgctttagaaggcaattttttttgtccattcgactttgctcagcaaggtaccttatatattattatgaaatgaatactttgtttttctggtcaatatactgttggagaaccaacatgtcttacttctgttatatctgctattgcagggttgatcttagtactgctggaacttatctaaacaaaaacttttctgatataagcacagagcaaggttggagaacaacacacaaccacacaagtaaattacccatttcgtttatgggtaatataactagcagttccggatgggaatctggatcttctaccacacgatctaatcaaaaccatggatctgctggaggcaatcatagctctgttagtggagcaaacataatagttcctgataagatagggaataaaacaataatgcttggtagagaaaggagaaaacaaacctcaacttcttcccatattggtgaaagctctagtgctgctgacgaacctagaggtgatcttcaatcgtcaaaaatatcagctggcccaaaccatagcagtcatcagcataatattcctgtaataaacattgatgacatatcccctgaagctagacctagttcgagtggattcactaatagaactgttgatcctaccatagaagcacaattggagtcggatgagttattggctcgccaactccaggagcagctctacaatgaatctgctcgttttgccccaacagaagagattgatgcaatcgtagcaatgtcacttcaacatgaagaagatactcatcggacatctaggaccttaaggaggttccaaaaccatactagaggtgctcgggctactcgtttgagttcttatcgaaatgctcttagggctgaattagcaacagcaaacaatatgatttcccgtcagcggaatactgctccaataaatttgggattgagagctgctttagcaagatatcctggtgctttgcacattcaaccaaacattgacttaaatgactatgatgcactgcttgctctggatgaaaataaccaccagcacactggtgcttcagaaagccagatcaataatttgccacagtcagtagttcagtccaatagcattgaagatccatgttctgtctgccttgaaaatccttctgtgggagatactatccgccatttgccttgctttcacaagttccataaagagtgtattgacgagtggcttaggagaaagaaactgtgcccagtctgcaagtttgggattaactgaagtttgccgtaccagtctacagtggagttctacttggtagtggcagcgacgaggtgctgcaatttctcatacgggatgctttcctgcagagatttttttttgtctaagataaaaaaaacaatgtattgctgtgatctgcgcttttgggcatcattttgtatgcacgcacgttttgcttgctatttttgttgtcgtaatccaccaattcccatgaattggttaccagcatcttgtcaatcatttatgtcgccgcatatatgatccatcaattggcatcaatttatttttattttacgttcttgt

SEQ ID NO: 4244 - DNA, 513 bp, Zea mays
  Clone ID: TF_ZmC107_2
cccacgcgtccgactagttctagatcgcgatctagaactagtctgaagatccatgttctgtctgccttgaaaatccttctgtgggagatactatccgccatttgccttgctttcacaagttccataaagagtgtattgacgagtggcttaggagaaagaaactgtgcccagtctgcaagtttgggattaactgaagtttgccgtaccagtctacagtggagttctacttggtagtggcagcgacgaggtgctgcaatttctcatacgggatgctttcctgcagagatttttttttgtctaagataaaaaaaacaatgtattgctgtgatctgcgcttttgggcatcattttgtatgcacgcacgttttcttgctatttttgttgtcgtaatccaccaattcccatgaattggttaccagcatcttgtcaatcatttatgtcgccgcataaaaaaaaaaaaaaagggcggcccccgacttatagctcgtcgaccccggaaataattccgggccg

SEQ ID NO: 4245 - DNA, 603 bp, Zea mays
  Clone ID: TF_ZmC238393_1
gaggtggtcatgaccatgtcttggaccaggaaaaagatcacccatcccatgccacaatttcgaatacgcaattcaagaattttaccgtcagaaaacgatgaatgatcacaatagctagccctatacactgtgacgccgagactactcacaaatttacaaggttaaagttagctacacctgcaccgcaatcgaaccacgcacgacgcatgtgtatcatgtcatgaccctccgcctccaccggccggcgcgcgccgcgccaccgcgtcttctctctgctgctcgtctcttatggcctcgatcatcgcgaccacgcgctgcaggacggcctcctgatcgtcgttgtcgtcgtcgaaggcggtcaacgcatcggcgcccctgtcgcggtcggcggcgtagaggctggccacggcgcagcggcacacggggcaggagttgcggacgtcgagccagcggtcgatgcagggcgcgtggtagaggtggccgcacgcggggacgaccctgacgccgtcgtcttcgccgaaggcgtcgaggcagatggggcagtcctctggcaggcccttcttcctggcggccgcggccgcgtacggcagcacgggcggcagc

SEQ ID NO: 4246 - DNA, 522 bp, Zea mays
  Clone ID: TF_cC-zmpo14820003f04a1
gaattcgagcaatgatggcaagcagcttgaaattgcaagctgctatatgaaggttccagtttcaaattacaaagatgtactaggaacaagatttgcattgttagattgaaaatacctcctacgataagccaattatgttccactcaagaatgaagataaacagtacatgctttgaagcatgtaatcaaacaaagaggcatttaaatgaccccaaaaactgtattatgcaccttgtaaaaacagctgcttccaaatggacaagtgccctttccgaagtcaaagtgcttacaatcaatagacctgagcttggccttgtaaccttcaacaatttcttgcttttcttcctttgaggagtaccaagtaatgctaggaactacatagtatgacaatttgcggcaaattggacaagccctgagtgtagagttgacatccatgccagacgtaggagaggtgctacgccaattcctaatgcatgagatacagaaagaatggtcgcagtcagatagcagcccaaacctcctt

SEQ ID NO: 4247 - DNA, 556 bp, Zea mays
  unsure (1)..(556): unsure at all n locations
  Clone ID: TF_ZmC3483_2
attctgatgatgatgattatgaggccctcatagcacttgacgattgcaaccatcacagaggtgcttctgatgaccaaataancagcctgccactatcattgatcgagggtgaaaattgttcagatgaaccctgtaatatatgcttggattgcccttctgctggcgattcactccggcatttgccttgcttgcacaagtttcacaaagagtgcattgacaggtggcttgggatgaagatatggtgtccgatttgcaaattaaatgtattctcccagtaggccctagggggcgcatacttttggggtagcatcgaaggtagattatagctcactaataggaatgatgactgtggagagtttttctggtaccagagaagggcagaaggcacggaaatcctcctgttcccgtctgttatataccttatcgtaggctgatatgcccaacagtatgtcagttttaggcggtgtcataggacatgaggctggatccagtgccatttttcgatcatactttttatctattatactgttccagtgaaaaaaaaataatgtatgtg

SEQ ID NO: 4248 - DNA, 955 bp, Zea mays
  Clone ID: TF_ZmC189769_1
ccggccgggccggcacgcggctctattgatgtgcctgttgcagcttataaagaagcgcctgttgcaagcaagaaacccacgcgtccggcagcacgcggctgcgctcgatcaggcatcagtgatgtgctaccgcctaccgcgtatgtatcgccgatgagcaaccccagcttcgaccacagctacgagctccctctgcggcgaaacctcctgcttctgcgcgacctcctcgacctcctccgcttcatcgccggggtgatcctggaccgcctcggcgtcgcgccgtgccagggcgaggtgcgtctgccaggacaggctttaggcggcgtcggcgagcatgccaacgatgttgacttggaacgcctcctggaggcgaggctgtgggagaccgtgacgcggtcgctcacggctccgcggtacaggcggcggcgggttgcgcctgcgcagccggcggacgtccagctggacgcagaaggcgacgccgagggcgcggccgtctgcgcgatttgcttggcgggtctggaacagggagatttccagacggtcgtggagctgtgcggctgctcgcacgtgctccacgcagcgtgcatcgatgcttgggtccgcagtggcgacgatgcggccacctgcccgctgtgccgcgcgcccatgttgcccacggcgtgggacgacgagcagagttcgttcggcgctcgccggggtgactgaggtctctgtctctctcccgaatagtaattgctgcgctagcacgtctcgacagacagacagatagatagataaacatacgccatcgtctatagcggaaagatgcaataatgtgtatgcatgtattcgcgcggatcgatcgtttccctctgaactaagatgctgtttggtttcggcttacaaaaaaaaaaaaaaaagaaggagacaatggaagagcaacgagacaatgacaagggactacaacatgaccaaa

SEQ ID NO: 4249 - DNA, 860 bp, Zea mays
  Clone ID: TF_ZmC763809_1
atctgcacacacaggctccccattctttcttattgctccccattcttcttattaattcccgcgtgcgcggacgtacggcagcgagcctctcccggactccgattccttccttccttccggcggaggtgtcggctctcctctcccctcccagagagaggaaacccggaggaagcagagacggccggacagatggattttggggcagagcagcacggctgcgagcattacacgaggaggtgcaggatacgggcgccctgctgcggcgaggtcttcggctgccggcattgccacaaccaagctaagaattcgctggaggtggacctcctcgaccggcacgagatcccccgccacgaaatcagcaaggttatctgctctctctgcaacaaagaacaggatgtgcaacagaactgctccggttgcggggcatgcatgggaaaatacttctgtgaaaaatgcaacttctttgacgacgatatctcaaagaagcagtatcactgcgatggatgcggcatctgcagaactggcggcatagacaacttcttccactgcgaaaaatgcgggtgttgctacagcaatgttttgaaggactctcatcattgtgtggaacgagcaatgcatcacaactgccctgtctgcttcgagtacctatttgactcgaccatggacatcagcgtactgcactgcgggcacacgatccatttggaatgcctgaacgagatgagggttcatcaccacttctcgtgcccggtctgctcacggtcggcctgcgacatgacggatgcgtggcagaagctcgaccaggaggtcgccgccacgccgatgccagagttctaccagaagaagatggtatggatcctctg

SEQ ID NO: 4250 - DNA, 658 bp, Zea mays
  Clone ID: TF_ZmC588778_2
ctcgaggccggccggggcaccttctggtcccctttcctacgcgcccaaatgattccagatgatacaacctgttatcatcatcatcttcataaaccatcgcgacccagcctcaaatcctggtccactcgcgagtcgcgatctcagagtccctcaccaatcactcactcgcctcgcctcactggcactgcgagcaaaatagcctcactaatcctgcgtcgctgcactgtgtagctagctagctagtgcaagcagcgatatgatgctggccgtgacagtgagccaggtcgtggcgctgctctcatcggctctctccggcaccgagggtggcagcggtgtggcggttgcggtcggtacggcaaaggcggtgggagccgagcagggcgagcgctggcggcggcgctgcggcgggcacgatgaccacccggcgtcggcggcggggtactgctgcgtgtgcatatcggcgtgccgcgacggggacgacgtccggagcctgccctgcggacacgccttccaccgggactgcgtcgaccgctggctggcgctttgccggcggacgtgcccgctctgccgtctccacgtcggcggacctgccgtcggtttggccgagcagcagcagcagctcagcgaggacctcgtcatctggttctcttcgctcttt

SEQ ID NO: 4251 - DNA, 883 bp, Zea mays
  Clone ID: TF_ZmC146862_1
agcaagcaaatgagatttattattactagtaagataagataaacaacgaatgcctatgaaccaattcatcatcagcggttaaaagggcgagcagacaagctcaatacaagtttggagcacgcaccaccacacacgctttttttgtgtcacgacacgattcacgaatccccgggacttggcctctgccacggcagcctgccgttcatggccggcgagtcatcggacgcgagcacgggaagcttctccttgccgttccgcggccactgccaaatcttggacaccgagaagctgtcgcctttgctgcccgcgccgatcctcttcccctctgtggcgccggcgcggttggagcccacgccgacgcctctgagccccgccccgcccctgccatggccgtcgccgtgcctcctgtggacggacacctggaggctcgcctcggcgaggacgtactggtaggagcccatggagtagcaccgcctggcgtccaggctgctgctgctcgtctcgccggcctccctggtcacaatggccggcgccggcgcgcacggggccaggcgccgccctggccaggttcttgaacttgccgaggcgcacggggagcacggcgtcctcgtgctcccacatgccttcctcgtcgaacagcgcggcagcgtcggcgccgagcgcgcaccggcacagcgggcacgtggagttggagagcagccaggtgtcgatgcagccgatgtggaacgcgtgcccgcacagcggcagcagccgcagccggtcctcgccggcgaactcgcacaggcagaccgcgcagtcgaacggctccttggcgccggcgccggcgccgaccacctcccggtacaggaacaccgggagcgcgtcgatgacgtcctggtccagc

SEQ ID NO: 4252 - DNA, 1766 bp, Zea mays
  Clone ID: TF_ZmC67427_1
aattcggcacgaggaccgcattcacatcgaacaacaacacaaggcgaggccgagtcgagtagcgcgaccacaacttcacacaccgcgtcgagtctcacacggcagggcacgcgtcaaggcgatccgttccatgccgccgccgccgctgccggaggagaagccgcttgcgcggcgaaagccagagccgaagccgcctaagcccaagcccaaggggcctaggccgattgggccgctgcctcagcgggacggggaccccggcggcggcgtcgccacgtcccctccgctcctcttctgcggcgacggctgctccggcccgtgcgcctacttgccccagtgccagccgcctcctccgccgtcccctggtgccaccgtgcgcctccgctcgagccggctcccgaccccgctcgtcgcgctctcggcgtcgctcctcaccgtgtccgcggtcctcctgctcgcgctgctcgtccactgcctggtcgcgcggcggcggcggcgggcgcaaggcgcgccgctggtccaccacgccgaggcgggaggggcccaggttctggctggcgcggtggagcagcaggccggcgagggggaggacgaggaggccgccggcggcggcgtgcaccacgtgtggtacatacgcaccaagggcctcgacgagcgcgccatctcggcgatcgccgcggtcgtgtacgacgccaagaagcgcggcgccggcgccagctccgacggcggcggcagctgcgcggtgtgcctcgcggagttccgccacggcgagacgctgcgcctgctgccgcgctgcgcccacgccttccaccgcgcctgcatcgacacctggctccgcgcccacgtcaactgcccgctctgccgcgcgcccgtgcagggtcgccgccgccgccgctaaccccaaccccgcaccgggaacgtccgggcgccgggaagagggtaaccctgctgctggcgccgtcatcggtggcgttcaaacacaggaccccgcgcgcggcggcggctttcctgaccgggccgtcaggcgggccgcgtcgtccatggcggcgctgccgcggcgggcgtggccggacgtcccgctgcgtgcgccggcgtcgagcagcttccgcgacggcgaggacgacgtgacggggctcggcaagatcaggcggctcctcaagctctcggacgcgctggagatggccggggtcggggtacaccggtccgcctcgttcggcgccgctacctgccagcgcttgccgccaaggccggggccgtcggcgcccggcgtcagcgccgacgagacgtcatagcgaaccgactgaggccgacgacgaggccatcggtggtctggtgaaacttgcagctttgggagctgggagcttggaggagtgaaggttggtgttggtttgccaagtttttgtgtgtgccgggcacgagacatgagaaggtaaaaaatgatatcttttccatgtttcttgtataatcgcttcgtcagcagtaacaagtaaataactcgtgagcctgtgcatgcactgcggagcgtcaggaattgtaagtaagaaagaatccttgaccaaaaaaaaaaaaaaaaaagcggccacagcacgaatacatgtgtaagatacgtgtaaggggcatgttcgttttggagcggaacgaagggaattggaggggctattcaaaattgaataggaaggtatttaatcctctccaatcgacatagcctaagagatcactcatgttcgttatgggtacatgaatgatctgaagttatatgttgctcagcc

SEQ ID NO: 4253 - DNA, 1400 bp, Zea mays
  Clone ID: TF_ZmC13111_2
tgatcctgaacatataaagttgagtttaaacaatatataaatttgaagatcattgcccgccatgttcagcttcatttgaagaggcactcaataggaattgacatgtgtcattcacacctcaaatatcttcaatctcgatgtaacattagaatgcaggcaaggtagaaatggccagatgcattcctgtaactatacctggtgtagtggtgagagttgtctcactgagtcaccaagttgtgggttcgaagcaatatctttgcatttacattttatagagggaagacttgcctcggtttatcccttctccagatcctactcatgtgggagcctctggcctagttaggagtcttgtttgcataaagtaaagaggaatcgcaccgagggataggcattgtgagtatgacgtgtgctttgcatgggccagcacctgactcagttcctgtgaaatcatgaatccaccaacggaggtcaaatacctgactgcagccagccagaatgtttacagccacacatgatgatcctatagctggctagaagaagaagaaatatttacagccatccagcataaccttagagctggtttgaagaggatgcaaccggtgcagctgcacaaatgcacaaggacatggagtacccaagaaggacactgctgcacacccctttctccgggcatccctctggtccaagccagccaatagatggagccacggccacagacggaagcaacttcgacgcgaacgtggtcatgatcctggctgtcctcctgtgcgcgctgatctgcgctctcgggctcaactccatcgtccggtgcgcgctgcggtgctcgagccgggtggtggtgggtcctgaaccgaaccaggtgacgcggcttgtccagagcgggctgaggaggaaggcgctccgagccatgccggtcctggtctactcgcctgggctgaggatcaatgctgccaacccgacatgcgcgatctgcctctcggacttcgaggcaggggagcatgtcagggtcctccccaaatgcaaccacggcttccatgtcaggtgcatcgaccggtggctgctggcgcggtcgacgtgcccgacgtgccggcagtccctgttcggagtgccgcagaaggcctccggctgctccgaggcgagccgggctgccgagccagagcctgcgcctgcgcctgcgcctgctcgctctgtccttgtgccgctcagacctgaaggtttggtcactcattatgatttttagaatgttcggttgcttcttagtcgttgcataaatgatgagagggaggctgagaaaaagtagaaacaaaaactgtgagcattagatcttactgccaatctggtttgtacattgttggttgctagagaaaaaaaagatgtgaaggttttctagtttttttttt

SEQ ID NO: 4254 - DNA, 2293 bp, Zea mays
  Clone ID: TF_ZmC25863_1
gggtaccctcgcaggccggccgggagctccaattcggccctagttttttctgagaccgcttgccgcaaacctcctgaccgcgcgtccgctagaccgctatcccaatcgccgccaccgctcccctcatcgccggcgccgcaccctgcatccctgccgctcggtaattctcgcgacagaggcagctagggcatcccagatcctccgcccatgacccggaccctggcgccgtgtgcgtgcgcctagataggagggtttgcttcttgcggcccccggcctcgctgaggtgcgcgccaagtcggcggggcgggggtgggactgtgggggcgcggctcgccgtcggatggacgccgatgaggccgtggggagcagtgggaggatggatctgaacctttacctcggtcccccccgcgccccgcgcccgcgccgctctgacctcggctccgatctcgccctcagcaccccgatgccttcctctccttcgtcctccgcagcgtccgtcgacgcaccgccgccgccgcctgagtccatgcacccgccgtacacccactcccgcgccgacctctcccctccgccgcttccgctggaggtgtacttcccctacaaccccgaagactcgcctgttccggatgcgcatatgtcgtacatgcagcctccggaactgcttatccccgggccgcggaacatgccgcctccggattcgcttatctcggggctccgagagggaattcgggaacttcggtacgccttccatccgccgccaccgcccccgcccccgcccccgctggtgcgggccaacgaactgctgggctgggaagagcgtccttcctcgtcaacggcctcttcatctttcttcccagacaccgctgctcggtgcgggctgctgctcgagcagactggaagccggtggcttcgcacgaggcggttcaggtctgaccttccacccctcagctccgaggctcgcccttctgggcaggacgccaccgagccagtgccccagcatgagcctgcagctgatgctaatgaattaaacaaggtggctcccaatggcttagaattaggtgccccggagaattcctctgaggaacgcagcaagactgccaccgcattcgagtgtaacatatgctttgagatggctagtgagccggtagtcacttcctgtggccatctcttctgctggtcgtgcttgtatcaatggttgaatgtttactccagccacaaggaatgcccagtctgcaaaggcgaggtaactgaggcaaatattactccaatatatggtcgagggaattctgatgcagagaagactgtggaggactggaagtcaccaggtcctacaatcccgccgaggccacatggacatcgccttgaaagcttctggcagcaattccaccatattcgacctatctcaagaaggcttggtgaggcgcatgggatactgtcatcatggaggcgtcttctggatcagcagatcctgggcagcgtgagtaggcttgaagggccatctgaatcagccacgcaagaaataaatgacattcgtcaacatgatcacctaagtggattggcattggcctcaaggatgagggcaaggcggtttcaaatagaagctttgagccgtcctgatggttcttccactagcccccctgataatggtctgacaggaaacaatccatcagaaattctgacaggaaacaatgcattgttggaacgtctggcaggaagcaattcaagacgacttgaattgttggaacgtcttgcttttggcattgcaaacacagctggtgccatgagtgatgactttagaagaatcgcttcaccaaaccaatatagaggatctgcttcatcatcgaatcttcaaaataatgagccagcagtcgatggagctcgcattgcgggtgcaccttctgcagaccaagcgtctaattcaagcactgttgctgtgatacaaggggatggtggtatctctgaaagtgcaggagagcctagcaatgcaggttcttcgggatccctgaggaggagagggaggagcaatgcatcaggttcattggatgtggatggtggaagcctccaacagaacaagagacacaggatgaactgaatcctctttgacatgtgtgtttgtcccaaaccaaacttggcctctttcgctgcattgtagcatgttgtagtttcgtctcttttatgtgttcactgaaacagtttacagttccttcaggttgcttaaatttggatcttcaaacatattaaaaaaaaaaaaaaaaaaatcattatgatatcggaaatggactgcctttgttgg

SEQ ID NO: 4255 - DNA, 674 bp, Zea mays
  unsure (1)..(674): unsure at all n locations
  Clone ID: TF_LIB3354-087-Q6-K6-D6
ccgggcggcaaaccaccgcgcccgccagccatactgagctccgccctggttccattccacccagagaggctccaagattgacgccgcgaccacgatgggcttccctgtggggtactcggactcggagacgctgctcccgcgcgtgctgctgcaggcgctcctcctcctgggccacctccaccgcttcctcctctgggccttccacgccgtggggctcggcgacctgatcgacctcggctgcaactacccgccgccgccgccctccgcgtccacggcggcggcggcggtggcggcgcaggagggccgcgacgtggctgccccgctgcagcaccggcggccggagttcaggcccgtcccggcggtgcgcatcgaggaggcgctccccgtggtgcggttcgacgagctggccgngcgcggcgcgcggggacggcgactgcgactgcgactgtgactgcgcggtgtgcctcgacggcatcggcggcggcgacgaggtgcggcggctcggcaactgccgccacgccttccaccgcgcctgcctcgaccgctggatggcgcacggccagcgcacctgcccgctctgccgcgcgccgctcgtccccggcgccgcggcggccggngatccctgggccgaagcgccgtggcttgacgcggccgactacgacgtgctgccctac

SEQ ID NO: 4256 - DNA, 710 bp, Zea mays
  Clone ID: TF_700169649_FLI
tactcaagagctaatagatgcattgccaacctacaaattcaaaccaaaacgtgtcaaaaactgggggattgaccatgcttcaagctcagagcatcttgatgagggtggcattcttggcccaggaactaagaaggaaagagttgtttcagctgaagatgctcagtccagctccatgtaccaacttgcgttttggtggaatccagtttatcacaaactgtgaatcagttcatgaattctggtgacagtgagtgtgctgcatctgtcttacgaagtatggagatgatgatgagcttcgtgagcttccttgcacacacttctttcatgttcaatgtgtagataaatggcttaagataaatgcggtgtgcccactctgcaaaacagagattgggggtgtggttcgatctttctttggcttgccatttggccgccgccgtgtcgataggatagcggcaagaggtgtagctagctcaagattcagtgtatagaacaatgctgtttttccgcataaagagctctgctctgttgcaatggtttgattgattgtcaaggaaagcgctgtgtgcatgacttgaagacaatgacacctggtgggagacctgatgcttgtaggggcaaatttctaagaaatgtaacggactgaaggtgctgctatactctgatgaacattttttttccaagtatgtaaataaggaacacgaagttcgcttgcc

SEQ ID NO: 4257 - DNA, 2277 bp, Zea mays
  Clone ID: TF_ZmC1904_1
cgacgtctgggtgaccgccgccgcggacccggctctactcctgggtgccgtgcctaggcattcgccggcgacgagcacccaattttggaggctgaagctgtggggacagatttgaagcagctgatgctactgtgtgctgcatctctcttacgaagtgtgggggttttcaggtgcctttcacccctcgttcgggccatatccttcccgtggagacggtagggagaccgctgccgcagctgtacactaggttcctaggtattcgccgggcccttccccggcgacgagcacccaccatgtacatgagaaatccttcttcaaatttatggcataggctacctctgtggggatcttctgtgaagcaagagaagttacctagcacacaactcaaagttcagtagattattgaggatcaacatttcagccatctgtatgttagttaatatgatggccgatggtaacatctggttagaaagatagaaactcattattgcgctacatatggtagtgcccattcgacataagaactaagctggacattggtagatccaagttattaatggcgcacacttcctgtgatggtgtacatcatgttataagtgtagcacatggggaaactgcatcaacatcaaccagtcatcaagatatgtgcagtgactcggatgaaccacatcaggaaggcgggctgttgtgttggatatgccactccttttataatgtgtgcagcaatatgctgctgctttccatgcttgatttctgttttgcgtcttcaagaaaaattgagtcaaaatagtgagctactcaagagctagtagatgcatttacaacctacaaattcaaaccaaaacacatcaaaaactgggggattgaccatgcttcaagctcagagcaatcttgatgagggtggcattctcctttgttcgcatggataatggatatacttgtttcagctgcatatgctgtcttcctcttatttattggcggtatgttcatcgaaacagacatttggatcaagaacctcagcagccacctacaacatatcctactttgactccttctcagtcatcagaaggacgcaaccatcgtaccagtggtattgttttgcatcttggatgtatctcaatttcttgcccaaggcttagtgtgctggcttatcacttcaagacaggtgttgactgtttctttgctgtatggtttgttgttggcaatgtgtggatttttggtgggcgcagtatttcatcagatgctcaggacgctcccaatatgtacaggttgtgtttggcattccttgcgcttagttgtgttggatatgccattccttttataatgtgtgcagcaatatgctgctgctttccatgcttgatttctgttttgcgtcttcaagaagatttgggtcaaaatagaggagctactcaagagctaatagatgcattgccaacctacaaattcaaaccaaaacgtgtcaaaaactgggggattgaccatgcttcaagctcagagcatcttgatgagggtggcattcttggcccaggaactaagaaggaaagagttgtttcagctgaagatgctgtgtgctgcatctgtcttacgaagtatggagatgatgatgagcttcgtgagcttccttgcacacacttctttcatgttcaatgtgtagataaatggcttaagataaatgcggtgtgcccactctgcaaaacagagattgggggtgtggttcgatctttctttggcttgccatttggccgccgccgtgtcgataggatagcggcaagaggtgtagctagctcaagattcagtgtatagaacaatgctgtttttccgcataaagagctctgctctgttgcaatggtttgattgattgtcaaggaaagcgctgtgtgcatgacttgaagacaatgacacctggtgggagacctgatgcttgtaggggcaaatttctaagaaatgtaacggactgaaggtgctgctatactctgatgaacattttttttccaagtatgtaaataaggaacacgaagttcgcttgccaggtataatgcaactttgcaagcaacttcacaggtgctctagcatcggccttggtgttctttccttccttctggttctgtgattctcttcataacggcaatgcactgcatgcattgtaaggctgtcttcagtagcttactcattctagtttctatcatcatatattctattttaaacttcaccttgtaaacagtgtaatttataatataaaatagttatttataatataaaatggtgttttatgcgatc

SEQ ID NO: 4258 - DNA, 2117 bp, Zea mays
  unsure (1)..(2117): unsure at all n locations
  Clone ID: TF_ZmC1904_2
ggggtacccctcgaggccgccgcgagccggcattcgggtcggtgtcgccgaaacgaaaggaacagctgctctcttcgcctctgccgggctacccttcctccttctccctcgtgaccacgcacgctgagcatccgcgcacctgctcgcccgattgccccggcgttttcttctcccgttcgccctgcgtgcgggcgctatcgttctcgtggcgacgtctgggtgaccgccgccgcggacccggctctactcctgggtgccgtgcctaggcattcgccggcgacgagcacccaactgatccaagttattcatggagcacgcttcctgtgatgatgtacatgagcatgctataagtgtatcacatggggaaactgcatcaacatcaaccaatcatcaagatatgtacagtgactcagatgaaccacatcaggaagataggccatcaacgagcacgcaaaccccgtcatcagagtcttctccatcaacatcaccaactgcttatagctccagaaatttatcttttcctagaagagatagtatatatggtcatggaagaaatccttggaattctggtttgtggatctcatttgaaattgtcatgtacattgctcaggttgtagctgctattgtaatcctcctcttttcaagacatgaacaaccccatgctcctttgttcgcatggataattggatatacagttggctgcattgctagtcttcctcttatttattggcggtatgttcatcgaaacagacatttggatcaagaacctcagcagccacctacaacatatcctactttgactccctctcagtcatcagaagggcgcaaccatcgtaccagtggtattgtcttgtgtcttggatgtgtcacaatttcttgcccaaggcttagtgtgctggcttatcacttcaagacagctgttgactgtttctttgctgtatggtttgttgttggcaatgtgtggatatttgatgggcgcagtatttcatcagatgctcaagccgctcccaatatgtacaggttgtgtttggcattccttgcacttagttgtgttggatatgccattccttttattatgtgtgcagcaatatgctgctgctttccgtgtttgatttccattttgcgccttcaagaagatttgggtcaaaatagaggagctactcaagagctaatagatgcattgccaacctgcaagttcaaaccaaaacgtaacaaaaactgggggattgaccatgcttcaagctcagagcatcttgatgagggtggcatcctcggcctaggaactaagaaggaaagagttgtttcagctgaagatgctgtatgctgcatctgtcttacaaagtatggagatgatgatgagctccgtgagcttccttgcacacacttctttcatgttcaatgcgtagataaatggctcaagataaatgcggtgtgcccactctgcaaacaagagattgggggtgtggttcgatctttcttcggcttgccgtttggccgccgccgtgtggataggatggctggaagaggtgtagctagctcaagattcagtgtatagaacaacgctgctttttctgtggtatcctcttacgcataaagagccctgctcatgttgttggaatggttttgatggattgtcaagcaaagcgctgtgtgcatgactccaagacaattacacctgatggagacctgatatgcttgtagcggcaagtttatgtagaaatgtgaagggctgaaggcgctgctatgctgtaatgtaacatttttttcccaacgatgtaaataaggaacacgaagttcacctgccaggtatattacaactttgcaaacttggcttgccatttggccccccccgtgtcgataggataacggcaaaaggtgtagctagctcaagattcagtgtatagaacaatgctgtttttccgcataaagagctctgctctgttgcaatggtttgattgattgtcaaggaaagccctgtgtgcatgacttgaagacaatggcccctggtgggagaccctaaggcttgtaggggcaaatttctaaaaaatgtaacggactgaaggtgctgctatnctggaaaaaaccggttttttcccccaaagtaacacacggccccg

SEQ ID NO: 4259 - DNA, 617 bp, Zea mays
  Clone ID: TF_ZmC1904_8
ccggccgggtcaaaccaaaacgtgtcaaaaactgggggattgaccatgcttcaagctcagagcatcttgatgagggtggcattcttggcccaggaactaagaaggaaagagttgtttcagctgaagatgctgtgtgctgcatctgtcttacgaagtatggagatgatgatgagcttcgtgagcttccttgcacacacttctttcatgttcaatgtgtagataaatggcttaagataaatgcggtgtgcccactctgcaaaacagagattgggggtgtggttcgatctttctttggcttgccatttggccgccgccgtgtcgataggatagcggcaagaggtgtagctagctcaagattcagtgtatagaacaatgctgtttttccgcataaagagctctgctctgttgcaatggtttgattgattgtcaaggaaagcgctgtgtgcatgacttgaagacaatgacacctggtgggagacctgatgcttgtaggggcaaatttctaagaaatgtaacggactgaaggtgctgctatactctgatgaacattttttttccaagtatgtaaataaggaacacgaagttcgcttgctaaaaaaaaaaaaaaaaaagcggcc

SEQ ID NO: 4260 - DNA, 1231 bp, Zea mays
  Clone ID: TF_ZmC21265_2
cattgggtacctcgaggccggccgggattaccaagcacccatcccttcaacaaacctcgagtcgagagagagaaagagagcagacaacaagagacaccaacgaacagaggcaaaccggctcacgcctgtctcggtgcggtggccggctaatcatggccaccgtggggcagtccggggccctgagaagggtcaccgtgcactacgccagctcgcccacgcgcggcgcggtggtagaggtgagcctcgacgacctcgacgacgagctgctccagtttgtgctcgccgatcttcttcccggccaggagggtttacaccagtcgatcttggaaggagcacacggcagcaaccaggagaactatatgagaggcgcaggatccagtgcgccgtcacaggaataccatgcacagagcagcaccgctgctgcggcagcagctgcttcgtccaggaggaatccaggcacggatgacgcccagatcgcctcggacttcgagtacgccacgaagctgcagcaggagatggagggcctcagcgtcgacgacgacggcgacggtatcagctgcgtgccgtctccgtccgactctgacgacgggcacgaccatcacgacgaagaggacgaggatgaggaggatggtaatggtggtggtgatgatgatgatgatccagacaacatgacttatgagcaaagacaggcacttgtagagtctgtggggtctgaggacagaggcttatccgacgagctcatctcctacctgcagccatggaagtacaaggcatcagggtttttctcccggaaaacaaaccatgacgactgccctatctgcctgtcaactttcaggaaccgagagactatgataacgttgccgtgcatgcatcactaccacgcagcttgcgtcaccaaatggctcagggtcaacaagacatgccctgtatgcaaatatgaactgttcggaccttgctagcatccgacaatgggctgataagacaaggtgatggggcgtcacactcacacccagctggttgcatcatctacttttttttgcaccaagaaaaaagaaaatgaaaaacaatccaaaaagagaagggaaaaaagttaggaagtgtagatcttgatcacacaagaaaaagaagaaaaaaaactgaaatttatgtcttttttatctttcctttggcttgtggaaatgtacgtaagtcacggtcttatatttgtttagaagcttgtttttttttcttc

SEQ ID NO: 4261 - DNA, 1230 bp, Zea mays
  Clone ID: TF_ZmC4695_1
ggtaccctcgattcggctcgagcggcaacggacgggtcgcaccaccagtccaccgccaccccatccaatcccatccccacaaccgggtgccgccgccttctatggcggacttcggcgacgagctctttctcgacgtcggggacgatggtttcggagacctctcctacgtctccttctccgagtccatcgagttggatctcgcctgcccacgcgacgtcttttccgcggggtttgatcccgaaaccctaacccacatcccggggtccccaatctccttcgactccgaccccgacctccgccacctctctccctcgctgacctgctccccgcccttctggggctgcctcgatgacgccgctagcttcgagtgggaggagatcgcggacgctgccctcggcgtcggcggtggcgctggcggcgccggagggggaggacaaggactagaaggagacgccgatgccgacgccgacgtgttcgggttcctcgacgagcgggagatgctgggcgtgatggagggcatcgacagcggtgacgacgactcgatcttctccgatgagcctccgtttgacttcggcgatggcgacacggagcttgaaggcatcttccggagcggtgtcgggtgggagctgctcccggtgcctctggacgaggacgagttcgaggtgctgccggggcacgtcgtggaagtgggcggcgccccgccggcggcgcttgcagtggtggagcggctccaggtggtggccgtcagaggcgaggaggttgtgcaggagtgcgctgtttgcaaggaagggatggaacagggggagctcaccactgggctgccgtgtgggcatttctaccacggggcgtgcattggtccatggcttgccatccggaacacgtgcccggtgtgccggtatgagctgcctactgatgaccctgagtatgagaagcggaggacgaggcgccattctgctggtggttcaacaccacagttgggtgcaccgatgcaggtttgagctagggctgattggtgctatgtcttggatgcaattccatcattccacggaagttagaaacctcactcattgaattggcgctaggatgtttacatgccagtagaattatacttctatgatcttgattttttcaggatttagcttttgtgctcgagagttgaatggtaagaacaattatcttaacaatttgtacatacatcttgtttcaatcaaattcttccttgcttttcag

SEQ ID NO: 4262 - DNA, 1038 bp, Zea mays
  Clone ID: TF_ZmC28548_1
tatgagccaaccagggactgctcccagggcctgtgcagcatgtactgcccgcagtggtgctacttcgtcttcccgcccccgcccccggccttcgacatcgccggccccggcggcggcggcggcgacgacgactcctccggccccaccttctcgcccctcgtcatcgccatcatcggcctgctcgccagcgccttcctcctcgtcagctactacaccgtcatctccaagtactgtggcaccttcagctccctgcggaacatggtcttcggttcccgcaggggccgcggccgcggccgtggcggcggcggcggcggcggcggcggcggcgattcaggggctcaggtgccgtggggcgccatgccgccggacgggctggacgagaccctgatcaacaagatcacgatctgcaagtacaagcgcggcgacgggttcgtggacagcaccgactgctccgtctgcctcggcgagttccgagacggcgagagcctccggctgctgcccaagtgcagccacgcgttccacctgccgtgcatcgacacgtggctcaagtcgcactccagctgcccgctctgccgctgcaacatcgccttcgtcaccgtcggcgtcggggcggtgtcgccggagccggagccggagcgccgcgccccgcgggaggaccgcgactggaggagagacaaccccgagctggtcctgacggtgggcggcccctcctcggacccagtgcgtggcgcaccgcagagccagagccagaatgcggtcagcggcagcggcggtgacgacggccaggatgcactggcgcggaaggattgcccggagagatcggaggagggcagcggcaatgcggagataaaggaagactgcgcgctgccggcggtgagggcggcgtcgtcgctgtccgacacgcaccgcgagggccgcatgtccatcgccgacgtgctgcaggcgagcctggaggacgagctgacgatggcccgggagagcggcctcctggcgggttcgtcgggacggtgcccgtgccacggggagcacagcaaggac

SEQ ID NO: 4263 - DNA, 636 bp, Zea mays
  Clone ID: TF_jC-zmshLIB3569P008d01b1
ctgacatcgccccgctgccaataagctcggctcgggtcagctcagctcaggtggctcctccattttgagtggaggactgactgccctcccgccggccgactcgcgatgctgatggggttccccgtggggtactcggagacgcccaagctgctgctgcacctcctcttcctcctcgaccacctgcgccgcctctcctcctggctgctccgcctcgggggcgccaccgacgccgacgccgacaccgacgccggccaccctcgccacccctgcgccgccgcccagcgcctggaggagcactcccccgcggtgcgcttcgactcgctgccgtgcggaagcggcggaggggtgatggcgccgctcccgctgccccagggctgctgcatctgcctgggcgactttcacgccgccgacgaggtgcgccgcgcccggagctgccgccacgtctctcaccgcgcctgcctcgaccgctgggcctagcacggtcaccgtacctgcccggtctgtcggacgccgctcctcccgccgctgccgtgccgcatcccctgaccgtgccgctgccgccttcgtagcgaaccggattacctgctacctgaggagcctgtgtgcataaacataaccttccactccaatgggctt

SEQ ID NO: 4264 - DNA, 1073 bp, Zea mays
  Clone ID: TF_ZmC502938_1
ctctcgaagcttctcgcgtctcctgggtggccgtgtccgtctccacgccaccgccccgaccgccggttcggcacgagggttccaagagcactcgacatggcggccgctaatgttggggaataacaagcggcggcagcagcagcagcggcgccgacgccgggggcggattcgagtgcaacatatgcttcgagctgccgcaggagccgatcgtgacgctgtgcgggcacctcttctgctggccgtgcctctacaagtggctgcgcatccactcgcactcgcccgagtgcccggtgtgcaaggccgtggtcgaggaggagaagctcgtgcccctgtacggccgcggcaaggaccgcgtcgacccgaggtccaagaacgtccccggggcggccgacatccccagccgtccggctgggcagaggccggccacggctccgcaggcggaccccaacaacgcccactttcccaacgccgccaacccggcgaacccgtggttcatgggcggcggcggcggaggcatcccgctggccaacgcgcgctgggggaactacaccttctcggcggcgttcggtgggctgttcccgctgctcagcttccaggtgcacgggttccccgacgccacggcctatggccagccagctgggttcccgtacgggtacggccacggccacgcttttcatggcgggcacgctggagcacatgcccacgccgcagccgcagctcctcggcacgcgcagcaccagcagcagcaggcggatgtgtacctgaaggccctgctcatcctggtcggcgttctggtgatcgcgagcctcgtcacgttctagggcgtcgcctgttggtaggtgttcatcatattgttgctgccttgctggtaataaataagagagagagacagagacaacacgaccgaaactgaattattcagagcggtgcaaggtgttgatgaagggtgttgttgtacatgctgtttgatacatgattgtatactgtggtctttgaacatacattattatcgaataataatctggaggctctgtttgaagtaaaaaaataaaaaaaaaaaaaaaaaagcggcc

SEQ ID NO: 4265 - DNA, 1722 bp, Zea mays
  unsure (1)..(1722): unsure at all n locations
  Clone ID: TF_ZmC7715_1
tgatngatctgtaggggacctcgaagcttcgagcacgccacaacccaacgccgcgcgggcggcgggcccgtgctgccctggtgtgtactgctccctcacgccccgcgccgccacccccggcccccgccaccactcctcccggcctccccgacggcgctccgggcagcaggaacaagatgtccaatcgggccggccaggggccgtatcactcactacccgcggcccgcgcccgatcgggcgcactgccctgtggtgtactggtgtgtcacgcccctcgtcactcaccccgtcacccgcaaccccatcttctattcttcccgacggcgctcctggcagcaggaacaagatgtccaatagggccacacattggtgttatgcctgtcggcggccaattcgtctccgtgggcaggatatcgtatgccccaactgcaatgatggttttatccaggaaattagtgagatgggtggcatattgaacacttatgggctaattgaaccagactttgaagagcgtcgagctagaagattcggaatgatggatgccatgtcttcccttatgcggcaacggatggaagaaatgggaagagatggtttgtttgatattcgtggtagacaaggaacaggtactgaatatggaaggaggccaactgctgttcctacattggtatttggcggcatcccttctcctggagttggtagcggtgatgttaatgttgtcctcaggggaggccgcagagctggcgctgcccaaccaaatttcagtagcttagttgttggtcccagtctggaagctctttttgagcagctacttctccagaacaaccgtcaaggcccagcacctgctccacagtcagctattgactccatgcctgtggtaaagataaaccgcaggcatcttgacgacgatccacagtgcgcagtttgcaaagacaaattcgaggttggagcagaggcacgggagatgccatgcaagcacctgtaccatactgactgcatcatcccctggctggttcagcacaattcttgccctgtttgccgccatccactgccatcacagagatcaggcagtaccagtagcgcccggccttcagcttactacaacgaagccgctgatcctcctggggtcaccagagcagatcttgaacctgctccaagagacggtggcagggaaagccaggaaaggcgccgctccttctcgtttctgtggccgtttggcccgtcgagttccagatccagttcttaccagtacgaacagaatgttgatgagcctgcagtatacgatccaaaccagatagcatattctgagtggcactatgaccactgactgaaaccctgcagcaagtgcaagctatctgcaattcgtgccttcaaccctcagctttggagaggcattcatcagctgtaatggctgcttgccgtataaaaaaaggatggttcttgcctgttatattgtgttcagtgcatagccttgctccgtatgtccgtcgtatatataatcccttgcgtgtagtaagcgatgaactgaatgcatccagaatatcatgtcatgataaacttgaatatagtttcatggttgttatttcagactgaaaataaaatcagtcttctgttccggttatactgattctgaaagaattctagacctccgttctttctttcaagacctccgttcttgaatatttgttgtctgttttaaaaaaaaaaaaaaccataaaaaagaat

SEQ ID NO: 4266 - DNA, 1639 bp, Zea mays
  unsure (1)..(1639): unsure at all n locations
  Clone ID: TF_ZmC7715_2
ccggccggggacattgggtacctcgaggcgggaccggccagcgaccgttccctccccgcgccacgcgcccgattgggtgcactgcactggtggtgtgcacgcccctcgtcactcactcgctaccccatatcccattccccccgacggcgcttctggcagcaaggaacaatatgtccaatagggccacccattggtgttatgcctgtcggcgcccaattcgtcttcgtgggcaggatatcatatgtcccaactgcaatgatggttttatccaagaaatcagtgagatgggtggcgtactgaacacttatgggctaattgaaccggactttgaagagcgccaggccagaagatttggaatgatggatgccatatcttccctcatgcggcaacggctgtcagaaataggaagggatagtttgtttgatattcatggtagacaagggacaggtactgaatatggaaggaggtcaactgctattcctacgctggtatttggtggcatcccttctcctgcagttggtagcagtgatatcaatgttgtcatcagggaaggccgcagagctggcgctgcccgtccgaatttcagtagcttagttgttggtcccagtctggaagctctatttgagcagctactactccagaacaaccgtcaaggcccaccacctgctccacagtcagctattgactccatgcctgtggtaaagataaatcgcaggcatcttgacgaagatccacagtgtgcagtttgcaaagacaaattcgaggttggagcagaggcgcgggagatgccgtgcaagcacttgtaccatactgactgcatcatcccctggctggttcagcacaattcctgccctgtttgccgtcatccgctgccatcacagcgatcaggcagtagtaccagcagcgcccgtgtgccttcagcatactacaacgaaacagcttgccctcctgcggtcgccagggcagatttcgatcctgtgccttcagcatactacaacgaaacagcaactgatcctcctgcggtcaccagagcagatttcgatcctgctccaggaaactacggcagcgaaagccaggaaagtcacgaccccttctcctttctctggccatttggcccgtcgagttcttaccaatatgaagaaaatgttgatgaacctgcagtatacgatccaaaccagatagcatattctgcgtggcactatgaccactgactgaaaccctgagttaaaatcaagatatctgcaattcgtgccttgagctctcagctttggtgaggcaaagggctgcttgccgtataaaaaatggatggttattgtgttcagtgcatacccttgctacgcatgtccgttgtggagatatcagctgtgtatagaactgggcgcaacaaactctgctgtaatgcccgtatatattccttttcggtatatcaagtctaaagctatagtacataatcctgtatgtgctgtaatcggtgaactgagtgcatccagaatatcatgtcatgataaacatgattataattacatggttgtctttttagactgaaaaaaaaaaaaaaaaaagcggccaaagcactctgcgttgtccttctgttccggctatactgaaactgaaaganacaccaggatgtgtttggttg

SEQ ID NO: 4267 - DNA, 1212 bp, Zea mays
  Clone ID: TF_ZmC2205_10
cattgggtacctcgcgggcggccgggatcacccaattgaaaggaagaagcgctccctacccaccgcggttgccccctttcggcctttccccttctcgatcgaactcgggtccttcggcgacgtgcggatttttcgtccctcccgatgcttcgcctgtatctgatccggggttcattgtgaagctgaggtgagtgtataggcataaagagagcatgaacactgttagtggtacaaagcgtgcaccaaggagacagtcgcaagatgggtctggtgataaactagtggtgatcgtggaagcaagttcccggggggtggggagccgtcgtggaccacatacccctattcctggcgccctaaactcacccattgatgtggaggccatcgaagatgaagttcaggcagtatctccttcgcgagtgcccctgccaaggaggaacaggagaaccaggagggaacctataacagtggttgacttggaggttgaagctagccgggaagggagcaaacgccagagggttgaaccagtaggacgtcacctctatccagattggggagcaaggtctagcttgcagtcaaatgccgtacaaaccagcaaagagcctgccaaggaggtccccgaggaaccatcttttacctgcccaatatgttggaataagatggaggagccttccacgacgacttgtggccatgtcttctgcgacacgtgcatcaagcaggccatcaaggttcagaagaaatgccctacttgcaggaaggggctgaaaatgaatagtgttcatcgtatttaccttccgaacggttctagttaagctgagcagctttacatatctgatggcttgtaactttgggggcaattagcttaacctctgttatccgatacatgctgactggctttgtcaaagaaacttctggtaacgtaaggctgtgcaatgtactgtgaggatcaggaattcttagcctgaacagcagatagatgtttcatcccagtctgtattatttatcggcatcaccaggagttcatcatgagaacttcctgactagggaagtcgatatcagcctcagttttactctcttattgcatccatggttcccagaatgtgttgttttgttaggatgtgaccatcggatggtgcatatgaccgtgtaaaacattattttgcaccgtattctgtattatttatatagtagagttttaaaatataaatgatgaga

SEQ ID NO: 4268 - DNA, 1434 bp, Zea mays
  Clone ID: TF_ZmC2205_2
gggtaccttcgaggcggccggggcgttcctcaccgacgcgtggcacgaagccgccctccctacccccgcctccacgcctccaacagaagaaccctaagctgccctcgctccgacgccgccacctcgtcgtccgaccgcatcgattcgatggcccgcatctccgccgtcgttgccgccgtgatcaccgccgccgttgtcgttgacgcgctgttcacagccgcctccgccaccgaggcgccggcccccgccccgatgtccggcgcgggcgccctctcagcgcagctctccgtcggctgcctcgcggcgctcctcgccgctttcctccgccactgagcggtggggccgccccgtctgcgtgcgcgtcttcagatctagtggtacagtggtagtgagagttgcagtctaatgttagtcgcaggtatcgtagcggtggtgttagtgttatgaagatgaggcatttggttttgttccacgtggtggatggatggataaatctggacgtggggagagaactttcgcttcggagtttggtcgcggttttgcccctcccttcttgaactcctccgctcgatcgaactcagttccgattcggcaggttcattgtgaagttgaggtgggtggtataagcatcgaagagagcatgagcactgccagtggtacaaggcgtgcaccaagaagacagtcgcaagatgggtctgctgataaagtagtggtgatcatcgaagcaacctccccggtggtggggagccgtcgtggaccaccgacccctgttcctggcgcccaaaactcacccattgatgtggaggccatcgaagatgaagttcaggcagtatctccctcgcgagtgcccccaccgaggagggacaggagaaccaggagggaacctataacagtggttgacttggaggttgacgctagccaggaagggagcaaacgccagagggttgtggcagtagatcacctctctcccgattggggagcaaggtctagcttgcagtcaaatggcgtacaaaccagcaaagagcctgccaaggaggtccccgaggaaccatcttttacctgcccaatatgttggaataagatggaggagccttccacgacgacttgtggccatgtcttctgcgacacgtgcatcaagcaggccatcaaggttcagaagaaatgccctacttgcaggaaggggctgaaaatgaatagtgttcatcgtatttaccttccgaacggttctagttaagctgagcagctttacatatctgatggcttgtaactttgggggcaattagcttaacctctgttatccgatacatgccgactggctttgtcaaagaaacttctggtaacgtaaggctgtgcaatgtactgtgaggatcaggaattcttagcctgaacagcagatagatgtttcatcccaaaaaaaaaaaaaaaaaagcggcc

SEQ ID NO: 4269 - DNA, 1352 bp, Zea mays
  unsure (1)..(1352): unsure at all n locations
  Clone ID: TF_ZmC2205_5
atnnnnngggctgtttgttttgacaaggcaaagcacaaattttattaattttgatcaacgatcagctaatattatattgcaaaagaaagctgaggattaaatccaagggcggagcttcagtgtgtgcgtataatactccagtttatatcctgatgaacatctgtactgtccggcatgttaacctagatccgtctcggctgcgccctcctgttcttcttgctgctgggatctggtagactcgagggagtcaacttccgaagcgaggcgtgcaacatcatcaacgcatagctcaatccgatggcgtacacgagagcaaactgtaggttgcagacgtacaggagtatggcggtagcaatctgcgcacagtgcaacagagcctgggcaacccctggagccctggtggtaagaccccaatggtcccggcagtagcgcacgccctcccagacggcgaggctgcgaagatgaagttcaggcagtatctccttcgcgagtgcccctgccaaggaggaacaggagaaccaggagggaacctataacagtggttgacttggaggttgaagctagccgggaagggagcaaacgccagagggttgaaccagtaggacgtcaccccgcgtccgattggggagcaaggtctagcttgcagtcaaatgccgcacaaaccagcaaagagcctgccaaggaggtccccgaggaaccatcttttacctgcccaatatgttggaataagatggaggagccttccacgacgacttgtggccatgtcttctgcgacacgtgcatcaagcaggccatcaaggttcagaagaaatgccctacttgcaggaaggggctgaaaatgaatagtgttcatcgtatttaccttccgaacggttctagttaagctgagcagctttacatatctgatggcttgtaactttgggggcaattagcttaacctctgttatccgatacatgccgactggctttgtcaaagaaacttctggtaacgtaaggctgtgcaatgtactgtgaggatcagaaattcttagcctgaacaacagatagatgtttcatcccagtctgtattatttatcggcatcaccaggagttcatcatgagaacttcctgactagggaagtcgatatcagcctcagttttactctgcatccatggttcccagaatgttttgttaggatgtgaccataagatgatgcatataaccgtgcaaaacattattttgcaccctattatgtattatttatatcctattatgtattatttaaaaaaaaaaaaaataaaatataaatgatgagtaaagctggtgaagatagccttatatatattgggttattgtcttgggggattattgt

SEQ ID NO: 4270 - DNA, 601 bp, Zea mays
  unsure (1)..(601): unsure at all n locations
  Clone ID: TF_21214430
acggtgtcaatcttctgaaattccttacaattaaggtttgactagtacagtaagtggggctaacgataccgatgaaacagcacccgcagatctcnnnnnnnnnnnnnnntccaaggagtcagcggaggatcaaggcagtacgagtgtacccacagtgatctgcagacgtggcagcttagaagaagctcctcaggctcacggaagtggcactggtagcatgctccttgcccagacgttggtccagagaaatcgtagccttcactgcccagcacnnnnncatcggtagaagcttcacaaggaatggtctgcgagtatactttctgatctaaggtgcctgcctcgtccaccttactgatccatgtgaaactggctttgcaaaggggacatgttgagactttacccctagaagccagacaatccgaccatccttgaatgcatgaataacagaatcgatgtccacatggtaagatgccccttgtagaagnnnnntctgtccagcatatgacgcatgataattctgtttgcctttctaaattagatgacttttccatgggtttgttatcatatcccatttcatcatcagctagagtgccaaagctac

SEQ ID NO: 4271 - DNA, 1589 bp, Zea mays
  Clone ID: TF_ZmC1181_1
cattgggtacctcgaggccggccggaaaaaaaaaaaaaaaaaaaaaaaaaaaaaaaaaaaaaaaaaagaaaacctcgaggccggccgggatcgctccctttcccatttctcccctcgattctccgggctgatccggtcgctgtccgggcctgttcgattggaggagaatcgcctggtttgaaggaaaggcttgggaagaaaggtaattatcactgtatctgacatggatgagcacatgggaagacgaacagtcggcggcctcctcttcaccaagggaggatccatccttctcttcagagaagacggctcgcgccccaaggccaagaactgctgcacgcgccatggctgtagcggtcagcatcctgctgacagagccaagggcaaggaggtgcacagggcagcagcggtgggcagtgaatcgacaccggctacccctcggagatcacaagcttttaggaagcccaacagaaggcctccacatgaaggcagtgcctcaggcagcatcgtcagggatgtaggaggcccttgtagcgaaaccggcagcgggtcaagagatgctcctgggcgtgatctgcttgctcggcttaaggagagggtcaacacatcaaggaaacgatcgttgaacagggagaacagcccgcagtcgccgagtggactcagtgtctgtgccagttccccgagcaacagtcggtcagtctcaaggccgtcgcaccggacagcttcgaggataagagaagctgacgaaggcgcgaatgcaggagctgacagtgtagtgcgcagaaatgctgctaggaggggttcagagaggagtgacgatgacttgctgctggtcgagcaggtaacaagaaaccagcgccttctgaagggtttctctctggattcatggctagatacagaagcgatcttcagggagagctttcgtccctggacgacagcatggaggatccaaatggatacttgcgctttgatgtgggcgggattgaagagctcgagaactatttcatattcaatgatcggcatagaggaatgaggatggatatcgacggcatgtcctacgaagagttgcttgctttgggggagcgaattggtaccgtaaacacaggtctttcagacgacgcgttatccgcgtgcctgaacaggaggctctacatgcccacagcttcaggttctcatgaagattgtgaaagaaaatgcagcgtatgccaggaggagtatttagcaggcgaggaggtgggcgagatggcatgtaaacactactaccacctttcctgcatagatcactggcttcggcagaagaactggtgtcctatctgcaaatctgtcgccctgaaaatcaactagcaacgtgtttcatgtttcttcataaatgaagtgtatagattcttcatctcctgtattccttccccaccccactccttttcccttttggaattttttttctttctttctttttcttttactcaaagcactcattttttattatcaatttaaatcagaaaagaaaatcttgtgttgggttagggcttgctgcgagccttactcgtgttggcccatggcccagtaaaaaaaaaaaaaaaaaaaaagcggcc

SEQ ID NO: 4272 - DNA, 1065 bp, Zea mays
  Clone ID: TF_ZmC60888_1
ccggagctgtgagaaagaaatcagctggggtggagctgtaacagttcgccacggctaggctcctctcccctctcagctctcagctgcccctcctgcatgccgatcgcctccaagctcgtctacttccagcgccgccccgcgccggcgccgcctgacgacccgggtcccgagcctcccgacccccgccgcccccgccgccgccgccgcagcggctccctctcctcctctcaccagaagccggagcatgatgttccagggcaccaaagggatcacgctgctgcagccaagcctccggggccagtcggaaaggcagcagggcttcttcacacggcctccagcgcagggctttttcaccaccgcagcacgtcggggtcggaccacggccggcttcccgacgccgtgcagcaggccagggaacggctccttcagaggctcggcagcgtggacctggtcctggcggcgggacgaaggtgctctgcacaagacatggccgctgcagacactctgggctggagctggaggactcgctcgccccgtcgttgatgcctcttcgggcggcggtcaaaccagctgcttccagttccagttccagcccggtgaacgtgaacccatccctgtgttccccaaaccggcggccttcgtcgcggtacaggaagtagaagacgggcgagccgcgcccgcggacgcagcttctgactgctccatatgcctggagaggtgcggcgccggcggcgggctcacgcagctgcgctgcgggcacgtcttccactccgcctgcctgcagcgctggctgcggtcccgcgccgactgcccctactgccgggccaccgtgcgagctcgctcctaacagcaggaaggaaggaaggatggatgatgaatggaaagtgtggaactggatgacgatggttttattaaccgtgtgtcgctgctcacctcttgttgtaaccactccactagtatgggttttttttcttttcttcttcctttgcccgttgaggtagactggtagtactgagctttgcggcttcagcgattcagtgtgatatatgtgtgtatgttgtgtct

SEQ ID NO: 4273 - DNA, 1127 bp, Zea mays
  Clone ID: TF_ZmC11035_1
gctagcccaacaagagaaagactgagagagagagagagagagagctccactgcaccctgcagcaccctgacctaaactggtccctctctgctgcctccgccccaccactcgtctcccaccgagcaatagcatgcggcacttgcaggccaccgtcgagcacctggccggggtggccgccacgcccccgccggcgtccgcggggggcggcgtgcacacggacacgttcctcatcctggccgccgtgctctgcttcttgctctgcgtcgtcgggctggccttcgtcgcgcggtgctcgcgcctgtgcaacccctcgtcctactccgtggacgcgcgggggcccgtcgacgacgacgacgacgaggcggcaatgccggcgccgcgcaagggggtcgacagggccgcgctggagaagctgccgaccgtgccgttcgcgttcgaggacgaggacgcccaggacggggagcggccggagtgcgccatctgcctcgccgagttcgcgcccggggacgaggtccgcgtgctcccgccctgcgcacacgccttccacgcggcctgcgtcgacacctggctcctctgcacgtccacgtgcccctcctgccgcaccgccctcgtgctggcgcaggcgcaggcgccgccggcgtccgcggaccccctgatgcagtgctgcgcctgcgcgtcggcgcaggcctcggcggggccggcagagtgccccgtactccccctccccctcgccgtcgtcgtcgtcgagcgcggaccttgccggacgtcagtaccgtaggctggcgatgcccggcggcgagcgtccaattgacgccgacaccttgtacatactcgccagattactagtgaagttgtgtacagtgcgcgatggtgcattagacaaatcacttcacttgtactcctactacgtctgactggttgcctagctgtaaattttaccggcgatggcgagtttgtcctctcgatcgacgtgcagtcgtgcacgaaacagagaagcgttttgttttctgctacatgctcgtggttagccgcagacatacagttccgtagagaaaagaaaaaaaaaaagcgcttgcaaagaaaagactagcatcaatcgataagacgatgggagtgtccctttttgt

SEQ ID NO: 4274 - DNA, 2072 bp, Zea mays
  Clone ID: TF_ZmC1307_29
cactcaaaggccggaccaggagccgtagaaaaaccagcccaagaggagagagagagacctccgtgccagccccgccccacctcgccgcctctccacgcgacctgctcgccgctgccgccggcgccgcatcacaaatgcccacccagaagcgcccgcctccgcctccgccaccctctccctccccctccgcggcccctggcgccggctcgccccctccctcgtctccgccgctgccgacggccgagcccgcggagaagaagcccaagctggaggtgaacggcagcgccggcgccgaagccaacggcaacgccaacgatttcggcgcgaaggaggggacggaggtggaggcgtcggagtctgagtcggaggatgcggacgccgcaaaacaggagtttgtaccagtaaaattatctgatgtacgcaaagaagtgcagtgtcccatatgcttaggcatcatccggaagactagaacagttatggaatgcctgcaccggttctgtagggaatgcattgacaaatccatgcgacttgggaacaacgagtgtccagcgtgccgcgcacactgtgcgagccggcgttctttgagagatgatccgaattatgatgccttgattgcagctctatatccagatattgacaaatatgaagaagaggagctagcgttcaacgaagaggagaatgaccgcaacaagcagattcaagcatccattgctgaggcttttcggaaacaatcagaagttattgggcggaagtctactgccaaagctactgctgctgcatttgtaagaagatcacgccgtaacattcggcctaatgggcagaatacctatttccgtggccgaggaaaagccagttctgatgacgttgctctggcctgttctgaagatgaagaggatggaaacggtgaaagctgtagcaaagaggcctcatctgcggaggagagttccccagagaaaaagcagaaacgactgccaaaatggccaacaccgcgttcttcacctgcccgagcatgcaatgatgaggttgcttctgatgaaaaggatgatgtaggaatatccagggaaaatttcagcacatctcctctacgagcatggggaaagaatggcactcgcagtcagactcgccacagtagcttcagtggttcaaatggcaggatggtcaagggtgggcgcatgatcaagttggttgagtgcttgcgaaattctgacgacaatgaaggcgagcgtgatgtacatctttgtctgcttccacttgatggacaaacggcaccaaatctggagaagtcatatctgtgttgcggcccaactctgtccatcaaacaactttgtcagtttgtcgccagtcagacatctcacaaagatgaagaagttgagatgtatgcgctgaagccttcttgtagcaagcctgtcagcactaatacatgcggtcctgacaaagcaaggctcgcaggggaggaacgcctttcagacttgcgctcctcgttcacatttcctaatggggttctggtgagatcaaacacttagattatctgattagacccgttcacgtttattctaaatgttatactcttcatttcaggagctggtgtatgccataaaagtggctaactagatgctgagtgaaggcccattagttcaaatggaagtgttttttgtttatacatatcttcatcgtgatcccttgacgaaatgacaggtttgggctcttgaatacaacttggaaggaaaaaaaacgttgggggagactagttgttgtataattagcttgtgagatgtgagataaatgtgcgtacgttgtcaacgaatagtttcagaagagtcagattggcttccacagttcacctcgctgcaacccaaaatctggtctccactgccggcatttgggggaatttctcggttgggtgaaggctgagttatttcctcgagtggtcaagttgttttacttccacagttcaccagtttcagcttttgtaattcatcggttcatattcttcaggcggcagccagtccgtgctgcgaacgacttcccagatacatgtaacataaatcttataaaaaatatatatgtaacag

SEQ ID NO: 4275 - DNA, 1864 bp, Zea mays
  Clone ID: TF_ZmC5523_1
ccgctcggttcgcggttcggcctgtgttgccttgcgacttgcgactgggcggccgggtgcccgagtcggtgcggccgtgcaggagcgtttgctgtctccgtttccgtcccgttccctttcgtggactgttttggaaggcgttgcgatgagacgctgcggcggcggcggcgaggagtgcatccctcggcgatgagcagaatcaccaccggatcttaatctcccttgcctcgtttgcggcgagcctgcgctgtcggcggcggcgcaccccctccccttcccccggcgcttccgtctgctggctggactcagttcttccaactcggcccttaacaagagaacgacgaccatgccgatgcgtggcgtcgatttcaagtggtatgatgggttcttcctctccatgctcgccactagcgtaattatcgtttccattaattggaagaggtatcgcctgtgtgcccacccgctccacatttggatagtggtggactacaccactgtcttcattgactgtatccttatgatcaaaataatgataactgtgccatttatgatttatcttggtgcatgggactttcttgacacctgttttcctaccataatttttgctaccttatggttgtcattctcatactgatgttttaggtttctaagctttgtcttgtttgtttgttccacaaccaatgactaactgaactttgcaaaagtatggctgtcagtttattctattatgtatcttcttttttgaaaaaaattagctcgctgcaggaatgttagatctcggatggcaacagagatatgctcgtttttgtggaagaataattgtcctctcagttcttgtgctacttctctacccctttctctgggtttggactgtgattggaacattgtggtttagcactgcaagaggctgcttgccagaggaaggacaaaagtggggcttcttgatatggctgcttttcagttactgtgggctcgcctgtattgcttgtgtagctattgggaagtggttacaccgaagacatgcacttcaacagagagcacaacaaggaattccagtctctgaacatggggttttagttgatatgatccgtgttcctgactgggcatttgaggctgttggcctggaaatgagagtgggtcaagatactgcatatcatcctggtctttatttaactgatgctcagagagaagcagttgaggcactgattcaagagcttccaaaattcaggctgaaagctgttccaacggactgcagtgaatgccccatctgccttgaagaatttcatgttggcaatgaggtccgtgggctcccatgcgcgcacaatttccatgtggagtgcatcgaccagtggcttcggctgaatgtcaagtgcccacggtgccggtgctccgtcttccccaacctggacctgagtgcgttgaacaatcttcggtcgaccagcgagccggaccatccatccgccagcgccagcaatgtaacgacggcaactgcagcgacgagatacgtgaggtcgcagccggcaggtcaaagctatttggtgcggttgcaggggctgctgctccgccctgtccggcacgatagcgtggagagtgacggtgagccggcggtgggcaacagtcgcttggttggcaccgaagagctgcctagcatacttgtagacgatggccatcagctgccagatcgctgactgatttgatgacctgatggatccagcatacttgtcagcataatttaggatacttgtcagcttttcttttacagttttcttttgcaaatgaaatgcgagttttgttgaaaaaaaattttttaactgaacactgaaataagcaaataaaattatttgcgtcgaaaaaaaaaaaaaaa

SEQ ID NO: 4276 - DNA, 1454 bp, Zea mays
  Clone ID: TF_ZmC17955_1
ctcgggacacgagggggcatcccatcgatgccttgctgggacggcctgccgctgccgtgtggacccacgcgagggggacagcgactgtgtagcaccgtgggcggggtgggccccagcggagtcaagcgggtgtaaattgcagcctctgctctggcggcgcccgtgctttcatcattccgctccccacacccctgttcgtggcggcctccgcccctccctctcaggctctcaccaccgtctgctggtggttgccgcggcgccgctcctccctcgtggtggcggtggaggactacggtcggggatcgacggcttcttcgtccgttggttggcaggcgaggcgatacatcaaccaaccaaaagaaatgtcagctggcaggcaagcatactggtgttaccagtgccgacagagggtgaggccacggggccgggagatggtttgtccctactgcgattctgggtttgtggctgaaatggatgatgtagatgctctcatgagccacttcgtcgggacggatcctgatttccatcgcgacccacggttcgggataatggacgcgatctcggccgcggcggcatgaggagggccaacatcgacggctacttcgttggccctggactggatgattttatcgagcagttgacccagaaggatcgccgaggaccaccgcttgtcttccggtcctcgatccccgccatgctcaccgaggaaaacagcttgcgatgttttcgtcaggactcgacgtggcggcggcggcggcggcggctccaggagggatcccaacatcgcggactacttcgttggccctggactggatgatcttatcgagcagttgacccagaatgatcgccgaggaccaccacctgctgcacagtcctcgatcgacgctatgcccacagtgaagatcacccagaggcatctcagtggggactcgcattgccctatctgcaaggagaagttcgagatgggatccgaagaagcaagagagatgccatgcaagcacctgtaccactccgactgcatagttccttggttagagcagcacaattcctgccccgtttgccgttacgagctcccgccacagggctctgccacgggtgctagctgctcgcgcgcgagatcaaccgaccagagccagagctcaagtagttcaagcagcagcgggagaaccagtgggcgtcaaaggagaaggaacccgttctcgttcctgtggcctttccgctcatcaagtagttctcgctagattagcctctggtaatctttgctcaggttcgaaatactgtttgtttttttgggtcaaatacgctggtctaatgggctttaatgtggtgggatctcaatctgtactgtatggtttgttaatgatcgccacacgatgtttctccttgcaagtatattattattaccacggtatcatcaaaaaaacttggaaatgtttaaaaaaaaaaaaaaaaaa

SEQ ID NO: 4277 - DNA, 3477 bp, Zea mays
  Clone ID: TF_ZmC10271_1
aattcggctcgagactggagttcacaactgttttcgctgtttctctctcccgtagcccagtttacctcgcctagggcgaccaccgccgccgccctacgccagctgcccaggtcttgggcggaccctttgccggcgacgagcacccaccacaccagatcaaactctagatattgccactctacgtcccagcatcctatgaccacatggtttagacagtgctgtccaggtggatgatgaattgtggtgcccaaacggaggcacgtggcacgcctcttgaagataggcactggttggaaacagattttgttggcgctccaagagttcatacttatgtactttcctttctcaaatcataacaaatcttaggcagttcaagcttagctgaatgtcaacttgcctccacgtgcaagatcccagaaacattgctatgtctcgtccgcttgattttgctgtgcttaaatacaaaaaccaaaagcttgcggaacaactggaagtccacaaatttgagttctgtgctcttgagagtagatttaatgatctaaaagagaaacaaaggacacataataagacacttgttctagtcaaaagttattgggagcgactcatagcagatctgggtatagtttctgtttgcaaaaatgaatcttcacgttcaagctgcagtacagggaacaacaatatacgaaaggactttttaaatggacttttggaggctggtgccacagaaagttcaggttctcccaattgccaactaggaaatgacgtctcttcagaacaatcaacaacaattgatattctgcagaagctattccttccatcaagtggtccatggcatgtgaataacgagtttgtttctgctgctctcatgaagttgccagaaaatgaacacagcaggcaattgcacaatgctaccagcgatgtgttatccaagcttcatgtggtgatgcgtacagtagataatcttcacttgaaacacaggcagttagcagcgaactatcaaaaacaaagagattcgagtgcctggaacagagctgaacagaaacgtctgaaagaggagttgactagtgttgttgccaagttggaaggaagcaaacaaaaactggcagtactgaaagcacagggagacaataaacaagcaacaccgatcctggttcctacgctgggaaacaaaaatatgactgcagaaaaggtgagagataaacaaacagaactgcaagatcttgaagctactcacaaggagttaatggaattgatttcaaagcgtctggaggaaattagaaggctgcatacagagagaattgaaattttgaacaagttagcaacttttcagaatatactaacggatttcaaaagcattcactcttccaaagcttttcaacttgtcaatgaccaacttcagaagtcacaagcagaactggatgatcaccaaacgttgttagagaaattacaggttgagatggatacctttgtttggcgagaaaggcaatttaatcaaaaagttgatttggctgaaatcccccagaaggtttctgcatactgtgtgtctagaattgctgaccttgaaaaggatgtccagaaactgtgtaatgaaaagaatatgcttgtgctgaaacttgaagaggcttcgagagaacctggtcggaaccaggttatctcagagtttaaagctctggtgtcatcactaccgagggaaatgggtgccgtgcaaagtgaactgtccaaacacaaggatgcttccttacagttgcattctttgcgagcagaagttcattcactttctagtatccaaaccagaaaggaacaagaaattgaagaaatgtcatttagatctgcccatgctggatctgatataagccaacttcaatctctggtccgtgagctgagggaaaatacacaggagcttaagctatttgtggagttgtataagcatgagtccactgattccagacagctgatggaatcgagagatagggaactcgctgaatgggctcgagttcacattctcaaatattctcttagtgaaagtaaattagagcaacgtgtaatttcagccaatgaagctgaagcaatctctcagcagaggttggcaactgctgaagctgagattgctgaattagggcagaagctagaaacttctaggagagatctagtgaaacaatctgatatactgaagtctaaacatgaagaatgtgaagcgtatgttgtggagatcgagagcattggccatgcctatgaagatataatgtcacaaaatcaacaattgctacagcagattattgaaagagatgatcataataccaagcttttcatggagggtgttaaatcaaaacagtcacacgatgctttgcatttggaggtgcgctcgttgcaaagaaatttgcagcatgcaagtactttgatggatttgtgcaaccagaaaactatccgcctagaggaccagctaagaggttggtcagagcggttgaggagactgtcagaggatggaatgcagcagtctatttcattgggcaattatcaaaaaaagctgtctggtatgcatggagaagctccaaagctcaggcagtcaatggatgttctacaagcgaaggctgggagcaatcggctggaaattgctgagctgcttatagaactagagaatgagaggtttggtaaaaagagactagaggatgatcttgatctaatgtcaagtaaagctaattctctaagagagaagacagataattcagcagttcttcagaaacttctccatgaggccaaggagtacaggggaatattgaagtgtggtatttgtcatgataggcagaaagaggttgtgattgccaaatgctaccatctcttctgcagtcagtgcatacagaagccacttgggagccgtcagaagaggtgtccatcttgtggactaagcttcggtgttaatgatgtgaaacctatctacatatgaaacagaaggttggcgcctgtgtcgcagcaccaaaacaaaactgcttggcgcttactaatttccggtatatggtaggcggccatggtaattcagtcggtgatgtagcataagattatgtagcatttaagttgctacatgtgattgctggtacccgctggcatatatgatgctggtgttacctcaagcgccttttgtaaagtctgcttgccttgcccaatctggtagaatagcctgacatcgtcaaccattagttccttttaggagaaaaaaatatccaacaaatgaggattgatgcttcctgcaatagtgagcaatgtacaatatatagctttagtcagtttcattgttgtagctgacagtaagaatgtagttttcttttctttttaatataccggttatccagtttgtatgtttctggagtttgccaattctgtttatcaaaaaaaggagatttagtcatttctaaccatttttttcttgtcacgatatccaaaattaccacattatatttaatatagaagatatagtttttcagt

SEQ ID NO: 4278 - DNA, 841 bp, Zea mays
  Clone ID: TF_LIB4756-071-R1-K1-H3
attgggtacctcgaggccggccggggcgggctcattgttgcccaagaccctggaatcacggagcaggggtcctccctctctctctgactctcctgagggggaggaggaggaggcagaggcggaagagcaaccaccaagtagcagagcgcgaggcgacacggggacggagccctggaggtctctcgcgagtccagaggcgatcgacggagtcacgattcgtctcccagactcccaggatacgaacaacgggactttggtttttaacggcagctagaggatagcctggagtgagcatttcattctggagatacaatgggtggctgctgctgctgctgctgttctgcaagggcatctgattcagatagagcaccggtgcgcatctatcaccgacaaaatcccgaggaacatgcacccttgtcgtcagcctttgatggaccatcgccaacttctgctatagttgcagttgacacaaatcttgatacatcatctcttgacacttaccgagcaccacctgcacctttgccatatgatgtttgcttcacagtttcagaaaatcctgatgtggagaagtcaggcattaaaatcaaaactgatgggcagcaggccccaaaagtggacgaatttgagtcgtgcgaaaaaggtgcccctgaggataaagctgatgaggaggatgtttgtccaatatgtcttgaagaatacgacaaagaaaatccacgttcggtcaccaagtgcgagcatcatttccatctctgttgcatactcgaatggatggagaggagcgagacatgcccagtctgtgaccagataactctgatagatgggatgtacgaatagcattctt

SEQ ID NO: 4279 - DNA, 1190 bp, Zea mays
  Clone ID: TF_ZmC19345_1
cattggggcgctcggggccggccggggtccgtctccttccacccagacacaggccaggcgggcccattgttgcccaagaccctggaatccggagcaggagtcctctctctctctgactctctcctgagggggaggaggaggaggaggaggcagaggcggaagagcaaccaccaagcagcagagcgcgaggcgacacggggacggagccctggaggtctctcgcgagtccagaggcgatcgacggagtcgcgattcgtctcccaggatatgaacaacgggactttggtttttaacggcagctagagggtagcctggagtgagcatttcattctggagatacaatgggtggctgctgctgctgctgctgttctgcaagggcatctgattcagatagagcaccggtgcgcatctatcaccgacaaaatcccgaggaacatgcacccttgtcgtcagcctttgatggaccatcgccaacttctgctatagttgcagttgacacaaatcttgatacaccatctcttgacacttaccgagcaccacctgcacctttgccatatgatgtttgcttcacagtttcagaaaatcctgatgtggagaagtcaggcattaaaatcaaaactgacgggcagcagtccccaaaagtggacgaatttgagtcgtgcgaaaaaggtgcccctgaggataaggctgatgaggaggaggatgtttgtccaatatgtcttgaagaatacgacaaagaaaatccacgttcagtcaccaagtgcgagcatcatttccatctctgttgcatactcgaatggatggagaggagcgagacatgcccagtctgtgaccagataactctgatagatgggatgtacgaatagcattcttggcggcggttccagttgagttggcgttctttgattttgtttttgttgtggtctggtctggtggaggagatggttgatgagtcttggcaaaaaataatttatagaagaaaaatgacatgaaattgtgctagagtcgcctgtgtcctgtttttacctgaaaaccctgtgagatttgctccctggtttcctcttgcttggtttgcgtgttcattcttccatttagatttcagtttctcagtgcctgtgtgacagggaaatcatctgtattgtacagttagtctgaaacggtgacagaaaagaagaaaagctgattctatc

SEQ ID NO: 4280 - DNA, 1147 bp, Zea mays
  unsure (1)..(1147): unsure at all n locations
  Clone ID: TF_ZmC19345_3
ccctggaaaccggnagcagagtcctctctctctctgactctctcctgagggggaggaggaggaggaggaggcagaggcggaagagcaaccaccaagcagcagagcgcgaggcgacacggggacggagccctgaaggtctctcgcccacgcgtccgagcaaccaccaagcagcagagcgcgaggcgacacggggacggagccctggaggtctctcgcgagtccagaggcgatcgacggtgtcgcgattcgtctcccactagaggatagcctggagtgagcatttcattctggagatacaatgggtggctgctgctgctgctgctgttctgcaagggcatctgattcagatagagcaccggtgcgcatctatcaccgacaaaatcccgaggaacatgcacccttgtcgtcagcctttgatggaccatcgccaacttctgctatagttgcagttgacacaaatcttgatacatcatctcttgacacttaccgagcaccacctgcacctttgccatatgatgtttgcttcacagtttcagaaaatcctgatgtggagaagtcaggcattaaaatcaaaactgacgggcagcagtccccaaaagtggacgaatttgagtcgtgcgaaaaaggtgcccctgaggataaggctgatgaggaggaggatgtttgtccaatatgtcttgaagaatacgacaaagaaaatccacgttcagtcaccaagtgcgagcatcatttccatctctgttgcatactcgaatggatggagaggagcgagacatgcccagtctgtgaccagataactctgatagatgggatgtacgaatagcattcttggcggcggttccagttgagttggcgttctttgattttgtttttgttgtggtctggtctggtggaggagatggttgatgagtcttggcaaaaaataatttatagaagaaaaatgacatgaaattgtgctagagtcgcctgtgtcctgtttttacctgaaaaccctgtgagatttgctccctggtttcctcttgcttggtttgcgtgttcattcttccatttagatttcagtttctcagtgcctgtgtgacagggaaatcatctgtattgtacagttagtctgaaacggtgacagaaaagaagaaaagctgattctatc

SEQ ID NO: 4281 - DNA, 1052 bp, Zea mays
  Clone ID: TF_ZmC75319_1
cccacgcgtccgcccacgcgtccgcaagctttccattccgtcgtatcgtgtgatcccgcctccggtatgaatgattcgcgtattttgatttcgatctgatccgtcgcactgtttgactcggccccggccgggtactgagggatccaaatccaagggaatggatcaggcggcagccatgagccccagcccacgcgccgccgccggcatccactgggaggcacacgggcggcttctcacggcgtgcctcgtcgtgctcaacgtcctcctcgtcctcctcgtctacgcctacttctggcgcttcttctcgcgctcgcgcacgcgcggcggcggcggcggcggcggcggcgaggacgacgactcggccgatggggcgtcggcgtcttcggaggcctcgtcgccgccggcgtcgcccaaggcccgggaccggcgcgaggtgcagctggccatcaccgcgctgcccgtcttcgtgcactcctcctccggcgtcggcgtcggcgtcggcgggccggcggccgagtgcgcgatctgcatcgcggagttcgcggacggcgaccagggccgcctgctgccgcgctgccggcaccgcttccacgcgcgctgcgtcgacacgtggttccgctcccacaccacttgcccgctctgccgcgccactgtcctcgccgacgccgcgccggcgccggcggaaactgccaaccaaaaccaaccaccgcatcatcttcatacggatacgccgaatggtacggactccagtacagaatctccggtgtgaaaaagacagtcgcaggcagatccattcatggtttaacttgagagtactttcaaattgcgagtgatcagatgcctgtgtactgggaggaattaaaagcctgctcatgcaagcagaagcgcacttcttgatcaggtttaattgtgagtgcattagattttagacatttcaatccgtatttttgtacaactttctcgtgtaaacagtacgtgggatgagctgctagagctggctgtaaatttatgtgtgctaattgaactgctagctgattttcttgggttctgac

SEQ ID NO: 4282 - DNA, 2096 bp, Zea mays
  Clone ID: TF_ZmC989_1
ccggccgggtatctctacctctccctctccgcacccgactcacttccacgggcgcacggaacgaggattccgtgcggatgcttcgtccggattgaacgccgcactcaagctgcgacgaatgctgattgtcagccagctccttagcatacaccctggtttcctcccggctcaaatccaagttgcccaaatgcctacaccagtgaagacgttgctgcccgtactgctcctcatctggggcggatatggccggtacctcctccgccacatcagctactgacattccctccacgatcaaccattggtcgaggccggccgggtgggcgacgcttccggctttccgtgcgaccgtgcccttttcctcctctcgcagctcgcaggcgcaacagattccacccgttccttcgggtggccggacggaacgaggaaggaggcaggatggcctccgatggccacccgccggagccggggaagaaggaggatgtcgccaccacggccgccgggcctggagcaaacgatctggacgacccgcaattcatgtgctgcgtatgtctggatcttctgtacaaaccagttgttatatcatgtggtcatatgtcatgtttctggtgtgtccacaaagctatgcatattttccgggaatcgcattgtgctgtgtgtaggcagccctatatacacttcccgagtatttgtcagctcttgcatcatttgcttctaaagcttgaaactaatgattacaaaagaagggaaaaagaagtactagaggaagagaagcgcatgcaaacatactctccccaaatcattgagttcttaaactacaagactaacgttggaagctataaggagaacagaaatgaagacagtaaagctagacctccacaagaagttccattgaatgacagcgttccagatgagcatttgaagaaaattaaattggaggatgtttcatgccctctctgtatggagatgctgtatcaacctgctgttcttaattgtggtcatgtgtattgtgtatcctgtttgtcatccttgaatgaggaaacgctgaagtgccatgtttgtggaagtcttcaccctggagatttccctaatgtttgcctggaccttgatcatttccttgaagaatattttccagcagaatatgaattgagagggcagaaagttcaatttaagaaggatcagtgcaatcgtgaaacatcatcttcaggtacttcaggcagaaaaggaagcactagggcactgcatgctgaagacccgtcaaatattcacattggagtaggatgcgactcatgtggggtatatccgatacgtggtaagagatacaaatgccaggactgcactgagttaataggctttgacctttgcgaagcctgctacaactccagttcaaagctcccaggacgctttaaccagcggcacacccctaatcacagaatggaagttgacaattcagcactcgtgcataggatactgagacaccatggcatacccgaggaaggccctgagggactgatgatggaagtggttggtcctgatgcaatggtgcagatactcattgataatcaaggaatggaggagggcaatgacgagggcccaggagaggcggccattgaagaaccagttggttctcttggctcaatgtcgcgtctgtcgcatctattcatgtataatccagaaatggaggatggcaatgacgaggactcaggagaggaggcggccattgaagaaccagttggttctcttggcgcaatggcgcctctattcatgtatgatcaagaaatggaggacaacgaggaggatcaggcacactagatgcagattgcaccagctgcagcgaagcctttgttttgtgttgctggggcggctctacttatgtaatgtggaatggagggattgcgcaagcttaaaagtatggctggatcggccttgttttttaactggttctctagttactgccatctaatagccaacatttttcccgcttttgtaaatccgtgcagttgtttgtttcaaaggaaaatgcaataaggatatgcagaactatattccttattttaaaaaaaaaaaaaaaaaaacagaagagcaagtcattttaggct

SEQ ID NO: 4283 - DNA, 795 bp, Zea mays
  Clone ID: TF_ZmC412090_1
ttgggtacctcgaggccggccgggactctacaggaccagttggctgcatatggaggtcgaggacctcgaggatctctacacatcgacgcgtcgtacgaccaagacgacccggatgaggacgagggggagcagcagagcgaggatgaccaagagatggacatgctaggaggagcggtggcggaggaggacggggcggatgacgctcgaggatccagcgccgacgaggaagaggatgaagaagacgacgacgaggaggaggagccggagggggcgcagttggtcgcgggcgattgcggaccatccctacgagctagggtttccgagtttgcggcggttgccggcgccgccgtggagcgggcccacacgtccaactgccccgtctgtatggacccgtggacctcccaaggtccgcatcgcatcagttgtatcccatgtgggcatgtctatggcagatcttgcctagagaagtggttaaccctgcgcgggaaccaaagtgcgacgtgccctcagtgtggcaaaaggtttaaacataaggacatcatcaacctctatgcacaagaggttgctgttcctaatagtgaacttgagaaggaaatttcatacttaaggcgggaaatctgttctctgaagaagatggttgtgcaccatgataaaatgtttgaggagatgatcaagaggcagaatgatggtgttcgctcaaagagacagaaagtggctgagcactcatatgaagccgcaaatctggtggcatctaccccagcacaataagttttagcttacagacgaattaacctg

SEQ ID NO: 4284 - DNA, 607 bp, Zea mays
  Clone ID: TF_LIB3354-068-Q6-N6-B2
agcctccaattcatgaatcattttacaaacgactgaccgctttcatgatccaacatggccacgtgttcatgtacaaataaatcgcaatgcaatcagatcgagcagaacgagaatgtacagcccctgcagcaaactgttacaaggaatattcacgagaaccgacattgcaaccacctgcgcatcaccagtgacttttatgacttgactacaagacaggtagtcacaactccagttggcaaatgtggcaatactgacgagcacagctgggatgggacatgccgaaatgtgttgccatgattatttttttttttccttattgacctagacctcttctctgtggagattgctcttgacgatgttgaacttgcacaatgggcatgtagcatttatgtgaagccacttgtctatacagctgcagtgaaaatggtggttgcaagggagctcacgtagttccacgccatcttcatacgggcataggcagatacagcactcatatttggggccctagattttgcgggaccctgtacgagtgaacagctcgcacaccccttggcacaggcctgacagtactccgtattgactcaagtagcaaaaaacagagctcaac

SEQ ID NO: 4285 - DNA, 3346 bp, Zea mays
  Clone ID: TF_ZmC2201_1
gtttttcgtgcactcctatttgttagaataatggacgcactaactagtccgccttaaaatcttgacttgttagaagaaggtaggcaatccacttatatacttcaacacccccactcacgtgcagccagagagaaaagcgcaaacggggtggaggcacaaatgaagcctctgccaggatttaaacgtaagacttatgactctgataccatgtgagagcggacacattaaccagttcagcccaaaagtttaagatgctgggagaaggtaggcaattcatttatacacttcaacactattcaaagctaaaactttggatatattttatcctctcaaatctccttttactaccttgccctatgtcaactttcggcctttccatgtctcttcctattgctattgtgccttatgatcccactatgcactagtgcctttggaggtctccgttggacatttctaagccatcttaacgatgttgaacaagttttttttttcaattggtgttatccctagcttatcatgtatagcatcatcctggtctcttatcctttcttatatggccacaaatctaactcaacatacacgtttccgcatatctgagaagttctgaactcgatccgttctgtcttgtctgaaaagttccatatctgcaacttgaatccaaattaatggtaaacaaagttgatacattgattccaaatggtttacttttagatttaaaattcaactttaagtttaaaggggaaactacatctatgagaaatgagcttacaccacctctgatatttttaccaattttggattaagtaaaaagtaacctgcatatgatttcagatgtaagattgcatatttggaagtaattgagtgatttctctttcatcattctttttcctataaaaacgttttacctttctatgacctttcaaaacagtgagatcttttcaaattttgacagtgatgatttagtgtaggatataatataatgtccattatcactagtatgtacaaatgaagaaaaatgacagtagatccataaccacactgttttatttttccaggcacgtttgcaacatacttctagagtagggagtgtcatttgaattccacggcaacggtcaatttatatgatagaatatggggatatggaaataattaataaaattgtaatattctcgtaccagcttatctagctggcatgcaacctctatactatatgattttttcgaaacaaatatgccaaaattgtacacaatgggcaaaacccatgcttttctttaagcaatcaagttcggtgtcataaatcttgtagacatgtgacaagcagctgatctcaatcaatgataggctcagtagtgttctcagtgtccgcaagatcaatgtttccgatttgctcatgtgtgagcattcaactggtcagttggcaacatggaattactgcatcttggactgtgccattcaccttttgtgtaggtaccagtccttatggagctgatgttcaattctgaatgttttgggctggcttaaacctttgttatcttctggggaagaggtattatgttgagctcctgttttttgctacttgagtcaatacggagtactgtcatacacttgagttaccctgcatttttacactcttattactagtcagagtgctactctaccagactcaatttgatcatctcatttttaacgcaggccggccgggaaagcgaactcgccgccctcgaaaaaaaaaaaaatcagtgccaaaacgcaaataacgcgagggagaagaagagacagaaacagtaagggtttgactgtttggctaacgtcatggcgtcgacctctccgcgccgctcctctggcggggactcagcttccccgtccgcacccctcatcccctcgccgccgacctccccggcatccggcccctccggtggcccgctagggcggctcacgagcctccgcggcgcggcgcggttcatccgccgcacggggagccggcgcctgatgagggagccctccgtggcggtgcgggagacggccgccgagcacctcgaggagcgccagaccgactgggcctactcgaagcccgtcgtcgtgctcgacatgctctggaacctcgccttcgtcgccgtcgccgcggccgtactcgccgcatcggtgggcgagcggcccaccgtgccgctccgtgtctggatcgtaggctacgtgctccagtgcctcctccacgtactcagcgtcaccgtcgagtacaggcgtcgacgcaggaacgcggaccaggagggagcgggtgatgaggatttaaagctcagtattgtgaagcacttggagtctgcaaacacgatgttttcctttatatggtggattcttgggttctattgggtgtctgcaggtggtcaagctttatcacatgatgctcctcagctttattggctgacaattgtttttctggcgtttgatgttttctttgtggtcttctgtgttgccttggcttgtgtgattggaatcgctgtttgttgctgccttccctgcattattgctatcttatatgctgtaactgatcagcaggagggagcatctgaagatgacataaacaacctatccaaattcaaatttcagacaatgagtgatgcagacaagctagctgctggcattgcagcacctgtgggtggagtgatgacagagtgtggtaccaatcctcctgtcgaacatattctctcagctgaggatgcagagtgctgtatctgcctatgcccgtatgaagatggcgtggaactacgtgagcttccttgcaaccaccattttcactgcagctgcattgacaagtggcttcacataaatgctacatgcccattgtgcaagttcgacatcatcaagagcaaccgtgacatagaagaggtctaggtcactaaggaaaaaacgccgcaaaacttttcgtcatgtctctgctgtgttcttcagtactaccgctaccacatttgcgatcctgagttgtgattaccggtcctttaggtgatgcacaaatggtactcgtgaatattctttttattagcagttttctgcagggcctgtacattctctttctgctcgatccgattgcattgcagattgatttgtaaatgagtacatggtcacgttgaaccttgaaagcagtcaatcatttcaaaaatggtttatgaaaaaaaagaaaaaaaaagcggcccctgtgctcgcctacagggtcccgcaaaatctagggccccaaatatgagtgctgtatctgcctatgcccgtatgaagatggcgtggaactacgtgagctcccttgcaaccaccattttcactgcagctgtatagacaagtggcttcacataaatgctacatg

SEQ ID NO: 4286 - DNA, 619 bp, Zea mays
  Clone ID: TF_ZmC2201_3
gcattgcagcacctgtgggtggagtgatgacagagtgcggtaccaatcctccctgtcgaacgatggcacgatattctttcggctgaggatgcagagtgctgtatctgcctatgcccgtatgaagatggcgtggaactgcgtgagctcccttgcaaccaccattttcactgcagctgtatagacaagtggcttcacataaatgctacatgcccattgtgcaagttcaacatcgtcaagagcaatctccacagagaagaggtctaggtcaataaggaaaaaaataataatcatggcagcacatttcggcatgtcccatcccagctgtgctcgtcagtattgccacatttgccaactggagttgtgattacctgtcttgtagtcaagtcataaaagtcactggtgatacgcaggtggttgcaatgtcggttctcgtgaatattccttgtaacagtttgctgcaggggttgtacattctcgttctgctcgatctgattgcattgcgatttatttgtacatgaacacgtgaccatgttggatcatgaaagcagtcagtcatttgtaaaatgattcatgaatcggaggctagtatgcaggctgctattagccaaatcctctctat

SEQ ID NO: 4287 - DNA, 822 bp, Zea mays
  Clone ID: TF_ZmC9720_2
aattcggcacgaggcagtagtagcctggcggccatggcgatggcgcctcaggggcaggccgagcacggccaagtccacgtccacgaccatcagcttggccaccggcccgagcccaacagcaggcaccccgaccccggcgcggccgccacgagcagcatcgccaccaaccggtgggggccctactccggcgccggcgattttgccagcaacatggccgtcatcctggccgccctgctgaccgcgctggcgctcgccctggcgctcaacgccgccgtgcgctacctcctcagtcgcagccgccgagctcggcgcggtcgcgccggctccagctccggggagagggacagggacagcgacgccaacatctccgacccggagaagctggccgtggaggcgcccccgcccccgcccccgcccccgccagccctggtttactccgcggccgggaccaagctggcgggcgccgcggcggagtgtgccatctgcctggccgagttcgcagacggggacaccgtgcgcgtcatgccggtctgcggccccggcttccacgcgcgatgcatcgagctctggctcgcggggggacgccgctcctcctgcccgacgtgccgcgcaccggccggagctgccgcggccacgccatcgtcgtcgtgaataatggctcggtttggccatggccagttgcgacgatgttcactgttcttggcacaggcgcacagctagcatgtgtcggttcggtgttccttcattttcagtttgcgtgttgtagtggatcattctatatattctaaaataatgtgtcaatatatctatatactcttgttt

SEQ ID NO: 4288 - DNA, 2349 bp, Zea mays
  unsure (1)..(2349): unsure at all n locations
  Clone ID: TF_ZmC514_2
ttgggtacccctccgaggtccggcaccgggaatcgcattgctgggactcgcggngatgtgggatagtggaccggatgacaaagcaagagcagaaaaaagaactttcaccatcctccctatcaatacaagattcatctacacaaattataatatactccgtgcgaaggaaagatcaaattagagattcattcgatcaattctgattgtttccttccattccaaaccaccttcaattctgatttctgcgggtgtgggatatcgtccccccttgccattccaaatcctcctctgcaattttctcatggcagctgacgtttccatcccaactcgatccgcgtcaaccgcccgctaattcctcctagttctagtcccctctctcctgcgccgactcatctttttcctcgtgtcactcccctgctgctgctgctgccgggaagatcaaatcccgtcaaaaggctccaaaggatcagagttctgtcaagatggcatgcccaagaggaaggacaccatttcccctttgtttctttctgatgatttgcctcatggctcagctgggagcttccaatgttgtactcatggcgaacaacactaccttgtcgttggatgatgtcgaggcaacttttactccagcagtggaaggttcaggtgtaagtggcgttctttatgctgtggaacctaaggatgcatgcagtccattgagagcgaaagcgattcaaggctctgtctcaccttttgcgttgattataagaggcggttgccaatttgatgacaaaattagaaatgcacagaatgctggattcaaggctgctgtagtatataataatgaagataatgacatccttgtttcaatggctggaagctcgcttggtgtccagatatatgcagtgttcatctctaaggcatcaggggaggagctgaagaaatattcaggccaaactgatgcagagttatggataataccaacatatgagaactcagcttggccaatcatggcaatttcattcgtatcactgcttgctatgtctgctatcctagttgcatgtttctttgcgaggagacaccagatcagacgggacagggcaagacttccccgagctcaggagtcccatggaatgagcagtcaattagttaaggcaataccaagccttattttcacaaaagtgcaagaagacaactgtacatcagcaacatgcgccatttgcttggaagactacagtgttggaggcacgagaagagtgctaccttgtcgacacaagttccatgcggcttgtgtggacctatggctcacctcatggagaacattctgccctgtatgcaagcgggacgcaagtgctggaacgtcagacccccctgtatcagagtctacccctttgctttcatcatccgccacacgcttgccggaatcaactgtgttggcttccttgcggtctacagcagcagcgtctccccccaggacgatcagccggcatcctttgttgcggtcaatatcccgcaattactctgtttcaggttccagtatccttcgcacccccgactctaggtttgatgcaaactcatctatctgcacaagtggaagcaacttggaccttgcaaatgtaccatccccatggtctggcacttggcaccgtgcgtctgctcactctttgtgcaggggctacttgtccccaccgatcggcatcaggaatacctcagcacatgtctcgcgttctgccaatggatctcccagtcgttacgtaggctcatcacgcatgtcccatggatcttcagggcagcagcatcctcacctgaggcactgcacattgtcaggcccgagcctgttcaccatggtgccccagtcaccgcaacagaaccagttgcagcatggtggatactcggaaacaaatctgtcggctgccgcatcggctcaatcattccgtcagctctacctgcagcattgccctgattctgacacgtcgtctcagtcacttccagggtgctgatctcttgctgcaatattcactgattcttgcgcccatgagaaatcttgcctggtgctgaattgacatgtggattttgagctcgtcagcatagttcaccatgatgataaaaaaaagagaaagaagtttggagtagttttacatgtggaaacaaaactgcttgtaagaagagagaatgtgcagccccagagtgtgagcaattttacatgcttgagtgtacaggggtttggagtagtcttggacttgcttattttgaggcatgtattgcagtcataggttacttctgctcaatagtttatgtgttgcctctgaaaaattaaacaagcgaaaaacttttaccgatatacagctttgtaggaatcctagttgctgt

SEQ ID NO: 4289 - DNA, 573 bp, Zea mays
  Clone ID: TF_LIB5120-011-A1-PF1-G11
aacttctcacgccgcctgcccagagcctctgcatcacgccaacaacagcgccaccacgggacgcgcgccatcttcagccagcgcaaacacatggcgaggatactcgtcgaagcgcccgccggctcgggctcgccggaggactccatcaactcggacatgatcctcatcctcgccggcctgctctgcgcgctggtctgcgtcctcggcctgggtctcgtcgcccggtgcgcgtgctcgtggcgctgggccaccgagtccggccgggcgcagccgggcgccgccaaagccgcgaacaggggcgtcaagaaggaggtgctgcgctcgctcccgaccgtcacgtacgtctccgacagcggcaaggcggcggcggagggaggggccgacgagtgcgccgtctgcctcgccgagttcgagggaggccaggccgtgcgcgtgctgccgcagtgcggccacgcgttccacgccgcctgcgtcgacacgtggctgcgcgcgcactcctcctgcccgtcctgccgccgggtgctggccgtcgacctgccccccgccgagcggtgccgccgctgcggcgcgcgc

SEQ ID NO: 4290 - DNA, 964 bp, Zea mays
  unsure (1)..(964): unsure at all n locations
  Clone ID: TF_ZmC128844_1
gccggccgggctgcgaaaaaaagcactcaccgctatcttgatgattgtgtctgtctcgctctcgctgctccgttcctgttcttccgctccttctccccacctcgttttggctgatcaaagttcttgttcgcgaacactttcctctgcctgacactctgagttcttggttaacgagcctgtagacccatcggccatcaccagttcactactcgccaatcgacatgtcaggacagagctcaagctcctatggtgacactgatcctggcacagacagggcatacagcaccacctccagcagcatccggtggggtccgcacggccgcggcatgacggcctgcctcgtcgtcgtcaatgtcgtgctcgtcgccctcgtctacctctacttctggagggtgttctcccgcagaagcgccgcgtccccctcagcagctaaccccacggaccacgacgacgatgcgtcttccacatcgacgccgccgtcgccgctatcgtcccaggaccagcacggtcgcatcgtggcgtcgctgccgacgttcgtcgtgcgctccgggtccggcgctggcgccgagtgtgcggtgtgcatcgcggagctgcgggacggcgacgaagggcgcgcgctgccgcggtgcgggcaccggttccacgcggcgtgcgtcgacgcttggctgcggcggcggcacaccacatgcccgctctgccgggccagcgtcgtcgtcgccgcggaggaggtggggcccaccaagggcagtggcgtaacggacacgacgacgacgaccgtggctctcgaggatatggacgcaccggtctagtcattattactgattgattgcattagttttggtttgtgtacttgtatgggaaacgacgacgtcaggtagtagtcttgggtcaatggagtatagtaaaggaagcattatcttgnntcgatgactccaaaccagcaaactggttntgcaagcaaaaa

SEQ ID NO: 4291 - DNA, 630 bp, Zea mays
  unsure (1)..(630): unsure at all n locations
  Clone ID: TF_ZmC235641_2
ntttactcccccacccccccccacgcggcctcgattccacccagtgatccagggcatcggcatccaccaccaccaccaccgaccgtgcgtgcgcggcggtccgccaatgccattccgccgctccctcgccactagggactcgccaccgcgatgtccttcctctcctcgctctccagcctcggcctcggttactccatcgccatcgcgctcggctttctcgtcctgctcgcctccctcctgctggctttctacttctgcttcggccgcggcggggactactgggccggagaagcagccaccacggcctccagctccggccacctctccatcaccgtcccgcgcgtgctcttcgtcgcggaagggtccgagtcccccgacgccgacgccgcttactcctccgccgccgtcgcggcctgctcacccgtcgggctcgatgccgccgccatcgcgtcctaccccaaggtccctttctcctccagcggggccaccgacgccgacgccatgtgctccatctgcctcagcgagtacagggacggcgagacgctgcgcgtgatgcccgagtgcaggcacggcttccacgtcgcgtgcctcgacgcctggctgcggcggagcgcgtcgtgccccgtctgc

SEQ ID NO: 4292 - DNA, 789 bp, Zea mays
  Clone ID: TF_ZmC461818_1
agagcagtcacaagcatcggctggatggagaaattaaagcatcggtcaggagctaaagagaatcacgtagcgtagtacgggtaggcatagatagcatgttcatgttctctccaacaacagtcagcagatttgtctgtctctggctctctgcactgcaaatctatttattttccaacccaactacaactatatacatgcattcttacgtagcgcgtgcttgcttgtttccgatgaattaatggcgggcggcattgcatgcatgtatagggccggtgaagggatccaagacgtcgatcaatggatcgatatgaatgatgatggcgaaggagtactaagcatgcaagcccctccccgcagcagcaggctccggtgctgccatgggggtttcctcctgctggtcgcagcacgccgccccgcacctccggcacagcggcgatacgacggagacgatggtggcgcggcaggaggggcagctggcgtgggcggcgagccaggtatcgacgcaggccgcgtggaagccgtgggcacagcgcggcagcacacggagctggtctccctccacgaacgccgccaggcagatggcgcactcctccttgtcggcggcgtctcttctacttgcttgtttcagggaagaagagacggagacggtgggcagcgcctcgatggccgccttctccagtccgctgggcgcctgggcggacgacctgccgccgctggtggtggccgacactgaaacagaggctcctcctcctctacggcaggcgcaccgggcgacaagcgcgaggccag

SEQ ID NO: 4293 - DNA, 2605 bp, Zea mays
  Clone ID: TF_ZmC6343_1
cgccgtcccccgcaccaacccacccccaccacacgtccgcaggagacccccggccggaattcggcacgcttgttgcttggcgtccgtctgccgaaacaaaagtcgccgtcctcccccctcgtcgcttcatcacctcacctccgccgtcgcctcccctcatccctccaccggcccgtttgaccctctccctggctcgctcgttctcctcctcctccgtacccgtcctagtaggtttagcgctcaacagaaccccaatcaccaccccggcgccccccgagagcagttgccttgccgcttgctgcggttccatatggtgccccccgcgtcggcgtgagggctgcgcgcgctcgtgctgtttatcgggaggagatagatggggcccgccgtccgcagtagcgtcgtgatcagggccactgtggtagggctcgtgctggttggcatcgccctggccctgccgctggccgcggcgctgcggccgctccgggagcacgtcgcgtccatcggagccgcagcctccgctggttcgtggggcgatgagcatgccttctacaaaagggatgagaacgatataggcccatattcatggaatattactggaacatataaagggagctggacttttgctggtgccacaaatggttcgtctagatttcttgagtttgtggaatctaaaggtgattcagttttggaattgttgagcactccaacaaagataagcggggtgcattatgttcagggttcagttacattccatgatgtcattgacaatgcccacaatggtggagtggctcaaataaggttagaaggagtttacatatggccttttagacaacttcgcatggtagcaaacagtggtgcagatggtgaaccactccaggaagaggattatttcttgtcaaatccataccatttattgcggattttctcctctcaagtgtttcaagaatcttctgaagagaagaaccgaaggaagaattctctcacatatgacatggagaaacattgcaacacagaaatagctgctaaggtggttcgtgtgtcatctaacccaaatgatggagaacacgagaagtaccgtttggagggtttgatggagagtccagccgtcgatgatgatggggaatgcttctctcctatcttattgaatgcaacttctttgaatgttgaagtttattacaacaaagcagtcaactacacactgatggtcacttttatctctttccttcaagttttgctgctgattagacaaatggagcatagcaacacacaatctggagctgctaaggtttctattttaatgattggccaacaagctatcatggatgcatatctctgtctacttcacctgactgctgggatattggttgagtcactcttcaatgccttcgcaacggctgcattcttcaaatttgttgtattttctatttttgaaatgaggtaccttctcgccatatggaaagcaagtaggcctttaaacagtggagaaggttgggagataatgaggcgagagctgtctgttctttacagccgcttttatggcattctgttgggaggaatccttctaatgtatgagctgcacaatttcttacgcccacttctcctcctgatgtactccttttgggtacctcaaattgtcacaaatgtcatcagggatacaagaaaacctctgcacccacaatatattttaggcatgacagttacacggcttgctattccattgtatatatttggttgccctagtaatttcatgcgtatcgagcccgacaagaaatggtccatagctgttacagtattcatgggtatccaagcagcagtgcttctgcttcagcactatcttggttctcgctgctttattcctcgccagatactgcctgagaaatactgctaccataggaaggtagaggacagcacaaatcagcccatcgattgtgttatttgcatgactacaatcgaccttacccaaagaacaagtgaatacatggtggcaccttgcgagcatatatttcactcaggctgtttacagcgttggatggacattaagatggagtgccctacttgccggcgctccctaccaccagcttagatgaggctttgtatcatatataatagtgaacaagaagtaggtagctcagcttatacaaggtgggggaactgatgtacaataaggtgaggctgcaatcgtgtgaaagctatgaacagaactgtagaaaagttttatactattgatttcaagaggtcttgtgttgtgcaaactagcgtatcaagcatcccacgaagaaatcgtccttccccgctcatgcggttatcactgttgcatgcctttgcctgctaccagtatttcggcccagcgttttggtctgagctttgtgcaaagtttgttaacgccgtgaaagagttcgagatgtgcattcttgatttggtggacacattagtagcgtgtttggtttgaggaatgagatctctctcactcacttttttgtttggtttgtggaatgaaatgaattaatctatcaccatttcatttctcgtagactcataattagtaataatatgaggaatgggtttattccaaaaaaaaaaaaaaaaaaaaactcgagaaaagggc

SEQ ID NO: 4294 - DNA, 1303 bp, Zea mays
  Clone ID: TF_ZmC21265_1
cccaacaaaccttgagttgagagaggagagaggagacagcaagcgacacaacaccccgggctgagttgagagaggagagaggagacagcaggcgacacaacacagaggtaaccggctcacgcctgtctcggtggccgtgggcaatcatggccactgtgggacagtctggggccctgaggagggtcaccgtgcactacgccaactcgcccacaggcagcacggtggcagaggtgagctttgacgaccttgacgacgagctgctcctgtttgtgctcgccgatcttcttcctggccaggaaggtttacaccagtcgatcttggaaggaacatacaacaaccaggagaaccacatgagaggtgcagcacccagtgcaccatatggttattcacggccagaggagtaccgtgcagagagcagcactgctgcagcagcagcaactggttctaggaattcaggcatggatgaagctcagatcgcctcggacttcgagtacgccaagcagctgcagcaggagatggaggacctcagcgtcgacgaagacgacaacgatatcagctgcgtgccgtctccatctgactctgacgatgagcacgagcatcatgacgaagaggaagaggctgaggaggacggtgatggtgggtggaatcatgatgatccagacaacatgacttatgagcaaggacaggcacttgtagaatctgtggggactgagtacagaggtctatccgatgagctcatctcctacctgcagccatggaagtacaaggcagtcaaggcttcagggctcttctcccggaaaacaaaccatgaagactgcccgatctgcctgtccactttcagaaaccgggaaaccatgataacgttgccgtgcaggcatcactaccacgcagcttgtgtcaccagatggctcaaggtcaacaagacatgccctgtatgcaaatacgaactgtttggaccttcctaggatccgaccacgtcgacgatggagctgagaagataatgatgatgacgacgacaacgacagatggttgtgtcatctgctctctttttttagcgccaagaaaactggaaatgaaaaagggaaatcaatccgaaaggagaatagaaattaggaagtataggtagaatatctctcttgccagtgactgtgcgatgaattaagcatacctcgtgctatttatgatgtattggattttttttatatataagaacttccccgtggaaggattatatttttttagttttatatttgggggtgttctaaaaaaaaaaaaaaaaaaaaaaaaaaaaaaaaaaaaaaaa

SEQ ID NO: 4295 - DNA, 715 bp, Zea mays
  unsure (1)..(715): unsure at all n locations
  Clone ID: TF_ZmC21265_3
ctgattcgttgcccttttcctggtgatgcagcaagnacaggcacttgtagaatctgtggggactgagtacagaggtctatccgatgagctcatctcctacctgcagccatgngaagtacaagnggcagtcaagggcttcaggnggctcttctccccggaaaacaaaccatgaagagtaggtgtatgcctgcctcttttccttctccagtttgtactactacaagtttgctcttgtttaagaagaagagaggacagatcttcatagatggtcttttctggtttgtttggatgcagctgcccgatctgcctgtccactttcagaaaccgggaaaccatgataacgttgccgtgcaggcatcactaccacgcagcttgtgtcaccagatggctcaaggtcaacaagacatgccctgtatgcaaatacgaactgtttggaccttcctaggatccgaccacgtcgacgatggagctgagaggataatgatgatgacgacgacaacgacagatggttgtgtcatctgctctctttttttagcgccaagaaaactggaaatgaaaaagggaaatcaatccgaaaggagaatagaaattaggaagtataggtagaatatctctcttgccagtgactgtgcgatgaattaagcatacctcgtgctatttatgatgaaaaagggaaatgaaaaagggaaatcaatccgaaaggatttttttatat

SEQ ID NO: 4296 - DNA, 1748 bp, Zea mays
  Clone ID: TF_ZmC1320_3
gcggttgaactcgggctctgctgcttgtacagatgtgatatcacgggtggcacctgatggtggaaggagtcctcctgcaaatcaagtggattcattggatactttgggtctccctccaaggcctttgccttacgatgatcctcaatccagccctcgcatggtgcaacacccacttgtatcaggacacgacaaagcaccaacgcatgtccagaaactaggacagcctgcagaaactaagaatacccatactgggtcaacttgcacagctcataaggtttctgcgtcctcaccaaaacagcactcagaaggttcaagaatggatgatggagtacaattctgtgattcctctgacagtgaggatgactgtccagtatgcctggaagaatatgattatgagaatccgaagattgcactgcaatgcaaacataatttccaccttagctgcatttacgagtggatggaaaggagccaggcttgcccggtctgtgcaaagactatgttgttcaatgaggatgaatgaccccgccgatggaagtcttcccagacggcaagtggaagacccaagctaaatcctgcgtgttgtgtacatagcgctgatcgtttgctgaaacttacagcattgcgaaaatttatttttatagattttttcttgatgttaatgtccgcaggggtgcttacaataggttttcatgctgaaatctcaggttctgaaaaccacagctttcggttgaaatcaaatcaaatatacagactggcctctatttacaggacataacccatgttccatatccaatcacctagaactctattcgaaagtgaacatccacaccatcttcaccactaattatcaccacatcaaaactacgaaacacaacgggttccacagtttttctcgcaaataagcgccattaagttccatcttttgcagccatctcaaacgccctcgtgaattcatttggtggctggcccccactgagttgatatttattattgatcacaaagtgtgggaccccggagatgtccgatgagtacttcttgagctcttcctgaacctcatcgactcctttgataggatcttcaagcagttcctcggccccttctatgcccacctttcttgcagcatccagcaaaacctgcttgtcaccaatgtactttccttggcaatggtaattgaggaacaattcttcaacaagaacattttgcttgtcatagccttggtgtccagcaagtgttatgagcctatgactatccatcgtgttccctgtcaatcctgacatgtcgtattcaagcccgagtcctcgaaatatctcagtcatgcgagacatcgcaccctcatattggacaggaccgaacttcatcttgaagaagtcagatttcttgacgccctccttaggcgcgtcggggttcagaaagaatggatgccaacggacctcgaaatcaaacttgcccttgctttgctccattgctttctcaaggttctttttaccgacaaagcaccaagggcacactgtatccgagctcacatcgatctgaatgagcttcttgcgggtgtctgaagccatgaattttgcacaccctgggagtgccgagtttcgcgagggacgggatgcggacgtagagcaggcgatctggcatgcacaagcacggggagatccttcgttttcctccacagcttcgtcgatagagatttacgccatttgttcatcagcgttcttccctcgtgtaattcgtggaaggatggagaagca

SEQ ID NO: 4297 - DNA, 1955 bp, Zea mays
  Clone ID: TF_ZmC3547_2
cgaatcgcgctgcgtcccctcctccccgcctgcttcatcatggaagccgacgtccccattgccgctgctacccccaggtacggagcaagcctaagccaatagctgcacccggagacacagatttggagtattgagctggctctctgttttgtcggttgtgtgcttctacttcatagaaaagagctgcattttcttcttagtgctttggatgctggccagatgaagagtagtagatttctgttcctttgtgcaatgttctgtcttatggctcggctgggagctgccaatgtcgtgctaatggggaataatctgaccctgtccttcgatgacattgaggcgagcttttctccaggagtgaaagggtctggagtcagtggagtagtttatgcttctgaacctttgaatgcctgcagcccattaacaatcaaaacagtcaatggccctccatctccctttgcgttaattataagaggcgggtgcacatttgatgagaaagtaaaaaatgcacaggatgctggattcaaagctgcaatcgtatacgacaataaaaatagtggggtcctggtttcaatggctggaagctcaagtggcattcatatatatgccgtgttcgtttcaaaggcctcgggagaggtgttgaagaaattctcaggcaatatggatgtagaggtgtggatactacctacttttgagaactcagcctggtcgatcatggcaatctcattcgtatcgctacttgccatgtgtgctgtactgggtacgtgtttctttgtgagaaggcatcgaataaggagggagcaccctagaatcgcagaagatcgagaattccatggaatgagcagtcagttagttaaggctattccaagtcttatttttacaaaagtgcaagaagataactgcacatcttcaatgtgtgccatttgcttggcagactacaatgtcggagaaaagctaagagtgctgccttgccgtcacaagtttcatgcagcttgtgtggacttgtggctgacttcttggcgaacattctgtcctatatgcaagagagatgcaaggagtggagcatcagaagttgttgcgacagaggctacccccttgctttcttctgctgctcggttaccttcattccggtcgagtgtggcagcatcccctccaaggccaataagccggcatccttcatcgcactcggtttctcgtgcttactctgtttctagtacccccaattctcccaacccctttatatcttctcacataagctcacctggcatccgtgcaagcagaagcatcacagaccttggaaatatatcatctctccatcctcgcatctcacatttgtcatcgacgcactccctggttggcagccacttgtctccaccaatcagtataaggtattggtcgtcccatgtggcgcattcagggtatggatcacccagtccacacgtgagttcatcctacatctccaattctgggtatggttcttcaagctactgctatctgggactgggaggctccagccacagccagcatgggacatacctaaggcgctgtggagaatcggggccaagcctgtgtaccatggtgccgcagcagttgcagtgggagactaatgtagcagcaggtgcgtcgtcagcaaagtccctgcggcagtcctcctacctgagacactgtggcgattcagacgccagtttgtctgacatgacgtcagcccagtcgttgccgaggtgctgagggggctctggatttgtgatttgtgcattacacagtgaggagtgtgtgacataacattactacattggctgtggtgtggagagaaacatgcatagcaatagaacatacacatagtagcacatagtagggttttgttctcttgtttctgagatgagatgtgttcttgtgctcgcgatgcgtacatatggcaagtaacatgcatgagggaataatatttatttggttgtcgt

SEQ ID NO: 4298 - DNA, 816 bp, Zea mays
  unsure (1)..(816): unsure at all n locations
  Clone ID: TF_ZmC134339_1
cattgggaccctcgaggccggccgggctgcaccctcctctgcacagactgcactgcactatgccactcggagctgcattggcactgccactgctgcaccgctctgcctacgcacgccacgccttgaccggttccagttccgtacatggacgcgcccacggcgtcgtcgccgtcctcgtccttccccggcacgagcttcgtggtcctctccgtctccatcgtcggcatcctcgccacctcgctcctgctcctggcatactacctcgtcctcacccgctgcggcctcctcttcttctggcgcccgggcatgcacgacgacgacgacgacgtcgccgccgggccgggccaccgccgccacgtcgtcgtcaccgtgcacgacgagccaccacgccggagcggcatggaggaggcggccatccgccggatccccacgttccggtaccgccacggcagtacgcgcctcgtgctggcggcggaggccaagcaggccgcgtgcgccgtgtgcctcgccgacttccgcgacggcgagaggctccgcgtgctgccgccctgcctccacgccttccacatcgactgcatcgacgcctggctccagtccgccgccagctgcccgctctgcagggccgccgtctccgaccccgccgcccttgcccttcgctgccacanccacctcgacgtcccgcttccgcgcgccgccacggacgacgtcgccgttgatgttgttagtagtagtcctactcctacctccgcagacgccgccggggaaacagaggctgtgccttctcatgagaccgcgcaccggaacagtagctgccgc

SEQ ID NO: 4299 - DNA, 1548 bp, Zea mays
  Clone ID: TF_ZmC50086_1
ggaccctcgggccgggccggggccgaaaaccagcactagaaaatcgatgacctaaattccatagagagagcgagagaaaaaaatcccaatccatccaccctcgccgcgagatcgccgggcgccgccatgtcgactccagccgccgcctactacgccgccgccgcgcgcaagcaatacttttgctaccaatgcaaccgcaccgttctcatcgcggcctccgccgccgccgccggggagctctcgtgccccgagtgccacggcgacttcctcgaggaggtcaccgtccctgcccccaccttcatcccgctgcccttcccgttcccctttgcccccaccacgatccccgccgccagcaccaccccggcccccgccccagcagccggctccggtgggtccccttccttatcgtcctcgtcctcttccgccgcgacctccccttcccagcccaacgacatctcctccatcctcaactccttcctgggactaggcgaacaacccatcagggtcggcggctctgcctcgcgcgccgccgccggcacggccacccccgagaacgagcccgagcccttcgacccggtcatgttcttccagaattacatccatagcctcgttgagggaggcgccaacatccaggtcctcctcgacgacgccagcgtcaccctcggctccggacccggcctcgggcgtatcggcggggcaagctttggggattacttcgtcggcccaggcctcgaacaactcatcgagcagctcgccgagaacgaccccaaccgctatggcacgccgccggctgccaaatcggtcctctcctcgctccccgacgtcctcgtgactcatgccatggtcgcagctgcggagggcgctgagtgcgccgtctgcaaggaggatttctcgcctggagaggtggccaagcagatgccctgcaagcacatctaccacactgactgcattgtgccgtggcttgagcttcacaactcgtgccccatctgccgatttgagctgcctactgacgatcctgattacgaggggcggaagggcactaatcctcagccggctgttggtgtggctgctgctgcatctgggagctctactgctgctgagggacagatggaggagaggcaggagaatccaagggtggttgagaggaggttcaatgtgtcgctgccatggccattcagtggattgggagggcaaacatcgcagcaggatgggaacagtggaggcagtggtagcaactcacaaggcagtggctcgcaggatggtggcccacccagcagcaagaattgatcaaaaatcagctggaggttcaccttttggcgatctgttaagaagtctgcagtatatacgtgtcaccatgactatacacctacaggaatttacagtctctgtttgttacggaacaatcgtttgtttttcatgtagacacggcgcaaaaactgccactgcagcagaatttgcgcgctgagagagttgggacttcatgtgtagatttgttgattgatcctggtccatgaaatggtaaaccccaactccatcataaagaaaata

SEQ ID NO: 4300 - DNA, 826 bp, Zea mays
  unsure (1)..(826): unsure at all n locations
  Clone ID: TF_LIB4572-004-R1-K1-H2
ccccacccgtcccccttggtccaggcgcaggcgcgagcgcgacgtccggcgtccggcttcggcggcggagtggagcgatcccgatccccacaaggaattccatcgctgtcgtggcgtttggtggcgctcctcccggccggcaagcaggatcaggtaccctcccgtcccggatcctcccaaccgttccgtttcccgcggccgggctggcttagttctgcggcgctggttgccatttcgggccaaatttgttgcgtgaagcggaaggatttggattgaatggcacgcgttgtttccagtcgacgccctcttggcttgcctttggctgtaggaaatcgcacggaggtgaggatacacgggtgcggaacgagagctaggcgaacctgtctggtacctcgcggcggagatggacgagaaggcgacgatggagagcaagctgtcctcggcggcggccttcgtggnaggggggcgtgcaggacgcctgcgacgacgcctgcagcatctgcctcgacgccttctgcgacagcaacccctccacgatgaccaagtgcaagcatgactaccatcttcagtgcattcttgaatggtgccagagaagctcccagtgccccatgtgttggcagcatatcagcatgaaagatcctatgagccaagagctactagaggctgttgaacaagagaggaacatccgagctaatccttcacgtaatactggctgttttccaccattcaaatgctgggtgatttttgagatccctgtangtgcagatgatgcagaacttgaaagacgcattattcagcacttggctgccgcagctgcagtgcgtag

SEQ ID NO: 4301 - DNA, 741 bp, Zea mays
  unsure (1)..(741): unsure at all n locations
  Clone ID: TF_ZmC3546_7
ggcgattggttccctcgaggccggccgggacctgtcattgcttcaaggggaggcgggggagccacggcggcggagggaattgtttaatcccccgtcaccgtctcctatcgccatcaccccacccgtcccccttggtccaggcgcaggcgcgagcgcgacgtccggcgtccggcttcggcggcggagtggagcgatcccgatccccacaaggaattccatcgctgtcgtggcgtttggtggcgctcctcccggccggcaagcaggatcagtcgacgccctcttggcttgcctttggctgtaggaaatcgcacggaggtgaggatacacgggtgcggaacgagagctaggcgaacctgtctggtacctcgcggcggagatggacgagaaggcgacgatggagagcaagctgtcctcggcggcggccttcgtggaggggggcgtgcaggacgcctgcgacgacgcctgcagcatctgcctcgacgccttctgcgacagcaacccctccacgatgaccaagtgcaagcatgactaccatcttcagtgcattcttgaatggtgccagagaagctcccagtgccccatgtgttggcagcatatcagcatggaagatcctatgagccaagagctactagaggctgttgaaacagagaggaacatccgagctaatccttcacgtaatactgctggtttccaccatcaaatgctgggtgaatttgagatccctgtangtgcagatgatgc

SEQ ID NO: 4302 - DNA, 456 bp, Zea mays
  Clone ID: TF_LIB5116-055-A1-PF1-C1
gcaggcctccgcttgccgctcgccgcccgccgcccgccgatcggcctccgctcgccgctcccccgaggtttcaaccgttagcaacctcaagatggctgccaatgttggggaatcagcggcagtcggtggcagcagcagtgatgcagctggagggagcttcgagtgcaatatttgctttgagttgccacaggagccaatagtaactctctgcggtcacctattctgctggccgtgcctctacagatggctgcacatgcacgcaaacacaccagagtgccctgtgtgcaaggccattgttgaagaagacaagcttgtcccccttatggccgtggcaaggaccgcgtcgacccaaggtcaaagaacactcctggagtcgacattcctcaacgcccagctggccagaggcctgcgacagcccaacaagctgatcctaacaacaatttcggcaacgcccat

SEQ ID NO: 4303 - DNA, 2222 bp, Zea mays
  Clone ID: TF_ZmC12547_1
aggcccgcatggtatgggatccgtctctccactctcttctctaccgaacacaatctcatccgtcttcctcttccccatcagccgccctaccgagtcttcgcacgcacgacgcttcgtcaggatcgattcgcgagacctctcctgtccggatcgaggttcatggtttacatatgcgcgtttgtttactgatgcataccacgaccacctgatccggatgtcaggacagatctcctgctttaatcgagtccagttcatgtatgaactctcccttttcctggcacgttgctagatgtaaaagggtgttccgggatttaagagaaccacccacgcatccatgtctgaccagcaaaggcactacggcagctacgagctcctcccggctcacccagatttgcggtgcctggtctgcacgcggccgttcactcttgacgccgaggtcaccgacagcttggaagctttagccatatgcagggagtgcaagacgacggtgcttagtgacagcaacagggacgacactccccgagccaaccgacagagaagatggcgaaggcagcaaagctccatcaggggggtctcggtgttctcgcagctgatcaacctagctagacaacagggtcatgaggcggacactgattctccgacggttccccgccgccacacatcctatagttctacgccgagccggtcccagagggggcacacttccgacgacgagagcgatggtctgagctacgccgattccgtgtttggtgagatcgagtcgaacatcagttttggtgatgagggtggggaatctgacacttctcttgatcgccacaccatggttgggagggaaattggcatacagcttgacaatgagagctacatgaacacagatacagatattgatcctatgaatgctggagtataccagtgggactcagacgatcctgaagacgatgaagatgaggagtcagaggagtctggtttggatgaaggagatgacaccatgcaggagcgccggcagcagtggcatgatatcgccccgagtggattgaatgagcaggaatctgaaggtgctgcatggacttggagaacagttggaagccaagacataaacaggactgatctgagagtcgacatggaaggacgggaaatcaggagactttttattgggaaccccggagattatgttgatgcaagacagtttgaaatgcttctcgagcaattcgctgatgaggataacaattccagaagaggagctccacctgcagcggcatcttccatcgaaaatctttcgtctgtggtcatctccaaaggctatgagataaacggtggtgtaacctgtccagtctgcaaagatgacatgcctatcaccactgtagcaaaacagctaccatgcatgcatctctatcattcatcttgcatcttgccatggcttaattctaggaacacatgcccagtttgtcgttacgagcttcctacagatgactcggaatatgagaggtccaagcatgccgcggtcaatgaaggaggtatccatggggtggagcgtacccatccgcaggaagttgttgaagaaacttatgaacctgaggttgatggaggttccaatacaggcggtgatacaatgaatgagactaatacacatgaacagcatactgcacagcagccaaatggagcacatgggcgtcatagatggctgtttattgcagcagctccagttgtaagtcttgtcagtttagctctagttttgtgcttcaccaatcctgctggcaatgttaggaggcaattgtgccgtaggtcccagactaccactacggcacatgtagacacaagaagaagttggtggtctatgttctaagtaaccagtgtttacttgctgatgctgaatttctgtgtgatggcgtgtgcttgttgccacttgccagtgttgtgtcaattatgtatgaaaaggttctagataaatttgaagtgcaaactgtgtgtgccaaccaaggtgttcttgtaaccaagttcagacagttcagcaaaacaaatactgatgattgctgctgttcattgatattttatatgtttggttgctcaggttgtaacttcaagcatgtaactaacactctgccttaaagtttacccatgcattcatcagtaagtgcctaaaaaaaaaaaaaaaaaaaaaaaaaaaaaaaaaaaaaaaaaaaaaaaaaggaaaacaatataaaagaatacaatttgggcggccg

SEQ ID NO: 4304 - DNA, 2181 bp, Zea mays
  unsure (1)..(2181): unsure at all n locations
  Clone ID: TF_ZmC31511_1
gcggcctaatgatttcgatcctcgaaagtggccatcccctttttatatcatttgataccacaagacctgccatgttaagcaatatgtgcggtgtgcacatgagncacatcacaacgcaacagtgggttccaaatctaaatacgtagccccaccttgcaaggctgacctgtagaagcgaacaagacgcgtgagcacttcctttcaccccctcgaccccgatcgaatcgctcgaacaattcactgtgcatcgatctaggcttgcgcgaggatccaattccatccgctctcctttgaggtcgtgatcctcggagttggaggagttcttcgcgagcctctttttgccccgatttctttttggcttatttgtgcgagctttctcaggagcagaagaggcagtttgcaattccgatgcacccaggcctcaagatccaactctgaggccttctccgaggcatccgcatcgatctgcgcaagaagatgggtaacgcgggaagcaacggtggaggccccgccactggtcaccgccgtcggagctccggccacggccatcaccagcaggcgccgccgcctccccagccgcaggagactgcgcccaaccgctacgtgttcgcggccgccacgccgtacccgccccagtaccctaaccccaacccgccgcagtactacccgcagtacgggaactactacccgccgccgccaccatccgtgccggtgccccttccggcgccgtacgaccaccaccacaggccacccaccgccgcccctggcgagttcccgcccccacccaccgcccacccccacaactaccccggctgggccgggcggtatccctcctacggaccgcatctgtctatgccgacgccctacgttgagcaccagaaggccgtcactatccgcaacgacatcaaccttaagaaggagacgcttcggatcgagcctgatgaagaatgccctggccgcttcctcgtcgccttcacctttgacgccacggtcgctggcagcatgactgtttacttctttgcaaaggaagagctcaactgcaatctaacaacagtgaaagaagacctaattaagcccattactgttagcttcaaagagggtcttggtcaaaaattcaggcagccttcaggaacaggaattgacttttcagtgtttgaagaatcagatttattaaagcagggggacatggatgtatatccacttgcagttaaagctgaaacaacattatctgttgatcacccaccagaaggggatgaccaaaagatgataactcctaactcacagatcacccaggccgtgtttgaaaggaaagaaaatggggattatcaagtaagagttgtttgccagatcctctgggtcaatggaactaggtatgaactgcaagaaatatatggcatagggaactccatggaaggtgatgctgatgcaaatgatccagggaaagaatgtgttatttgcctctcagaaccaagggatactactgtcctgccatgtaggcatatgtgcatgtgcagtgagtgcgccaaggtcctgaggtaccaaaccactcggtgccccatctgcaggcagcctgtggagcgtctcctggagatcaaagtgaacaacaaatctgaagatcagcagcagacgccccaatcgccaccgctcccagacctggctccgcagcaggaaggggtgtagccgtgatcaaagtcagttctgaggtattatatggctcgaatttgcggaccttcctgaaggtttgttctctcatttgagcaacgggggatgcaactggtacttttacctttagcatatgtaagcttctggcatcgcatggctttgccgacctctgctgtatctgcctatctggaggtcggagagcaggatgtcaaggagagtgtgtatcatatatacatcatgcatgcgtgtgccatggctaccttaagaagcgtatcgaggaggattcctgatgcctggttgacttcctccagggaaaaaggggaagagaactagagaagaggtggtctcttaaatctgtacaaaaatgactatttcaccttgattccataccttctctgttatggcctgaaaaggtcgatgagtattttacttggagttataaaaaaaaagtcagtgcataggtcgcctctcggccaattatttaaaaaaaaaaaaaaaaaaagcggacgctgggtcgac

SEQ ID NO: 4305 - DNA, 1126 bp, Zea mays
  Clone ID: TF_ZmC31511_4
aatcgacatatcttttcacaattcagaggttatgttgggatgaattatcctcaataattaagcacgttactgttagcttcaaagagggtcttggtaaaaaattcaagcaatcttcaggaacatgaattgccttttcagtgtttgaggaatcagacttattaaagcagggggacatggatgtatatccacttgcagttaaagctgaaacaacattgtatgttgatcacccaccagatgtgggtgaccaaaagatcaaaactcctaactcatagatcactcaggcagccaggtcgtgtttgaaaagaaagaaaatggggattatcatgtaagagttgtttgccagatcctttgggtcgatggaactaggtatgaactgcaagaaatatatggcatagggaactccgtggaaggtgatgctgatgcaaatgatccagggaaagaatgtgttatttgcctctcagaaccaagggatactactgtcctcccatgtaggcatatgtgcatgtgcagtgagtgcgccaaggtcctgaggtaccaaaccactcggtgccccatctgcaggcagcctgttgagcgtctcctcgagatcaaagtgaacaacaaatctgaagatcagcaacagatgccccaatcgccaccgctcccagcactggatccgcagcaggaagaggtgtagccgtgatcaaagtcagttctgaaacattatatggctctcgtttgcggaccttcaggccttccctaaaggtttgttctctcatttgagcaatggggaatgtaactggtactttacctttagcgtatgtaaggttctggcatggctttgccgacctctgctgtatctgcctatctggaggtgggagaccaagatgccaagaagagtgtgtaccatatatacaccatgcatgcgtgtgccatggctaccttaagaagcgtagcgaggaggattcatcattcctggttgacttcctccaggaaaaccaggggaagagaaggttgtctcataaatttgtacaaaaaatgactatttccagggaaaccaggccttctctgttatgccatgaaaaaaaaaaaaaaagcggcctgtgcctcgatgattatttccaaaaaaaaaaaaaaaaaagcggcc

SEQ ID NO: 4306 - DNA, 502 bp, Zea mays
  Clone ID: TF_ZmC270420_1
cggttaattggtaggcacggtaatctcctcctcctctcggggtcggccccccggggggcgctatatacatgcgcacgcatcgcacatcctgcagcggcaccgacacgcgcgccgacgcaaagcaaagaaccagactacgtgcagcaaagaatccattcgccggccgaccgccatgtccgtcgcgggcgccgtgaccacagccgccgttccgtcccgagcgcccatgtcgtcggcgtccgtcgacgaggcgcgctgcgggggcggggccactgcggcagcgggggcgggtggctcgccgttgccggccccacctcacgagtgcgcggtgtgcctgtccgagctgccggctggagccgaagcggcggtaccggtacggcgacggacgctgccggcgtgcggccacgcgttccacgcggactgcatcggaaggtggctgccgctgcgccccgagtgccctctctgccgccgccccgtgctgctcgccggtggcggcggacaacgg

SEQ ID NO: 4307 - DNA, 766 bp, Zea mays
  Clone ID: TF_ZmC888799_1
gccggccgggccttcgactctcccagtgccagcacaccagcactaccgccaacgcgttacacagacggtcctctgcgttacagagctcgacaagatgagcgtcggacagctgcacacaaggaggctcctgtcgcacgccgccgccgccgcggctgcctcgtcggcgggaccaccagcgacggaggtgcaggtgcctgccgcgcacgctcacgcagcagcgcccttcagctccctgaacacgatggtgatcacggcgctgtcgctgctcctgtgcggcctggtggtcgtgctcgcggtgcacgcggtcgtccggtgcgcgttccgcgtcacgcgccgcgtgtgctacggccaggacgagccccacggcggcggcggcggcgccgatgcgttggcggtcgcagcctccttctcctgccaggccggccccaggaggaagcgcgggccgcgaaccgggctgcccccgtggatactctactcccgcgaggtcgagctcactgggtgcggcgcggcagaatgcgccatctgcctcacggagttcgtgcggggtgaccgcgtacgcgcgctgccgcactgcaaccacggcttccacgtgcggtgcatcgaccgctggctcgccgcgcggcagacgtgccccacgtgcaggcgggcgccgttcgccgctaacccctcgctctcgctgccggacagcgcggaggcgccggagtccgtgcagcttcaggcgcgcgttgaatccggggccgggcagcaccagcacgagactcaatag

SEQ ID NO: 4308 - DNA, 1486 bp, Zea mays
  unsure (1)..(1486): unsure at all n locations
  Clone ID: TF_ZmC3298_4
actcgtaaacaagcgccctcttggatccttgcaagcagaaccccgtcagtgtcacgatgttgacatgacaagtcctgctgatactggccacctcgttcatgaattccncccttcgcttttggtgtcctttagcatcttgactgctacctggcggccatcgtggaggctgcctctgtacacgggtccgaacccaccttggcctagcttctcggtgaaggatcttgtcattcttttcacatctgcgtaggtgtatctttttggatgcaggttcccgttcttctgtagaaaggactcgatccttggttcgtccttcgatttgaatggcagcccggccggtttagaggaattggaattcactcaataaagtaacttatttagtttggaatttgacatcccacctttttccatagctcagatataagtcaatctcaaattcatagggtggaggatgagaaatgattttatgcattagtagaatttgtttctactttgtaacttacataacactcttcgtctcactcctctatagtaaaaatgtagcacataaatatttccgacatcttgctaataatagtatacaaatatattttgcataaaaccgaattagcctgattgatatatgccaaaattgttattattagaatggaattcaattccaatgatccaaacggcgcgtgatgggaaagtgaattaatatagaaacagaccatatcaccatactgaaataatcttagttgttgaagcatattgagatggcacacggtgcttaaagttgaacctagctggttatgtgaacttaaaaaaagtataaacattgggtaacacaatatactagtatacaaaaatatgtgagcatacacacacttgagcttagctctttaacttatttttaaatctttttcttattaaataaaatattttatgacctagctcttcaaacactgttggagctacgacagctacccttggcaaaacttcgtgttctgttttctcccttcaatgcaaggcagagctctttaaaaaaagttctaatgtgatgtgccctgatgaggcaacggtggcaacgctgcaagatttcttactcttttgtttacagtttcacgtaaactgcatcgacccatggctgcgccaacagggtacatgcccaatctgcaagcaccaggtgagcgatgggtggcatgctacaggcaacggtgaagaggatgcttcttacatggtgtgagtagctgactaggagctgactaggagtaggccatagctaactactagtagctgctaactgaatccgtggaacatagttttcgaggtgacgggttggactgatctagggatgtgatctaatccctttctatcctaacaaaaccgcgtgtggaaacagttgtccagtacggttcttttacaggtaacgctcatttcaaacattctctggaatggaaggcataacaaggttgatgataatctacaaaaaaaaaaaaaaaaagcggcc

SEQ ID NO: 4309 - DNA, 1119 bp, Zea mays
  unsure (1)..(1119): unsure at all n locations
  Clone ID: TF_ZmC3219_3
ccgcctccgccggatgcgcgggtggcgccactcccccggaggactcgaggaagagataaggatgtttcagacaagagtgttactgggaggaatgaacatgtatgaccgctaccaggattggcgccttgacgttgataacatgacatacgaggagttgctcgagcttggagacaaaattggatatgtcaacacagggttacgtgacgacgagattactcgcaaccttcggaaggtcaagcacccatccttcagttccttacggttcgcaacagaaatggaaagaaaatgcagcatttgccaagaagaatttgaaacaaatgaagagatgggaaggctagactgtggccatagctaccatgtgtactgcatcaagcagtggctctcgcagaagaacatttgccgagctctacccgaaccacagaggccgtgcatgtcccggaggcgaccgtgcaggagcagatatcctcgcccttcatggactcgccgccgccgcacctcgacgcccccttcttcggggccgatctgatcccctccggccgcctccgtcggatgcgcgggtaccgtactcccccggaggcctcgaggaagagataatgatgttttagacaagagttttactgggaggaatgaacatgtacgatcgctaccaggattggcgccttgatgtagataacatgacatacgaggagttggtcgagcttggagacagaattggatacgtcaacacagggctacgtgaggacgagattgctcgcagccttaggaaggccaagcacccatccttcggttccttgcgattcgcagcagaagtggaaaggaatgcactatttgccaagaagaattcagtcaaatgaagagatgggaangctagtctgtggccatagctaccatgtgttgtgcatcaagcatgggctctctcanaagaacactgcccggtttgccaaactgccgtcaccagaaattgaaatgcaaactccaaggcacgctggtctgcatncctaagggggaaatccatgtgnaaattggccaattaggttgtcnggtanagnccgtcatttttatttaggggggttgggggtnaattttttcncgtttggaagatacgcataatctaaaacg

SEQ ID NO: 4310 - DNA, 1668 bp, Zea mays
  unsure (1)..(1668): unsure at all n locations
  Clone ID: TF_ZmC11494_1
gggtacctcgaggccggccnnnnnnnantttccaaaaaaaaaaaaaaaaaaaaaaaaaaaaaaaaaaaaaaaaaaaaaaaaaaaaaaaaaaaaaaaaaaaaaccggacccacgcccgcgcggacgcgtggacaccaatacactacaccataccagaaggagcaaaaataagacgagatggcggacgagcgcttgcctcaaacggccggcgcccgcacggctctcgccagagctactggatcctcggcacggaaacgcgcccgcgatagttaggtgcgcctgtgggcccggccggctcgtcacttacataggcgcacgcacccccgcctggtgcgtcgtcgatcgctgctttgctggcgcgcggcggccctgtgtggcacagtagaggtctgctgaggacgacgaccggaggcgtgctgcgtggatggtcctcatggccgggatgctccccggcgtggagtgcgcgcggcggcggcgggtccggcagggcggggcggggatgggagcggaggcggccggaggaggcacggggcggcggtcctccttctgcctgtacgcggccggccacggcggcgccggtaattctggcaagcggagcggcggcgtggtgcacgggcacgggtggacgctggacagcaatgcccgggaggccaaggagcggctggaccagaagctcaggaccaagagggaggccgccatcaagaggcaccacagcacggggagcataaagctgggcgtgccgcaccggagcgccggcgcggacgagcgcggcgagagctccgcgccggcgatggccggcgtgcagcgcgaggtgtactcgaagaagggcgtgatgcggcggctgatgcggtggagccggccgcggtgggccgcggcggagcaggcggagtgcgcggtgtgcctggacgagttccgcgcgggcgacgtgctggcgcacctgcgctgcggccaccgcttccactgggcctgcgcgctgccctggctcgagggcacctcgcggtgccccttctgccgcgccgccgtggacgccggcgccgccgccgccgccgacggcgcctagaagcggccgaggctctggtcttgctggggcttgccctgggctgggacggcgcggggcgccttgtcgctgtcggcccacgccagccacgccacccccatggcgttgccacgctaggcagtggctagtgggggtggtcatggtgagtggtgaccggcctgcttgtgcatgtggcgcggagcggaggaggacagcgagacgcgcacgacgaacccgtgagtgccttggcagtttttgcacgctttgcgcgcgcaaaggcacggttggtgcacatttgttggttgggccgtttggcccccctttgccgtgtcctcctcccatcatcgcgagcaagtgatgaacggttttgttttcgtgtttggggagcgctttgtttatggactctggtattagcggatagcggttccatcatgtaattcatgtcaaaaaaaaaagatcgtctgatcgatcttggagaaagaactgtaatttagatcaacatcaatcacatctgtgtacagtctcagtgttgttgctctgaacttgtataattttctgtttgctcagttgaaggtaaatgcagttggaggtgaggtctctttagaacgctaaaaaaaaaaaaaaaaagcggcc

SEQ ID NO: 4311 - DNA, 1107 bp, Zea mays
  Clone ID: TF_ZmC11494_2
ccccgcgtccgcccacgcgtccgcggacgcgtggggccgccatcaagaggtagacgcagacctgccacccgacacacacatccatattattcatccatcctccacgggctttgcttgtgttccgtgccagtctgaacaacactagctagctaggtcgtcgttcctaaagatctgaccttgcagcaggcaccacagcacggggagcataaagctgggcgtgccgcaccggagcgccggcgcggacgagcgcggcgagagctccgcgccggcgatggccggcgtgcagcgggaggtgtactcgaagaagggcgtgatgcggcggctgatgcggtggagccggccgcggtgggccgcggcggagcaggcggagtgcgcggtgtgcctggacgagttccgcgcgggcgacgtgctggcgcacctgcgctgcggccaccgcttccactgggcctgcgcgctgccctggctcgagggcacctcacggtgccccttctgccgcgccgccgtggacgccggcgccgccgccgacggcgcctagaagcggccgaggctctggtcttgctggggcttgcccgtgggacggcgcggggcgccttgtcgctgtcggcccacgccagccacgccacccccatggcgttgccacgctaggcagtggctagtgggggtggtcatggtgagtggtgaccggccttgtgtggcgcggagcggaggaggacagcgagacgcgcacgacgaacccgtgagtgccttggcagtttttgcacgctttgcgcgcgcaaaggcacacggttggtgcacatttgttggttgggccgtttgccccccctttgccgtgtcctcctcccatcatcgcgagtaactgatgaacggttttgttttcgtgtctggggagcgctttgtttatggactctggtgttagcggatagcggttccatcatgtaattcatgtcaaaaaaaaaaggtcgtctgatcgatcttggagaaagaactgtaatttagatcaagaccaatccacatctgtgtacagtctcagtgttgttgctctgaacttgtatatttttctgtttgctcagttgaaggtaaatgcagttggaggtgaggtctctttag

SEQ ID NO: 4312 - DNA, 1726 bp, Zea mays
  Clone ID: TF_ZmC1250_1
cattgggtccctcgaggccggccgggagtctactgcttgggaagggaaaacgggggtgcatttgttgggatttttccaactcaattccatccgatccaagagcaagtttcaccggattgattccccaccgcacccgaccacaaatcccaccaagcaaaccctaatccgtcggccatgtcgtcctcccccgcggcgctgcgcttctactgccaccagtgcgaccgcaccgtctccctcgcccctcccgcatccccggacgccgacgtcttctgcccccgctgcggcggcggattcgtcgaggagcttcctcccaaccctagccccgcgcctccggccgccgccttctttgccccgccctccttcgacatccgccaccccagcgacctctccgctttcttcggccccgcctcccccgagccgctcgccccaggcctcttcgatccctccaacttccttcacgaccacttcggcggcctcctctccggcggcgccaccatccagatcgtcctcgagggtgggcccccgcccccaggcctcaactttgccgactacttcgtcggctcctccggcctcgagcagctcatccagcagctcgccgagaacgaccccaaccgctacggcaccccgcccgccgccaaggccgccgtcgcctcgctccctgacgtcgctgtctcggccgacatgatgcaggccgacggcggcgctcagtgtgccgtctgcatggacgacttccacctcggcgccgccgccaagcagctcccctgcaagcacgtcttccacaaggactgcatcgtcccatggctcgacctccacagctcctgcccggtctgccgcttcgagctgcccaccgacgaccctgactacaatcacacccatcagcagcacggtgattcgtctgcccctgctcccccttcccccgctcccgcggtctcctcccccagggtggccgagaggaggtttaggatttcgctgccctggcctctcagggccgcttttggcgctgctcaggcagagagcagcaatcccaccgatgatgacgtgcctccgtctggcagcgatgcagctggtggccctcagtctcagactggatatgatgatctcgactgaggcctcaatagccgttcttggaaacaaataggtatgaacaacaaattgcagttattactactagggttcatcgcttgctgttatctgtttggcgtcacctacctatagttcaggaatcaggtagcaccatgcatttactatcgcatttgattacggttactgtattgactgccaaagaaaaagaaaaaggctctattgtgccatcattgttctacaaaagcgtattacaagagtgaatgaccatccttgttctatgtttacctgatattaacatggtatgcacttggcgtggatgataaccaagattcatctagggcaatcaatgggatgtaacttgcatgttgtaactgcgactctataccccaaaaatgaaagatgatcccgtcgtggaccaaattaataaatgtgcatcaaaagtatggagtcctttaggaacctctgctgactgttgatggaaaatggttggtttgttgaccctgtcagtgcattgtttttgaagggatatgggcctgttaatttaaaatttgtattccctaatggttgggggaggaacggtggagaaactgagtcatgtaaagttgttccttttgcaattgctgcatggtttttttcctgttcc

SEQ ID NO: 4313 - DNA, 412 bp, Zea mays
  unsure (1)..(412): unsure at all n locations
  Clone ID: TF_uC-zmroteosinte115a04a1
ccnntaaattataattncaggngcacaagcatccggtgggcgcttaaagggggaatgggaaaatacacaancacaggacacanaccatgaaacgcacagcagcctcaggctggcggacacccacccagaaccgcatcagggccgaacagctagcacgcgcagccagcaggaacacacacacacacacacacgaaacatatgcacagggaggagcgccccagctggcccagctacaactggctctaaaagaccacaaaagctggaagaagaggcttgcggaaccgacaccgaacgaccggaggtctgcaggcctaaccagtgcccggcacagcgggcaagaccgcccccataggaaccattcggacacacaatcttcacaaaagacatgtttgcagcacaaaaggatgggaac

SEQ ID NO: 4314 - DNA, 2087 bp, Zea mays
  Clone ID: TF_ZmC3083_1
aaagccaagcccacaaggcagccagagcgcggggtagcgtttacaccttgacacctaaggccagagattggagagagaaagaagcagctgagtggagcaagaaagaagaggtcatggcggtgtagtctatcagctgagtgggaaagagtggagcaatggtggggggctgtgccagcggcgacggcgccgccgaagggacgctcgcgaggtggcggagggcggcggccaagcggatcggcctctcatgcgcctccttcttctcctacgccgcctctccctccccgcctccttccaagaccatctcccactccgcactgaatgcgcctgatggagagcagcaaaagatggaggaacccaccagcaccagagtggctgacaagaatctatgtgcaatatgtttggaactcctcagcacgagcatcagcagcgatgttgatagtggtgaggcggcagcaatctacacagcgcagtgctcccactcattccacttcctatgcatcgcctccaacatccggcatggcaacgtcagctgccctatctgccgtgcacaatggtctgagctaccacgtgacctgaaggttccaccattgctgcacaaccagtcagacccaatccttcgcatcctggacgacaacattgcgtcatcccgtgtgaaccgaaggtcctccatccgtgctgctcgctacaacgatgatgacccggtagagcctttcaccttggctgagcatgtggatccatgtctccgcttcgtcctcatcccggcaccggtgtcagctcaccatcacgtcctcgggcattacccctgtggacgcatgttgccactgcaacagcaatgccagtacagcggctcctccatgctttcaccaccgcagattgcttcaccaagtggtcaaaggcgagcctacctctctgtcagtcttgctccacagccagccatggacctggtcctggttgccagccctaacggaccacatctgaggctcttgaagcaggcaatggcgcttgttgtcttctccatgagggcaattgaccggttagccatcgtcacgaatgccaccactgcaacccgtgctttccccttgcgccggatgacgtcccatgcaaaaagaatggcgctgcaggttatcgaacacctttgctgtgttggtgggactgatccagtaggggctctacacaagggcctcaagatattggaggaccgggcgcatcggaacccgagcaactgcatccttcacttgtctgatcatccagtccgcaactgtgttggtggtgtggacatgaaccactccagcatcccagtccaccagttccatgtcgggctcgggttcggggtgcggagtggatttatcatgcatgagtttgaggagctcctcgcgcggttgcttggcggcgtgataggcgacacccagctgaggataggggagcatggcggaatggtcaggcttggagagctgaggggtggtgaggagcggaggataccgctcgaccttgcggcagattgtggcttcatactcgttggttacagttacctggagggtggaagagaggagcagttgaggacaggtgagatcgccgtcgggttcgaagagaaaggtgacaacgggtactgtggaatgagagagatggggctgagcattggcggcgagaggaggagctgctgcgccgagaggcgggactaccatgacccgttcatggcacggcgatgggcgaagcatttcaacgtgtacagggcctgagtagaagagcttgatcgtcagctgctgcgaaatatgagtcttgttggtttcttttctctctttttttccccattcctgcaagcatctaggtttggtgtctgctttttggcttcttttgttgtggatctgaatccctgtaagatctctctctctttctctttttgcatgaaatgtgtgggttctgtctgacaaaatctgcttgtgttgtgtgaatctgaacgtgaacagatcatactggagaaaaaaaagcagcaaaactagaaatattatttgattgagcttgcaaatttggaagccagggagttaaagaattattctttcgaagttgtaatgctaaaaaaaaaaaaaaaa

SEQ ID NO: 4315 - DNA, 1039 bp, Zea mays
  Clone ID: TF_ZmC24905_2
cggccgggagtgatgatctcctcatcacatctatctccatcacaagaagaaggtgtggacaggaagacgacacaagattcaggcgacactcccaccattgctgctgacggcgtccaaattgtcttctttctcccccctaccttggctggctggctctctagatcgacattcgggtcatccgctcccctggggaaggccatgagccactacaccatgcatgcagccatcaactacgccgcgctgccacccacgtcgccgctgcaactccccctcccgtacctccctccgcctcctcctccgccgttaccgctaccgccgctgttgtcgccgccgccaccggcggcggcgtcctctgacgcgggattccagagcaggatcagccccagcgtccttctcatcatcctgatcttggccgtcatcttcttcgtctccggcctgctgcaccttctcgtccggttcctgctccgcccggcgccgcgggatcccggcgacgcgtacgggggtgacgcgaacgctaccgccttccagggtcagctccagcagctgttccacctccacgacgccggcgtcgaccagtccttcatcgacgcgctgccggtgttcctctacggcgccgtggtcggcgccggcgggaaggatcctttcgactgcgcggtctgcctctgcgagttcgcggacgacgaccgcctccgcctcctccccaagtgcagccacgcgttccacgtcgactgcatcgacacgtggctgctgtcgcactccacctgcccgctctgccgccgcagcctcctcgccgacttccccacctgcggcggcgcctgcagcccgctggtgttcgtcctcgagtccggctccgagggctcggtctccgatcgccacgacgcggcgtcctccgcgcgcctcagctttggcatggagcaggagcaggcagggcaggatcggaaacacgtcgccgctgcagaggcagcggagaagaatgacgaggtggtcgttccggtgaagctcggcaaggttcgaaagccaggccacccgaaggagccgg

SEQ ID NO: 4316 - DNA, 864 bp, Zea mays
  Clone ID: TF_ZmC538896_1
ccggccgggaaaaagggacggtcacggtggcccagagccccagactgctgcgcctcaccaaccaacgagagagcacgaagcacctagcagcccggccttgtcgttctacggtcccaccggcgccgcggcggaggagatggaagcttatgcccccgccggcagctaccggccggtgtgcgacacggtggtgttcgtctgcctcgcgtccgcctccgccctcatcgtcttcatggtggccgtctgcttccgcaacgccttcgccgccaacgggtacgcgaccgctgccgtggccacgaacggtgccgccagagccaccgctgccaacggcagaagccggtgcgggctggcgccgtccgcgctgtcggcgatccctatgctcgcttaccagaggggcgccgggtgggcgcagtgcgcgatctgcctcgccttggtgcgggacggggagacggtgcggttgctgccggcgtgcggccacctattccacgtcgagtgcatcgacctgtggctgcgctctcacgcaacatgcccgctttgccggcgtggcgtcgtcgaggctcccgtcgaaaaggtttgagagctcgccgctcttggccccaaaaaaaaaaaaagccaagatcacacgctggctgctatactagctagttcagcagacgctcactagttaagcttgttccctgccgtgatgttggatatcttataccaagggttgtagatgctagggcttaggcgtagtttatatatttctggtctctggaatcgaaactttttttttgctagggaaaagtcatatttttatgatgcactatgttttgtgttttctataattaatcttcaatcatgaaaaaaaaaaaaaaaaaagcggcc

SEQ ID NO: 4317 - DNA, 621 bp, Zea mays
  Clone ID: TF_LIB3689-243-Q1-N6-A10
aaggaaacggaaggcaacaatccaatatcaacaaactcgcaatagcgtgtgatcaatttcaatgcgaattttccatacaatacaggagcatcctgtgcaatagttttgtaggttctatcggaattagaaccatggaaagagctccacttttctctgtaggaagctgcattctcaagagacagaatcagctgacctttccaatcagtgcatcagatctgcagacatcgccacgacaaagtggacaaaccctgtgaatctcctttagccatttatctacacatgttagatgaaattcatgatggcatggaagtatacgaagacaatctccctcttcatattcaacaaggcaaatatagcattgtgcagcttcctcactgtggtatttcaatggtctcctatacacttttgcaggaagacgctcaacaatctcccttggagcaggaacagatccaattgaagaaaacgctgatcttgatgacgataacgcagcagattggtggtgaatttcatccagaacctcaaatagtgcttctgctaacataacaattcttgatatgctagcccttgtgctagtttcttcatcaggattgccttgtcgactacctgttctgcagttgcaag

SEQ ID NO: 4318 - DNA, 1878 bp, Zea mays
  Clone ID: TF_ZmC4557_1
ccaccgcgccggagggaaaagttgtccggtcggggccgatcgggagcgggaaggggaggagggggaggagcatgttgcaactgcagaactcctagtcgatacggcaatcctcgtggccatgctaacacaagggctagcatatcaagaattgttatgttagcagaagcactatttgagcttctggatgaaattcaccaccaatctgcttcgttattgtcatcaagatcagcgttttctccaattggatctgctcctgctccaaaggacattgttgagcgtcttcctgcaaaagtgtataggagaccattctaataccacatggaggaagcagaacaatgccggattatcaattgccaaatccttctgggaagattggcccacgatatggtgacaactttggctatttcatctaacatgtgtagataaatggttaaaggagattcacagggtttgtccactttgtcgtggcgatgtctgcagatctgatgcgctgattggaaaggtcagctgattctgtctcttgagaatgcagctttctacagagaaaagtggagctcttttcaactttctaattccgatacaacctacaaaactattgcacaggatgctcctgtattgtatggagaaatctgatagaatctgaagatgctagcttcaggagctcctacagaaggatggggtctcatgaaccttttgaaggcagtgtccggtttagccgaacattaagtgttgggcggcttcgggacagagttctcaggcggcctccattctcagatgggctattcaccccttcacttctttatgatagggcagtatggccgtctggaaatgctagtgctaggcaagattcagcagtaatgcaaaggactaattcagacaggagttcagaaccacggtctgatccttcaaccagcgatatgtacaactcgagctctgagaggcaggctagcaacggcgatctactggagcgcagatcagcttttcttgagaggaggaggataagatctcaggtcagagctctacaaaggttgggcagcaggtttgaaaatttatctggtcatgagagatcctgcatactatctggtcagcatagaacaggaaattgcaactgcagaacaggtagtcgacaaggcaatcctgatgaagaaactagcacaagggctagcatatcgagaattgttatgttagcagaagcactttttgaggttctggatgaaattcaccaccaatctgccgcattatcgtcatcaagaccatcattttcttcaattggatccgttcctgctccaagggagattgttgagcgtcttccttcaaaagtgtataggaaaccattgaaataccagagcgaggaagcagcacaatgctatatttgccttgttgaatatgaagagggagattgcctccgtatacttccatgccatcatgaattccatctaacatgtgtagacaaatggctaaaggagattcacagggtttgcccactttgtcgtggcgatgtttgcagatctgatgcacccattggaaagaccagctgattctgtctcttgagaatggagcttcttacagaaaattggagagcttggcatggttctcatccaattccgatagaaccgccaaacttctgcagctgttattttcatttcctcctctcttatggtcagtacagcatcgcagtcatcctattatgaaactgatgacgacatgccatggtgaatttaggattcttgtgtggtggggcgagtttgttgataatggattattggcttccgtttgggcgattgatgtcgggtgcagccattctggccaactttggttccacgtgtttcctactatttgaacaggggactaaaatcttcaaagttaccgtccttttct

SEQ ID NO: 4319 - DNA, 721 bp, Zea mays
  Clone ID: TF_ZmC4557_3
ttcccacgagggtttgaaaatttatctggtcatgagaggtcctgcatactatctggtcagcatagaacaggaacttgcaactgcagaacaggtagtcgacaaggcaatcctgatgaagaaactagcacaagggctagcatatcaagaattggtatgttagcagaagcactatttgaggttctggatgaaattcaccaccaatctgctgcgttatcgtcatcaagaccagcgttttcttcaattggatctggtcctgctccaagggagattggtgagcgtcttcctgcaaaagtgtataggagaccattgaaataccacagtgaggaagctgcacaatgctatatttgccttgttgaatatgaagagggagattgtcttcgtatacttccatgccatcatgaatttcatctaacatgtgtagataaatggttaaaggagattcacagggtttgtccactttgtcgtggcgatgtctgcagatctgatgcactgattggaaaggtcagctgattctgtctcttgagaatgcagcttcctacagagaaaagtggagctctttccatggttctaattccgatacaacctacaaaactattgcacaggatgctcctgtattgtatggaaaattcgcattgaaactggtcacacgctattgtgaatttaagactcttgtatggtggggcgagtttgttgatattggattgttgccctccgtttcctt

SEQ ID NO: 4320 - DNA, 1722 bp, Zea mays
  Clone ID: TF_ZmC28375_1
gccgcgccggcgtcggggacgtctggctctggctgcttcgactgcaacatctgcctcgagtgcgccacggagccggtggtcacgctctgcggccacctctactgctggccctgcatctacgagtggctacgccacgacgtcgccgaagccggcgccaggagctcggcgaggcggcagtgccccgtgtgcaaggccgcggtgtccccggacgctctcgtgccgctctacggccgcggcgggagctccagcgccaagaagccgctggccagcatcccgcgcccgcgccggccggccctgcgacagagcacgcatgacagcggcagcggtggccaccaccaccaccatcggcacgcagagaccggcacgccagcccggtcgctgcggcacccagcccacgcccacgccgcgcagttcgacgccctcctctccgcgccgttcggggaccgcgggatgctgcactcgacgtcgacgaccggcgggatgctcggagggatggcggtggccgtcctcccgttggtgctccgcgggcaggcgcgggtgccgggcatgtactacccgagcccgtatcatctgatgagccccaggcagagacggtggcatgtggaggtagagagatccctgcatcagatatggttcttcctctgcgtgttcgtggtgctttgcttgctcttgttctgatttctgaagcaggacaccatcctgcgcctgcgggccacgagacgtgctctgtacatagcaaagggtgcgcgatatggatatggtgcggcagtgacctatatttggtgattgcatgacgggcgttcaagatgttaaattgagaaccagctgagttctggtcctagaaaggagaaatcggtttcgaaactgcaaaggacccttgagaagattatcagaagccatcgtccacatgttcatgcgcagacagtaacacataagctactggtaatatagagcgtcagaaaaaaaatgcttcagtatctaaatgtcacgctaccattttgagcgctttgatgacctgtgcagctgtgctccctccatctcggtctcggtggtcaccagcaatgcagcatttaactctaaaagtctgcaatgtgtgcgaaaaaggaatgccactcgtggcagcttacatagctccctttgccaaaagaacaacagcaccttgattcaaaacgtcacttaagattgtgttaagatctatgatcatcttctgtcaactctgctgattttgcagctgattaatccggctgaggaatgaggatgttgccggagcgcgtctcaaaatcacgaatctggatgagagcacttcacgacaggacctgctaccaccgacgtgagtgtgatttgccattgatatacagcctgatcagttgcaactccacttagtactatgatgacgagtaacagagcgtctgtgaaagggagcacggccggctacaacagcagctgaagtagcgcataagtcacaagttacagtccactacaactgatcattcgagctttgcttcttttttttttgtaacggcaacagtcgttgatgactaacataacgaacaatacatgattattatatcctgcgcctgcgggcacgagacgtgctctgtacatagcaaagggtgagatatggatatggtgctggtgcggcagtgacctatatttggtgattgcatgacggggcgttcaagatgttaaattgagaagcagctgagttgtggttctagaaag

SEQ ID NO: 4321 - DNA, 2559 bp, Zea mays
  Clone ID: TF_ZmC3609_1
cgcacgcacgcacgaccacgaccagttgccacggcagaccaccccgcccagcggccagcttgctcgccacgaccacgatgggcttccccgtggggtactcggagtcggagatgctgctcccgcgcgtgctgctgcaggtgctcctcctcctcggccacttccaccgcttcctcctctgggccttccacgccgtggggctcggcgacctgatcgacctcggctgcaactacccgccgccgccgccctccgcgtccacggcgcacgagatgatggagcaccagcaccagcaccaggggcgcgacgacgtggcctccccgctgcagcaccagcgcccggagttcaggcccgtcgcggcggcgctcatcgaggaggcgctccccgtggtgcggttcgacgagctgggcggcgcgccgtgcggcggcggcgactgcgcggtgtgcctgagcggcatcggcggcggcgacgaggtgcggcggctcggcaactgccgccacgccttccaccgggcctgcctggaccgctggatggcgcacgaccagcgcacctgcccgctctgccgcgcgccgctcatcccctgggccgccgacgccgactacgacatgtcctatccgtctcccctgccgcccacgccactgcggcggcctcacgagctgctgctgctgcttaccggcctgggcggcttccagtgatgcgcctgcgcgtgggcagcgtggctggcacttgggcaggccggccggaacgggccgtgtgtgtttccttctccgtcagccgcgccgccgcccgcctccccaactgtcaggcgccgcgatggaggctctccacgaggagatgcccttcgacctcgacttccacccgtcgtctccgctcgtcgtcacctccatcatcaccggagagctctgcctgttccgctacggcccggagtcgcagcctgagaggttacttttgttaaaagcccacaaggagtcatgcagagctgttcgttttgtggactcaggaaaagtgattttgtcagggtcagctgattgctcagttcttgcctcagatgtagaatcgggcaaggccattgcccgcttggaggatgcacatgagaatgccataaaccgccttgtctgtcttactgaatctacaattgccacaggtgatgatgaaggctgcattaaggtatgggatacccgggagcgatcttgctgcaacagttttgaagtccacgatgattacatttcagatatgacctatgtggctgagacaaatcagatactggccacaagtggggatggaactttgtctgtgaacaacctgcggaggaataaagtaaggtcacgatctgaattttcagaagatgagttgctatccttggtgttaatgaagcatggtaaaaaggttgtgtgtggaactccaagtggagcactcttattatattcatggggatactttaatgattgcagtgaccgctttatcggacacacgcagtctgtggatacaatgctgaagctggatgaagacactttggtttctggatcatcagatggtgtgatcagattggtgggcatcctacctaataggataaaacagccacttgctgaacattcagaataccccattgaggcccttgctttgtcaaacgacaagaaatatttaggcagcatctcacatgataaaatgctgaagctctgggacttggaagaactcttgagtggcccacaggtagccaatggtgatgaacctgctgaagctggtagtgatgacagcgatgacgatagcgatgatgatgtgatggatgtagacatggcggcaacctcttctaaaggttcaaggagtaaaaaggcaggtaaaggacagagttcgagtcggccggcatcggatttctttgcagatctatagtcgtcaagtttcctaagttagaagctgtgtactctcctctctggttttttttgggttactgtacgcgagtgcgtgtgcgagtgggcaactttgaccgccggtgcaaggcatgccaaatgttgttttatttataagtatattgctgatggcatttatcagaagtagaagcagtaagtgttgtggacatggtgctaatggtttggaatttggaaagcggaaaccaaaccttatccacgcgaatccgatccgtggcgaggcaaaccgcgtgctcatgtgcggcccagcacgcccggtcggtcaggcgggtgaccgccgccaaacctgctcagttgccagccgtacacgcttgccggcctcgtcttcggtcgtgtctccgactccgttggtttttttacagaggctcccagtcccaggtcaaacaaaaaaggaggcgaaacagacaaagcagtcggaaattaggcaggtactgtactaggttgatctgtaggccgattgggcgactccaaatctgtggagctgtgaatcctttggcagattaaactaaaaattgtctctatagatcagaccatcaaaaaaaaagccacgcggccgcggacgcgtggggccattccgcatcgatcgatcgatcactcactcgctcagtcactcgaaaaaaaaaaacccccccccccacccaac

SEQ ID NO: 4322 - DNA, 825 bp, Zea mays
  Clone ID: TF_ZmC36740_2
gcagaatatgggataacactacacctgtaaacaatgtcgattctgccaatgttgtcctgcagggtggtgaagctccccgcacaacggcaaatactattaacaaggaatgcatccaacaggtacaccaaagtccaggtagtcctcaggtaattcggcacgaggcaacattgaccctgacaatatgacatatgaggaactcttggatttgggtgaggcagttggaacccagagccgtggtctctcccaagaatgcatttcattgcttcccatcactaagtataagtgtggattcttttcaaggaagaaaacacgccgtgaaaggtgtgtgatttgccaaatggagtacaggagaggaaatttgcagattacgcttccatgcaagcatgtataccatgccagctgcgtgacaagatggcttagcataaacaaggtatgccctgtttgctttgctgaagttcctggcgaggattctcagaggcaatgattcatcagttgtgatgccactatgaagttgctgctctgggtactgcgcccccaatggacgcatgatttctttgaaggcagcttgttgtccccactttagaattgtgtattagcgccatattaccaaataggttattacttatcagatgtatttaggtagtgtttggtttcggaatatggtaggatggagtcactttgctcctaatttattgttgtttgaattgattttatgtaggacatagtaactctaaaattggaaaaactatgcttaaatactgaatcatctgactccccaaaaaaaaaaaaaaaaaaaaaaaaaaaaaaaaaaaacacccaacaaac

SEQ ID NO: 4323 - DNA, 801 bp, Zea mays
  unsure (1)..(801): unsure at all n locations
  Clone ID: TF_ZmC348_2
ccgggtcgccgccggggaagagacgatccacgcgcggnaccggtctactaatctattctctatctctagcagtggtaccatttggcggcgatcgccccgtgctattgcttgggccttggactgagtaggtttggaggtagcgagacgagacactcgcccccgattcccctcccgctgccgaagcctgtgttgcagggatcgttcgcggaagcggtttttgatcggagagagagaaagagagagcgagggagggaggcggggatggacgcggcggcagcagcggcggcgcagatggagaggcactcgtcggcggcggccttcgtggagggcggcgtccaggacggctgcgatgacgcctgcagcatctgcctcgaggccttctccgacagtgacccctccgcggtgaccagctgcaagcacgagttccacctccagtgcatcctcgagtggtgccagaggagctcccagtgccccatgtgttggcaggcaatcagcatgaaggaccctacgagccaggagctcctcgaggccgtcgaggaagagcggaacgacgtgcaggaaaaccacgcgcgcacaaccaccgttttccgtcacccgctgctcggagatttcgaggtaccggtggatgcagacgacgccgagatcgaggagcggatcatgcagcacctggccgccgccgccgccattcgccggtcgcatcgccacgccagaagagaaggccgccgcagcagcagggtggcggcagctcatggccatggccacccacaaacacaagtcctgttctttccgtctgctggcgag

SEQ ID NO: 4324 - DNA, 1798 bp, Zea mays
  Clone ID: TF_700052368_FLI
ccgcccgctaattcctcctagttctagtcccctctctcctgcgccgactcatctttttcctcgtgtcactcccctgctgctgctgctgccgggaagatcaaatcccgtcaaaaggctccaaaggatcagagttctgtcaagatggcatgcccaagagctccagcagtggaaggttcaggtgtaagtggcgttctttatgctgtggaacctaaggatgcatgcagtccattgagagcgaaagcgattcaaggctctgtctcaccttttgcgttgattataagaggcggttgccaatttgatgacaaaattagaaatgcacagaatgctggattcaaggctgctgtagtatataataatgaagataatgacatccttgtttcaatggctggaagctcgcttggtgtccagatatatgcagtgttcatctctaaggcatcaggggaggagctgaagaaatattcaggccaaactgatgcagagttatggataataccaacatatgagaactcagcttggccaatcatggcaatttcattcgtatcactgcttgctatgtctgctatcctagttgcatgtttctttgcgaggagacaccagatcagacgggacagggcaagacttccccgagctcaggagtcccatggaatgagcagtcaattagttaaggcaataccaagccttattttcacaaaagtgcaagaagacaactgtacatcagcaacatgcgccatttgcttggaagactacagtgttggagaaaagataagagtgctaccttgtcgacacaagttccatgcggcttgtgtggacctatggctcacctcatggagaacattctgccctgtatgcaagcgggacgcaagtgctggaacgtcagacccccctgtatcagagtctacccctttgctttcatcatccgccacacgcttgccggaatcaactgtgttggcttccttgcggtctacagcagcagcgtctccccccaggacgatcagccggcatcctttgttgcggtcaatatcccgcaattactctgtttcaggttccagtatccttcgcacccccgactctaggtttgatgcaaactcatctatctgcacaagtggaagcaacttggaccttgcaaatgtaccatccccatggtctggcacttggcaccgtgcgtctgctcactctttgtgcaggggctacttgtccccaccgatcggcatcaggaatacctcagcacatgtctcgcgttctgccaatggatctcccagtcgttacgtaggctcatcacgcatgtcccatggatcttcagggcagcagcatcctcacctgaggcactgcacattgtcaggcccgagcctgttcaccatggtgccccagtcaccgcaacagaaccagttgcagcatggtggatactcggaaacaaatctgtcggctgccgcatcggctcaatcattccgtcagctctacctgcagcattgccctgattctgacacgtcgtctcagtcacttccagggtgctgatctcttgctgcaatattcactgattcttgcgcccatgagaaatcttgcctggtgctgaattgacatgtggattttgagctcgtcagcatagttcaccatgatgataaaaaaaagagaaagaagtttggagtagttttacatgtggaaacaaaactgcttgtaagaagagagaatgtgcagccccagagtgtgagcaattttacatgcttgagtgtacaggggtttggagtagtcttggacttgcttattttgaggcatgtattgcagtcataggttacttctgctc

SEQ ID NO: 4325 - DNA, 813 bp, Zea mays
  Clone ID: TF_ZmC2018_1
attcggctcgaggccgtcgcagccctccccacccgcgccttcgccgcccgcccccgcggctccgccgcctccgacgccgagtcccagtgcgtcatttgtctcgaagaatacgaagagagggacgtgctacgcgtcctccctcactgcggccatgacttccacatggcatgtatacatgtatggctggagcagaactcgacctgccccgtctgtagaatctcgttgctcgataatcccaacagcgagcacaatgcccctccgccgccgccgccgccgctacccggtgtagcagtgacgatgagctctccaggctctcctgagccgccaggctccgacccgtgccgctgcctgttcgccggtgccgggcactcgtcgagggcgtcatcagaggctcctcctaggcacgagcccgaccaggagaatcaggtggcgtctgggccatcggtggacgggggtgctaacagtaacggcatgccgctgtccgaagttaaccccactccacccgagagcaacagccagacagtgaggaagcagcagccagggccctgcaaatagcagctgcctggagtcggcgaggcgagatcgctgttctgcagcggtctgctgcaggacgagcaaacacctgtacagtggcagatggctgtctggctgctgtaggttggggtttgatgagggtatggtgtaaatatgagaaatcattcagatttgttgttggaaaccaaacacacttcatctgttcagttcagtattgatgctgaaaacagcaaccccccgtggtatgcggatacgggataccaaaaaaaaaaagcggcc

SEQ ID NO: 4326 - DNA, 2388 bp, Zea mays
  Clone ID: TF_ZmC3494_1
ggccgggccgggaaggaatcaaagccaccccagtccgctgcttccattccatctcccttctctcgccttctgcggcactgcagtgctctgctgcctcggcgtctccacctcctcccggcgacggcagggcatccgatacgacgccgcgcttccttccgaatcccaagccgcaccccgcaccctcccggtcgccattcccgatgctggtgttctcgagcgacgacgactgctgcggctcctcgtactaggggggcaggatcgatcggcagactcgcagaactataggatatcacagaacagttcttgaggtacttattgcagcctaatagtacatggagcgatattcagatatgagaccaaaggcagaagtttcatatctcggaaggggttccagattctcttctagaaatcaaagttcagaagagaggactaaccatagcagcgataaaccgggaagcagcacaagattcaatcctacgaaagcgagaattggcggtaatcaagggaggccaagatatgtatgcgattcatttaaatctccaagctcaaaggtgtcgcctgcaggctcttccaaatttccacttagcaagtttgaggagaggcgaagacagccttttgtgccagggtttgacattgctgaaagtagtagaagaaaggctgatgccaagcagctacagggtagtaagaaaattgctgcagagaacgacagttcagacaatctgcgaggtgaatcagaaggttttactactgaacaagtagtaaaaccagaaggctctcatgttgtcggtcattcaggtgtttctgcgtatacagtcgggtccctggtccaaactgcttcactaggttctaggacacacagacagaaacacaaagaagtgaatttgggtactccaggagcatcgtcttcaactctgactaacaggtctactatacctggaaattctaccatgggtgtgaggccagcttatggtcatgttaatggagggcagatacatggtcttaaaaaccttggttgttcttcggtacctgatgctcagccatcaggttgcccatctgagtctgttattagtaggaggaggtttgagttcatgagaaagagggcctttgaccaggaaagctcttccagatcagtgaacttaagcttaggtcattcaactcctacagatattcgcagaatcagaatgaatgaacaatcactttgtcaacaaataccacgaagcagcagcagaagccatcaggaatcggcaggttcagttaggacaagacgaccttctcctcatgccactaggatgagtgttcctgatggaagagcagatggcgtgctttctctgcacgagtcatccacaaaggatgtacagccagctcaggaacatctttcattggaagaagtctccactgagagttcaataaggccattctttgtggaatttgataataacattttctcgtctagtcatcttcgtcgctcgagtactcgagctgaaaggggaagaccaagctccctttttgaagaaagtcctcgacaaatgttccatagtctcatgggggagagggacagacatagacacataaccatggaaggaattacagaggttttggctgcattggagaggattgaacagcaagcagagctgacctatgatcaattgctaatgctggaggctaatctattttttggcgcctttgcctcctatgatcggcatagagacatgcggatggatattgatgatatgtcctatgaggaattattggccctggaggagagaataggctctgtgagcacagctctttcagaggagcagttcacaaaatgcctcaaaagaagcatatatagtcaggtcgctctagaagtgaacaaatcaaccgttgatgacatgaaatgcagcatctgtcaggaagagtacgcggagggcgaagaggttgggaggctgccatgcgagcaccggtaccatgtgtgctgcataggccagtggcttgggcagaagaactggtgtccagtatgcaaagcgtctgccgtgccttccaagggctgaagcattggggatgctggaaaccccgttccggattacaaaccatccttgcttttgtctacgtacattgttcttttccctatatgcattagatatagatcatgtctagatgtatgacgctagaacagcttgcgatttgggaggaagctaagagagtaatagttagctggttaataatagttcatagctaatatttgctagataactattacttggctacctattagctgtgcctttcacattgtggtacaggacaaatgcttgtcagatcgtgaacaaccttataacttgatgaatggcctaagtcaaagaggaatatgttgtgcctatctcatattgcgaaaaaaaaaaaaaaaaa

SEQ ID NO: 4327 - DNA, 889 bp, Zea mays
  Clone ID: TF_ZmC6690_21
ggccgcttttttttttttttttttaacttcaagctttttttttatcattgcacttgcagatatgtacagataaattacagggacaatttctgtccagaatgagacctaataaggctaagaagaagaagaaaaaaacaagttcaccactgagctcggagctcgggcattggttcagttcctgtgtgccgggtgcgcaaggcactaactaactactacgccaagaacgtcggcccctcggcgctgcagggcgcgggcgccttccagagcgcgcggaagccggggcgcgcgccgcagcggcggcacggctcgccgggcggcaggtcggcgggcgcggccagcacccggcggcaggacgggcaggaggagtgcgcgcgcagccacgtgtcgacgcaggcggcgtggaacgcgtggccgcactgcggcagcacgcgcatggcctgcccctcctcgaactcggcgaggcagatggcgcactcgtcggcccccgccgccgccttggccttgccgctgtcggggacgtacgtgaccgtcgggagcgagcgcagcacctccttcttcacgcccctgttggcggccttggtggcgtccgccgccggctgcgaccgggacgcggcggcccagcgccacgagcacgcgcaccgggccacgagacccagcccgaggacgcagacgagcgcgcagagcaggccggcgaggatcaggatcatgtccgagttgatggagttcgtcggcgggcccgagccggccgccgcttcgaggagtatccgcgccatggtttgcacgctggctgagatggcgcgagcgagtgctgtggggtgcgtgccgctgttgttggccgatgcagtgcagtgcagaggctctgggcaggcggcgtgagaagttcccggcc

SEQ ID NO: 4328 - DNA, 846 bp, Zea mays
  Clone ID: TF_ZmC1258_3
gcacgaggataaccgattttttgtgagtccaatgcacataaagaaagtttggagacgatcatttgatggtccaggcatgctcgaagcacagcaaatagaacatttctaaaagtaaagttgtacattccttatgaaaattcagaggaaattgttggcagtgtatgaactatggaatccattgctattgtcgtgttttcgttatactactagttactactctagctatgtagtgatggcctacacaattcttttgaggtgttggatgaaattcaccgtcaacctgcatcactttcactttccatggtctctgttcaggctcctgaatctgtagttgattcgttgccgtgcaagagctacaaaaagctagaggcaccccaacgcagtgatgatatggaacagtgccatatctgcctaactgaatatgaggatggagaccagatacgaattcttccttgcaagcacgagttccacctgcaatgtgttgacaaatggctgaaagaaatacacagggtgtgccctctgtgccgcggagacgtctgcgaagtcgcctcgtgaagaccttggcgctgccatccctttcctcacggcaccggcagatagcgcatcccccgcctgctccgttgttgaagctggtttggtcaggcaacggcgatcacgtcccgtcaatctgggcgtccctgccgaagagcgtggccagatcctgcgaccaatgcgtcgctgttcctgccatcaactttttaagataccgagactgtatatagctcttgtagcctctccgtgtatgacaacctgtacatatatatgtaaattctagattccaatgtccattattttgtcctacattcc

SEQ ID NO: 4329 - DNA, 417 bp, Zea mays
  unsure (1)..(417): unsure at all n locations
  Clone ID: TF_cC-zmpo14820018a08d1
gacccacgcgtacgaccatcgcgtccgcccacgcgtccgcccacgcgtccggtcgtagctctgctcacgtcgcgacgaggatctcctcgagaggagacggagagctcgaggagggggcgcacggaggccgttctaggcttgggcgtgggcgtggtctcagagcggcacatcgggcagctggagctcccgcgcatccacgtgtcgatgcagtcggagtggaagtagcgcatgcactcggggagcacccagacgacctctccggcttagaagtcggccaggcacaccgggcacgtngactcgctccaggcctcctccttggggnaccggctcaccaccgccgcgcccaccaggacgacacatgcatggcgcggcgcgctataagtggcccgcgacgatgggggcgggcttggggcacaa

SEQ ID NO: 4330 - DNA, 681 bp, Zea mays
  Clone ID: TF_ZmC10271_2
gtgtggtatttgtcatgacaggcagaaagaggttgtgattgccaaatgctaccatctcttctgcaaccagtgcatacagaagtcgcttggtagccgtcagaagaggtgcccatcttgtggactaagcttcggcgttaacgatgtgaaacctatctatatatgaaacagaaggttggcgcctgtgtcgcacacaccagaactgcctggtgctctactgattcccggtatgtggtaggccgccatggcggcggttcagttggtgatgtagcataagcttctctaggtacctttgcacagccaaaaaagaagaagtaagactctgaatgtgattgctggtacccgctggcatatatgatgctggtgttacctcaagcgtctctcgcaaagtatgccttgcctttgcccagtctggtagaatagcctgacctcttcaaccattgcttattttttattcattgggagaaaaagacccaacaagtgaggatattggtgcttcccgcaatagtgagcaatgtttatatttgtagctttagttagttccattggtgtagccgacagtaaggatatagtttccatttcatttttatttttcctttttgaaatatactggttagccagtttgtatgtttcaggagattgacaatagtgagattccgttaataaaaaaagaagtgagattcc

SEQ ID NO: 4331 - DNA, 781 bp, Zea mays
  unsure (1)..(781): unsure at all n locations
  Clone ID: TF_ZmC669712_1
tccaagacttgctcgcggtcttttccatcccatccgccgatccacagccaccccacaccagttcccgagcagagcgagcgccccatgccgcgtgccacggcgagcctccgcctgcaggcagcggcgtcgtccacctccaccgcgaccccaagagagcagcaggcgtcgtcctcatcctcgtcatggcctgttccaccaccgcttccccagcagccggcggtgtcggtgaactccgacacggtgatgatcctggcgtccttcctgtgcgcgctcgtctgcgtgctcggcctcgccctcgtctcccgctgcacctgccgccccgcctcgtcctccaccgccacggggatcccgcagcaggcgaggcctccgaaaggactcaagaagaaggccatcgacgcgctgcccaccgcgccattcaccgctgccgcctcctccgactgcgccatctgcctcgacgagttctccgacggcgacgcgctgcgcgtgctcccccgctgcggccacgccttccacgtcgcatgcgtcgacgcctggctccgcacgcgcgccacctgcccctcctgccgcgccggaatcgtcatcgcccaccagccgctcatggccgcaagtctgtctcctggatatcttgacccgtccgtcgtctctatctagctagctgttanaatacccaatcctttgctccctccttgtaaattacttttgcaaaccttttgttttattttaactgtnaatatttgaaagatatatatattaatgctcgacggcatgtcgatttcagtgc

SEQ ID NO: 4332 - DNA, 2413 bp, Zea mays
  Clone ID: TF_ZmC20235_2
caccgtctgtggagaagcgagaggaggaaggagacaaggaaaggaagggaggggaatcttcgtagagcactaggcagcgacggagtcagcgcagcttcgtctccttccttccttcccctttcgctggccgctggccgtcggcaccatcacctacggccacgggcgcagcgcggggccgctccgtaccgggtccgcgggcctctcgccagggggacccgataagcctccgctgctctgctcggctgctcttaccgtctctcccgtccacggtccacttagctagaaacacacaacaaacaaggagaaatcgcaaggaggagcagcgcctgccgccgcgccgtatccagcgaggcagcccccccgccccgatctgccggcccgacacgctgggatcttcctttccttagccgaccggtcaacgccgcagatattctccttccctgcggctctggaggtttccgtaaacccgtcaccccccctccttctattccttgcaggtgaatccaccgtcgcccctttcctcgttcctcctcctcctcctcctccccttcgtctccaccccccggatctcgccttcgctcgtcgcttcccgattcgcggccggaggggcggactccggctgtgtgggtggacgcaaggtagtcggcaaaaggtgcgattttgatcttgtattcttgtttccgaggccagctgcgttgcgtgatggctggtccgtcgaaccttcgctgctcatggttttccgtgatatacgattgagtagttcgattcaatagacactagaatcgatttgggtgccgccgacctgattcttccgtcccgaatgctgttgggttggatgggggactacggggatggtattttggtgcgcggtgctgccggggcccaaagctttgcgtccaaagtcccaaattgcaggaagaggaaactttgttgtcaatttcagatttcttttctctgtggacgtgtgtgtctgtccaacaacgccttctctggagttacctgattttgctgcctgccattgataggtatcgacgatcagacggagcagttgcttcaatctcgacttcgacctccatctgcgttgaacccatttgggattttggagagggggggtgcttgcttggattgcacagcatctgcatcagttcacattctttgggcatttgctatcttgtcaagcttgctgactatacagttctggttcaaggaacgcctttctgaggtctcttggattatgggagctttctgttcatgtctgcaacctgattattcggaccaccatggaaaccaagcttcttcggcgtttaggaactgcatgtgcctcagatgctttacccagcagctgatcaatgcgtatactgttttgttccgagctggagcagtgcattctgtttcccccgctattgaagccactcctgttgattcaactgaaagctccttcgatacatatcgttcgccgccaagacctctgccctatgatgatccacgattttcccctcctgctcgtgactggttaaggagtgagaacccaagccattccccagaggaatcggaaccacttagagcaaatgaggatgatgaagaaatggaaacaccaagtataatacagaaggcaagtaaaacaaactacaacacaaaaatgaaaatctgcagctctacttatggtgataaggtgccaccaagggaacatggaaattacttcagctatttttccccatctgctgaagatgaagatgtttgtccaacttgtcttgaagattatgattctgagaatcctaggatagtaatgcagtgctcacaccatttccaccttggctgtatttatgagtggatggaaagaagtgaggcatgccctgtctgtggaaagaagatggagtttgacgagacaacataatcctctggctggactctacaccatggcccatggattaacaacaaaccttctcatatgacattctgaaaatacagatggtctagcccagcaagttctctgtaaatacgccctgtaaatattggactggtagtgtgggtccctcttggccatacgagtgctctccaaatgctggaacggtgcacataaacattcttttccgatttgttacaaatagtcggcaggggaaggttgccccccctctgcctgtctgcgcctctgcctctgccttgtcgaggcttagaggtgcattggttgtccggtgatagattcatcggaagcctgtaaattaaagacctaggctcatataataatcatatggagtcccgtggttctgaaagttcttgcaatgataactatttggcttcagagactgaaattctgtcatagtagtggtgtttatcatgccaacatttgtttccgtggtgttgctaattgtgactcatggacacatatgaagagttatttattacacttattgtc

SEQ ID NO: 4333 - DNA, 1329 bp, Zea mays
  Clone ID: TF_ZmC9757_1
gggcgacgcgatcaaatgcacttctcggctgcattttccacaccgcgaaaggagcccatcactcggaaaccgtaagccgtgcaaacaacaggcgacgcaccggcgccgcgcgcgcacgcctatttctagctcgatcgtgtcctctcgccgctccggagtcctcaatccacacgcttgggcgagcaagccttgttccggaagcgcgcggacgacatgctgatgctgcacccgaggttggtgtcgtcgagcgccgtggacgacgaggaccactgcgagagctgcgcctgctactgcgccatggtgtcctgcgtctcgctgctgctcttcatcgtgctggctgccgcggtcagcatcccgagggcctgcgccatcgccggcgtcatgctgctcctgctggggctcgtcggctggctcgtgcccacggggaatggagccggtccggcggcgcagcagcagcagcagcagggccaggctgctgccgatcctggggcgcggcggctggtggtgcaccaccggtgcgcgtgcgggctaacggacgccgctatcgccgcgctgccggcggcgttcacgtactacgaggcgcccgcggtgaagaatggagtggggagcgaggacgacaagcagccgcgcggcagctccttgctgtgcgcggtttgcctggacgacgtgcggggcggcgagatggtgcggcagctgccggcgtgccgccacctgtttcacgtcgactgcgtcgacgcctggttgcgcgctcaccggacgtgcccgctctgccgctgccagctctccccgaggaacgacgtcagcacaaagcgggccgccgcggtcgtcggggagtcatccatcgacgcgttgccgccggtgtgagtgttactcactcatcaatcctccgaagctggccggcgcattggtaaactgtattggaccagattcttcatttcttaacaccacataataaagaaaacttcggcacaatttcgagggcgcgcagcagacgtgtgtctctactctctagtctctaggcatgagcatgagcctcaacatcgatcgagtggttccaaccacatcgccagacccgacgcttccagcagtcgcgaaagaagtagcatctcgccgatggggacgggtaccagaccgtacggaccagggagtctacaacttgacacgcttcagttctgccgctaccagacaggcaatcgagtctatcatgtcagtgccagcttttgtactgtatgctccgttgcaccacgagggtctgatgaatgttgctgccagttacattttcgtgagttgtaaaaccagaacaaatacccgtgtttcttaggaaactgt

SEQ ID NO: 4334 - DNA, 1069 bp, Zea mays
  Clone ID: TF_ZmC6690_23
cccccctcgagtttttttttttttttttttttttttttaggagtgactctggttttcagtactaacaagacacaagcaaagtagtttcctacagaaaggaatggcaacatccagttcgtcgttaagacaagaaaccagactactcgtcccaatgatcgaaagcttggagttggttgcatttgcatatgtacagataaattacagggacaatttgtatacaccaatcaggtacacacatcttgatgcttgtccagaacactccaccgttgagctaatcactacacacacctaaaaaaggggaaacctaccaggctaaaaaaaaaaacaagttcatcactgagactgcgcgtcggttcaattcctgtatcgagtgcgcacggcactacgccaagaacgtcggcccctcggcgctgcagcgcgtgggcgccttccagagcgcgctgatgccggcaccggcaccggggcgcgcgccgcagcggcggcaccgctcggcggggggcaggtcgacggccagcacccggcggcagaacgggcaggaggagtgcgcgcgcagccacgtgtcgacgcaggcggcgtggaacgcgtggccgcactgcggcagcacgcgcacggcctggcctccctcgaactcggcgaggcagatggcgcactcgtcggcccctccctccgccgccgccgccgccttgccgctgtcggagacgtacgtgacggtcgggagcgagcgcagcacctccttcttgacgcccctgttcgcggctttggcggcgcccggctgcgcccggccggactcggtggcccagcgccacgagcacgcgcagcgggcgacgaggcccaggccgaggacgcagaccagcgcgcagagcaggccggcgaggatgaggatcatgtccgagttgatggagtcctccggcgagcccgagcctgcgggcgcttcgacgagtatcctcgccatgtgtttgcgctgcctgaagatgcgcgagtcccgtggtggcgctgttgttggctgatgcagaggctctgggcaggcggcgtgagaagtcccggcccggccggcctcgagcgtccgcac

SEQ ID NO: 4335 - DNA, 1987 bp, Zea mays
  Clone ID: TF_ZmC20996_1
cattggtacctcgagccggcgggctcgggatcgtttcttttcttgttggccttctccgtggcctgccgggaaagggcccccctttccgtttccctcccccaaaactactttcccacaaacccagaccagagcagcttgcgttgcgtctctcgtttcttttcttgttggccttctccttgccttgcttttgcttgctcgttgcttcttgagctcgagcccgccccttctgcgccttgcccaagtctctgtgtgttttttataggcttgagagcttggaatagcggggggtggaggaagcggaagaggagcttcgttttgtgttctagagggagtcatgttccatggcggcaggcctctgtccctccgggggtctctcaaggcgcttgaagctgatatccaccatgccaacaccctggcgcatgctatacacagggcgtatgggggtgcctgcgtgcagatgaggctgtcctacagctccatggctccaatctttctcaaccttatccaatggatggactgcagctgctccctgtcatacacgctccctagctaccttggcctgctcgaggttctcgtctacaaggtttatgtcgatgaagatgcctccatatccaccatagaaaggagggcgagcctgaaggaattctacactatcatataccctttcttgcaacaactggaggacaacttgatggacaaggactgcaaggacaaagggtggtctgctgctgccggcggcggcggcggcggtcggaagcttgttgccgaagatgacagggaggatgagtgtggcatttgcctggagacctgcaccaagatggtccttccgaattgcaaccatgccatgtgcatcaactgttaccgagactggtacacaaggtcccagtcatgcccgttctgccgcgggagcctgaagagggtccggtccagagacctgtgggtgctcaccggcgacgacgacgtgatcgacacggtgacgctggagaaggagaacgtgaagcacttcctcagcttcatcgacagcctgcccctgatcgtccccgacaacatgctgctggtctactacgactacctagtctagcaaggctcctccccccaccccccactctgaagctctggaagaggaagggggtctgggaagaagacgcggcgtacaagcgacaagggttacccgcagccgaccatcctctgcggatcgagttggcaaagcgaagccgttgccgaccaacagacgatactctcgtgggcatgccacgccgttgcgctggctttattgcatggtggcgttgctcgctgtaatggttgtaaataaagaaggaaaatgtctcgggttttatatataatatactagcttgacatttctcgtctggcgaattgccggactgttcagaatgaagaaatcagggggcctctacttctctgctctaaaaaaaaaaaaaaaaaaaatatggatctgcaataggaaaataactaaaaaaaaggcccctacacttcatatatatatatatgcatgcatgtagcccgacagctatatattccggaatgtgcttgcgcccaaaatgtaaaaaaacgttgtacactataaatcagttctatgcgtaaccaggttggaatttttccaccccgtatcatgtataccctacaaaagtgcaaagtctagtacagttggtttttggattggctagagcttagttctatgcgtaagcaggtgaagccacggacggcataactatttgtacactcggtttgcataagaaccgactgcacatctgcatttgcaccgtcggttgcaagttgtgatagactcggcgggaagttttatgtaatataaaataaagtataggtgaagtacatgtttttagtataaatttttatcctgtaattttatagttattgaattttatgactaagagaaaaaaaacatgctagtagagttttatcatggatcactgcaaatgtcaccttgaagcagttaatggttgttatc

SEQ ID NO: 4336 - DNA, 1390 bp, Zea mays
  Clone ID: TF_ZmC20996_3
ttgggtacctcgaggccggccgggatccgcgcgctctgctctccctgcccgcaccccgcagatcccgaatggccatgcctaccgccgcctgcaggtcggggccggatgcactgcaagctgcggccccgagcaccgggctgaactgaagaggtgtcgaggtcgccattaatcctcaacaaccagctgccaccaacgctatatgctcaccatcgccagcaacttggtggcttgagagcttggaatagcggggggtggaggaagcggaagaggagcttcgttttgtgttctagagggagtcatgttccatggcggcaggcctctgtccctccgggggtctctcaaggcgcttgaagctgatatccaccatgccaacaccctggcgcatgctatacacagggcgtatgggggtgcctgcgtgcagatgaggctgtcctacagctccatggctccaatctttctcaaccttatccaatggatggactgcagctgctccctgtcatacacgctccctagctaccttggcctgctcgaggttctcgtctacaaggtttatgtcgatgaagatgcctctatatccaccatagaaaggagggcgagcctgaaggaattctacactatcatataccctttcttgcaacaacttgaggacaacttgatggacaaggactgcaaggacaaagggtggtctgctgctgccggcggcggcggcggcggtcggaagcttgttgccgaagatgacagggaggatgagtgtggcatttgcctggagacctgcaccaagatggtccttccgaattgcaaccatgccatgtgcatcaactgttaccgagactggtacacaaggtcccagtcatgcccgttctgccgcgggagcctgaagagggtccggtccagagacctctgggtgctcaccggcgacgacgacgtgatcgacacggtgacgctggagaaggagaacgtgaagcacttcctcagcttcatcgacagcctgcccctgatcgtccccgacaacatgctgctggtctactacgactacctagtctagcaaggctcctccccccaccccccactctgaagctctggaagaggaagggggtctgggaagaagacgcggcgtacaagcgacaagggttacccgcagccgaccatcctctgcggatcgagttggcaaagcgaagccgttgccgaccaacagacgatactctcgtgggcatgccacgccgttgcgctggctttattgcatggtggcgttgctcgctgtaatggttgtaaataaagaaggaaaatgtctcgggttttatatatcatatactagcttgacatttctcgtctggcgaattgccggactgttcagaatgaagaaatcagggggcctctacttctctgctct

SEQ ID NO: 4337 - DNA, 1536 bp, Zea mays
  Clone ID: TF_ZmC20996_4
ccggccgggaaagggcccccctttacagtttccctcccccaaactactttcccacaaacccagaccagagcagcttgcgttctctcgtttcttttcttgttggccttctccttgcccttgcttttgcttgctcgttgcttcttgagctcgagcccgccccttctgcgccttgcccaagtctctgtgtgtttttttataggcttgagagcttggaatagcggggggtggaggaagcggaagaggagcttcgttttgtgttctagagggagtcatgttccatggcggcaggcctctgtccctccgggggtctctcaaggcgcttgaagctgatatccaccatgccaacaccctggcgcatgctatacacagggcgtatgggggtgcctgcgtgcagatgaggctgtcctacagctccatggctccaatctttctcaaccttatccaatggatggactgcagctgctccctgtcatacacgctccctagctaccttggcctgctcgaggttctcgtctacaaggtttatgtcgatgaagatgcctccatatccaccatagaaaggagggcgagcctgaaggaattctacagtatgcttactatccaccatagaaactagtgattaagaagctttttttttctgttcaagatttttttttgttgatgctgctgctgctgctgcagcagtggtttaatatagttttgggaccccatggaatgcagctatcatataccctttcttgcaacaactggaggacaacttgatggacaaggactgcaaggacaaagggtggtctgctgctgccgccgccggcggcggcggcggtcggaagcttgttgccgaagatgacagggaggatgagtgtggcatttgcctggagacctgcaccaagatggtccttccgaattgcaaccatgccatgtgcatcaactgttaccgagactggtacacaaggtcccagtcatgcccgttctgccgcgggagcctgaagagggtccggtccagagacctgtgggtgctcaccggcgacgacgacgtgatcgacacggtgacgctggagaaggagaacgtgaagcacttcctcagcttcatcgacagcctgcccctgatcgtccccgacaacatgctgctggtctactacgactacctagtctagcaaggctcctccccccaccccccactctgaagctctggaagaggaagggggtctgggaagaagacgcggcgtacaagcgacaagggttacccgcagccgaccatcctctgcggatcgagttggcaaagcgaagccgttgccgaccaacagacgatactctcgtgggcatgccacgccgttgcgctggctttattgcatggtggcgttgctcgctgtaatggttgtaaataaagaaggaaaatgtctcgggttttatatataatatactagcttgacatttctcgtctggcgaattgccggactgttcagaatgaagaaatcagggggcctctacttctctgctctatatatatcgtcttcaaaaaaaaaaagataaaaaaaa

SEQ ID NO: 4338 - DNA, 1790 bp, Zea mays
  Clone ID: TF_ZmC22066_1
ccctcctcacggctccgggagtgcagggctcctggcttccctccctcccctccacggcttcgcgggctcacccgccctcctgctctaagcccaaagctcccgtcccgagggcttcaggtctgttggcccctactcctcgtccgcttcccgggccgccgcttttaggtgtgacttcctcatcatctgccctgacggggatcgctggtttcttcctccagagatcgcatctctggtccgcgggatccgatgagatgcgggggtgctctcgcagtccgacctcgtagcaggcatggctgaagcggccacttcttcgtcttcgtccggatccttcgccccgcgccgcctccatgacgccggtgtcgtcagggaatcgctcccgtacagtgttctcgctgcacccccgccgccgcctctgcctccggtgcaggtgcaggttgcgggttccggcggcggcggtggagggaagattagccccgcggtgcttttcatcatcgtgattctcgcgttagtgttcttcatctccggcctgctccaccttctcgtgcgcgtcctgttgaagaagcagcaccgccgcggcggccgaaggggcacggcgtcggcggcggcgccgaggactggagtggaggcaggcggggtggacgtggcgttgcagcgccagctgcagcagctgttccacctccacgactccgggctggaccaggccttcatcgacgcgctgccggtcttcgcgtaccgggatatcgtcgtgggcggcggcggcgacggggacaaggagccgttcgactgcgcggtgtgtctgtgcgagttcgatgccgaggaccggctccgtctgctgccgctgtgcgggcacgccttccacctcaattgcatcgacacgtggctgctctccaactcgacctgcccgctctgccgcggggttctcttcgtcccggggctcatgggcgatggcaaccccatgttcgatttcgaggagagactggaggaagggcggttgtccgaggactgtgacgttggatttggattgcctgggctgaaggcttcagggttggcacagacaccggtggttgagaagaaggtattccctgtgaggttgggaaagttcaagaatgtcggaacccagggtgcggtggaaggtggcaatgccaatgccagtgtgttgagtagggatgaaggggagagtagcagcagcagcttggatggaaggagatgcttctccatgggcacctatcagtatgttcttggcacttctgagctccgagtagctctccagcctggccgtattagaaatggcactggtggtgcaatgatgggaagacctcctggtttaagttcgatcaatgctgatattatggaggggaagaagatctgtacacgcaacaaaggggagagtttctctgtgtcgaaaatttggcaatggtctcatattaagggcaagctacctgctggttcggatgaatgttcggatgccgggagccttccttggatgaagagaggaggtgctgcggatacatcaaacttatgactctgcactagtgtaatgagcctttctttagttagtgatacccacctaattttcacctgtagtcatttttcttatctaattttcatgtgctcattttgattggagtgccaacctcattgggggcttagcttttggtgatcttgccatgttagtatgtttcaccacgtagaattgtagattgtgatgatttatttgatctgattctggtctgcctaaaattttgtaaaaaaaatgaaaaaaaaaaaagggcggccgccaccgcggtgga

SEQ ID NO: 4339 - DNA, 1086 bp, Zea mays
  Clone ID: TF_ZmC1120_3
cctcgaggccggccgggccgggtcttcaccgcgcttgcatcctctcatcgccaccccaccctcctcctcctccctgtctttctccccccacctctctctccccctcttgacaaattttcctccacccattcccttcctcccctcttcttcttctccacccactccaccgatccccctctttctctctgaattctctctcgtcgtgcccacccttcccatctgtctgctgcccctctctcgcaatcagtcactcggctcttgtttcttccgtctgctgggttgattctctctctttctctccgtggagaaacaggaggagagagagggaagaagagaaatcggaaccagcctgttctttttgcctggattgcggttcttgcgagttgttcagaaactctgggccagtttctgattcggaatgcacttgaaatgattcaaaggggggaaaatgtaaggctcgagtctatcttctatggcggcctcgacattcatgacagacacagggacatgcgccttgacattgacaatatgtcctatgaggaactattagcacttgaggaaaggatcggaaatgttagcactggcctcagcgaggaagctgtgataaagttgctcaaacaaaggaaattttcatcgtggagactaaaagcatctttggacccagaaccatgctgtatttgccaggaggagtacgttgatggagacgatctcgggaggctggactgcgggcacgacttccatgctggctgcatcaagcaatggctggtggtgaagaacgtgtgccccatctgcaagaacaccgcattgaaagcctgaaaccgaacaaaggcgacacacccatgttccatgtccattcgatcggtcgcaagatcatttacccgattggtttttactatgcgttttttggttgggaaaattttgccatttcacctgggaaagtggtgggggggtgttggaggtggaagagaagatggcggtccctgtaaactgctgctgcagtaaataatccctggaatttgtctccctgcatttaaacaaaatatttatggctgttataatggacgccgtcgtagggtttataactcg

SEQ ID NO: 4340 - DNA, 2373 bp, Zea mays
  Clone ID: TF_ZmC3547_1
gcccttccccctccgctcgccctcccccccttcccggcatgaatcgcccagtccacacgtcagttcgccctacacctcaaagcgctgcgtcccttcctccagctactactaccttggcggctccagccagcacgggtcgtacctgcggcggtgtggagagccagggacaagcctgtctaccatgatccctctgtcctcccagcagcagttcgagtcaggcgcaaccgtggccacggcgcgtcgtccgcccagtcacgggagtcctacctgacccgccaattctgtgcgggtgcacgcctgcttcatcatgggagccgacgtccgaccctggccgctgctacccccaggtacggagcaagcctaagccagtagctgcacccgaagacacagatttggagtattgagctggctctctgttttgtcggttgtgtgcttctacttcatagaaaagagctgcattttcttcttagtgctttggatgctggccagatgaagagtagtagatttctgttcctttgtgcaatgttctgtcttatggctcggctgggagctgccaatgtcgtgctaatggggaataatctgaccctgtcctttgctgatattgaggcaagcttttctccaggagtgaaaggatcaggagtcaatggcatagtttatgcttctgaacctttgaatgcctgcagcccgttaacaatcaaggcagtcaagggcccgccatctccctttgcattaattgtaagaggcggatgcacgtttgatgagaaagtgaaaaatgcacaggatgctggattcaaagctgcaattgtgtatgacaatgaaaatagtggggtcctggtttcaatggctggaagctcaagtggcatacacatatacgctgttttcgtttcgaaggcctcaggagaggtgttgaagaaatcttcaggacatactgatgtagaggtgtggatactacctacattcgacaactcagcctggtcgatcatggcaatctcattcatatcgctgcttgccatgtctgctgtattagctacgtgtttctttgtgagaaggcatcgaataaggagagaccaccctagaatcccagaagctagagagttccatggaatgagcagtcagttagttaaggctatgccaagtcttattttcacgaaagtgcaagaagataactgcacatcatcgatgtgtgccatttgtttggaagactacagtgtcggagaaaagctcagagtgctgccttgtcgtcacaagttccatgcagcttgtgtggacttgtggctaacttcttggagaacattctgccctgtatgcaagcgagacgcgacgagtggagtatcagaacttcccgccacagaggctacccccttgctttcttctgctgtccggttaccttctcagccatcttcattcaggtcgagcgtggcagcctccccacccaggccgataagccggcatccttcatcgcactcggtttctcgtgcttactctgtctctagtaccccccactcccccaaccccttcagatctcacacaaacttacctggggtcatccatgcaagcagaagcaccacagaccttgcaaacatgtcgtctccccaccctcgcatctcacacttgtcgtcgtcgacacactccctcgtcggcagccacctatctccaccaatcagcataaggtatccattgccccattctcggcatgaatcgcccagtccacacgtcagttcgccctacatctcaaattctggctacggttcttcaagctactactaccttggcggctcgagccagcacgggtcgtacctgcggcggtgtggagagtcagggccaagcctgtctaccatggtccctcggtcatcgcagcagcagttccagtcagaggcaaacgtggccgcaggcgcgtcgtctgcccagtcctcacggcagtcctacctgcgacgctgtggcgattcagacgccagcttgtctgacatggcgtcagcccagtcgttgccggggtgctgaggcagatgtgcactacaagatgcggcttgacctgtgcatacaatgaggcttgcagcgtcacataggtggggaacatgtatagcatagactttatgatcctgttcttgtctgtgagtggtatatggttctttttttgtgccttttattgtgtgcatctgacgtgacaggagcctgttgaagttgattctgttaacattttagtccgcaccatgcgtccatgccagtttctccctagatttgctactctactaccatgcacacatttgaacgaggcagtgctcagctgcatgcatctgatgttaatgttgtgctgctcgctcagtgagcatgaagagatggtcgtctgagcaaattcagaaaacagccctttgtctg

SEQ ID NO: 4341 - DNA, 1445 bp, Zea mays
  unsure (1)..(1445): unsure at all n locations
  Clone ID: TF_ZmC3547_3
gccgtgtctagtgtcttccgtctcgatcccgcgggtgggactcgccggcgacaaaaacgaaaagcgacttgccctccgcggcctccggccttcccactccactcgccctcctctcctagcgtcggtgagccggtgcgctgcagtccccgctccccttccgcgtcgccgcgatggaggtcttccgggagcacggggacgacggagtgccctaggattccatcacgccgccaagcatcagtcccgcagccagggatttcttctccgaccccgaccttcatgtgagtcgcggccttcctcctcgaagcggatccggcggattggaggggcccaaccatagcaggtacttcttgcgggtgtaagcatttcgctgcacttggagacgcttatttggagtatttgaagtatgagttggctctctgtcctgtcagttatgtgcctgtgcttcataaaaaagagctacattttcttctactagggctttggagactgcccagatgaagagtagatttcttgttctctgtgccattgtctgcgtcatggctcagatgggagatgccaatgtcgtgctattggggaataatctgaccttgtcctttgctgatattgaggcaagcttttctccaggagtgaaaggatcaggagtcaatggcatagtttatgcttctgaacctttgaatgcctgcagcccgttaacaatcaaggcagtcaagggcccgccatctccctttgcattaattgtaagaggcggatgcacgtttgatgagaaagtgaaaatgcacaggatgctggattcaaagctgcaattgtgtatgacaatgaaaatagtggggtcctggtttcaatggctgngagctcaagtggcatacacatatacgctgttttcgtttcgaaggcctcaggagaggtgtntgaagaaatcttcaggacatactgatgtagagctacgtgtttctttgtgagaaggcatcgaataaggagagaccaccctagaatcccagaagctagagagttccatggaatgagcagtcagttagttaaggctatgccaagtcttattttcacgaaagtgcaagaagataactgcacatcatcgatgtgtgccatttgtttggaagactacagtgtcggagaaaagctaagagtgctgccttgtcgtcacaagtttcatgcagcttgtgtggacttgtggctaacttcttggagaacattctgtcctgtatgcaagcgagacgcgacgagtggagtatcagaacttcccgccacagaggctacccccttgctttcttctgctgtccggttaccttctcagccatcttcattcaggtcgagcgtggcagcctccccacccaggccgataagccggcatccttcattgcactcggtttctcgtgcttactctgtctctagtaccccccactcccccaaccccttcagatctcacacaa

SEQ ID NO: 4342 - DNA, 2705 bp, Zea mays
  unsure (1)..(2705): unsure at all n locations
  Clone ID: TF_ZmC1018_1
atcgaccgtgagaccccacgccaccctgtccctttccccgcgccaccgccctctccgtcgccgccgttcgaccgagcgccgctcacccaccccacgagctcccgcgcgggttcatgtccatctctccacacgaacgcaccggaggagcctattacccgcgcccgcacaaccctagccctagtccccaacatggcagcgacagacgccgccacggccgccgctcccctccggcatccgtctcgccacccggcgccgctgcggaagctagcgacggcggggtcggctcgagctccaacccagtggttccagctattggagaatctattaatgctcccgaaaaggtagttggatttataatatctggggaagagaatgatacatgtacacaagaggttggcaatgtttcagaatgccactcttcagaacagggggattccggtttgcctgtagataattttggctcagttgggtcatatcctgagagacctaaaatggtgggatcccttcaggctgaccatttggcttcaggttctactggactgggtaatgggactcagatagctgccaggaagaatcagaccgtgaatgctaatcacctactgaatttccagtatgatcctatttctcggccacagcccagaggccctagaacatatcttccgagaagacaaaggaagataaaaccttacaacaaggatctgttcatccaagcaaactataagtttgttgtattggatactgggaattaccagattgattcaatggatcctgataagatgcttcagtgggaagatattatctgtgtaagatactatagcccttctgaggtacaatgccctatttgcttggaaagaccattgtgcccacagatcacatcatgcggacacatatattgctttccatgcattttacgttatctaatgatgggcaaagatgattatagaggtgagtgttggaagaagtgtcctctgtgtttcatgatgatatcatcaaaggatttgtatacaatacaaattactcaagtccagaatgtccgtgctggtgacgttgtcacatttacacttctgagcaggtcaagaaattcgctcactccttccatcaaaagctcctccagtgaaagttctacaacagatgaagagcattataatgttttctcaaagtttattttgacatctgatgtggagttgtctgttcgagatgcaaaattggatcttagtaattggttgcatatggctgacttaggccttgttgatgacttggagaaacttccatttgtttctgctgctttggagcaactggaagagaagacgaaatattggattgattacagaaattatggtggtagtcctccatcaaaagatagcttctctcctggatctagtttcaagtctaggaactcttttgatgtgaatacttctcagcagatgagtgagcacaagatctctctttcagatagagatatggtcaatggtatttcagaactctccatgtctcccgagttgagtaaaacctctggtaaaggaacaatatctaaagtaaatgagaaatgtaccacaaccattgattcaaatgaacatgacccatacacattttaccaggtgtcagatggccaacacctaattctccatccactaaacatgagatgtcttctaaaccattttggaggttctgatatgcttccacctagaataactgccaaaatattggagctggaaactgtaacacagtctgaggctataaggaagcgctatcggtttttgagtcacttctcattaacaactacatttcagttctgtgaaattgacttgagtgatgtagtgtctcctaactcactggctccattcttggatgaaatcaagaagcgtgagaaacaaagaaaacgagccgccaagaaggaagaaagtgagagagtgaaggcggaagttgctgctgctgttcaggcatcagctatgcgatttgagtatacaaattcctctcaaagtcacaacgatgtcatgttctctctggatgactttgaagccctgggaaacaacgctgggccgtccaccagtccaccagcgagtgaaaggaagcttttctctgatgtaacacgcttgggttttgcatctgctcaagactcacctcccttaagactcggaactggggatgcaaatggccaaagtgaaacctcgagagaccaagggccgttagcgacacccgcattatcatttgccagcatcatatcttccagtagagccgtgactgcagctgacaactcggagatgcagaaagcaaatggcgctgggaagaagggtaagaaagcaactagagtgcttttgtcgactggtggtggccgtcgatactgaaggactatagatgcattggaacgaacagtttggttgtttccatataatgccgtagctcaatgcaatgtgcatagtacataacctggctgggatacgcttgtaagttgtaacactgagcggcagtcgtgtgtgttttgcctttcttgtgggtgtgcttgcgttgtgcccacatcctgtcccttgcatgatctggaaacgagcgcagagaagcgtgtaccataactaataaaggtggcgcaacactttagttgtggaacgccgctagtctgcccggagtgtcaaaatctccaaaaatgtgtacttttgatcattgaacatagttcatcagggttcaaaaaaaannnaaaaaaaaaaaaaaaa

SEQ ID NO: 4343 - DNA, 1188 bp, Zea mays
  Clone ID: TF_ZmC17335_1
ccggccggggtaaaaaaaagtacgaacaatccaaaaggagtccaaagtccatccatcggtccttccgtctcgacaagcttcttcatctcctccgtccttcaccgcttccttgaccctctctctcccccaccccacccacggaaagcttcgagctttctctctataccccagggagaaggaaggaagccggcacagtctactggccttgtggtgccggcaactgactaggatcgagaaatagggttcttggagagcggccggtccatggcacagcggggcgagctggggcggcagctcccgctgagaggccccctcaaagccctagaggcagacatccaccacgctaacgccatggcagatgctattcagaggaattatggtggcgcatgtgtgcagatgaggctgtcgttcagctccctggctccattgtttttgtacttcatccaatggctggactgcggctgctgttatgcccttcccagctatttaggattgtttcacattctcatatgcaaggtttatgctgatggagatagctcagtgtcgacatatgaaaggcgggcaagccttagggaattctacgcaattatctatccgattctgcagcagcttgagagtagtttgatcgagagggacctgaaagggaagggccgatgcaaggatatagtgagtaggaggaggatggaggattggaaaaaggtttccggtagggatgtggaaagggaggatgaatgcgggatttgcatggaggcatgcaccaagatggtcctgcctaattgcagtcatgcaatgtgcataaagtgctatagggactggtataagagatcagagtcatgccctttctgccgaggaagcctcaaaagaatccggtcgacagacctttgggtgcttacaaattccaacgatgtcatcgaccctgcacatttagaaaaggaaaacgtgaggcatttctatagctacattgacagcttgcccctaatacttcctgatagcattttctttttctattacgagtatctactataacgccaaggcaacatacatcagatgtgtaaattgcgaaaagcagatgaaatcatggttttcttttgtagatgaaccccctctcactctgaccacatgcatgtctatttacccataggctgctaatgtaaacattaatgcatctgtcaataaagttgttaggag

SEQ ID NO: 4344 - DNA, 406 bp, Zea mays
  Clone ID: TF_ZmC140839_1
atgatgcgctttctgagtgtctgaagagaaacctctatgtgcccacaacttcaagcagcaatgaagatggtgacatcaaatgcatcatatgtctggaggagtactcttctggtgtggaggtggccaagatggcatgcgagcattactaccataccacttgtatccaacagtggcttcagcaaaagaactggtgcccgatttgtaaatgtgacgcttctgccattagctcatagtgttcttgacagtaacagaagtatcagttcattgtaatcaaataggattacacaagtttttttggttctagaacaaattattcacttcaatcctatactgctcttcaattaacactaaaaaaatcataaaaaaaaggaaaaaaaaaaatagaagaaaaaaatttctctaaaaa

SEQ ID NO: 4345 - DNA, 1115 bp, Zea mays
  Clone ID: TF_ZmC11815_2
cattgggtacctcgaggccggccgggcggacttgtccgccatatcctctccagctttccgctccgcccttgtcgctcgtccagccaccgtgcccgtgcccgtgccgccgagaattctatccagaagcaagcaacaagagcccacccccgcttcgcgcgctctttcgtgccaggcaaacacagagcacagctatctgctcgtgtcccggtccgtccaactcgctcgctcgctcaatccactgatgatggggatcccgctggtgtgctactgcctcgccgtgcccaagccggtcatcgccttctgcaggctgctcagcgccgtcagggacgccgccctgctgatgctggccgtggtggggctgtgccgcttcccgcccgacggcgcggtggacgccggccaccagcccggcgaggtgaaggcccggctccccgccgtggagtacggccagctcctggccgagcacgacgagcagcagcagtccggcgaccacgactgcgacggggacgccgcgtcgtcggattgcatcgtgtgcctcgagacgctggaggcggcggacgaggtgcggcggctgggcaactgcgcgcacgccttccaccgcgcctgcatcgaccgctggatcgacctcggccgcgcgacctgcccgctctgccgctccgacctcctgccgcgcgcgccgggctgggccagccggctcggcctgggccggctcacgcgcgttcggtgaggaggaccgtcttccagggcagtttttaatttgtctattggatgatggggcgcggacaggttagcgacggcgatcgcccgggtggtataacagctgctctgcctgccatcagccaaccgctaatctacgggggggcttcattagtacgtaaaaggcgcctcacacttggtatacgtaaaagatatactagttattaatacgttaaaggattgagtatacggcacctagatgtttcatttgtacacgattttaatttcagtctctcctcgaccatataatagtaattaaattagttcgtcaacttattgtgcaacttggtgagcttagcagcagcaagtttgcgcaactggcagtgatgaataatttagcaaccaacttgaatcctcttatc

SEQ ID NO: 4346 - DNA, 1128 bp, Zea mays
  Clone ID: TF_ZmC11815_6
ttgggtacctcgaggccggccggggcttctgttctgcctgcctctatggctctatataaccagcgggccgcttgaggtctcccggggacttgtccaccgtatcctctccagctttccgctccgcgcttgtcgctcgtccagccaccgtgcgtgcccgtgccgccgagaattctatccagaagcaagcaacaagagcccacccccgcttcgcgcttgctttcgtgccagacacagagcacagctatctgctcgtgtcccggtccgtccaactcgctcgctcgctcaatccaccactgatgatggggatcccgctggtgtgctactgcctcgccgtgcccaagccggtcatcgccttctgcaggctgctcagcgccgtcagggacgccgccctgctgatgctggccgtggtggggctgtgccgcttcccgcccgacagcgcggtggacgccggccaccagcccggcgaggtgaaggcccggctccccgccgtggagtacggccagctcctggccgagcacgacgagcagcagcagtccggcgaccacgactgcgacggggacgccgcgtcgtcggattgcatcgtgtgcctcgagacgctggaggcggcggacgaggtgcggcggctgggcaactgcgcgcacgccttccaccgcgcctgcatcgaccgctggatcgacctcggccgcgcgacctgcccgctctgccgctccgacctcctgccgcgcgcgccgggctgggccagccggctcggcctgggccggctcacgcgcgttcggtgaggaggtcaggaggaccgtcttccatggcagttttgtctattggatgatggggcgcggacaggttagcgacggcgatccgcccggttggtataacagctgctctgcctgccatcattaacccgttaaaatatcgggggggcttctcgaggacgtccgggttgacacgattttcattctcttctcgaccatattaatagtaattaaattagttcgtcaacttattgtgcaacttggtgagcttagcagcagcaagtttgcgcaactggcagtgatgaataatttagcaaccaacttgaatcctctcatcaaaaaaaaaaaaaaaagcaaaaaaaaaaaaaaaaaagcggcc

SEQ ID NO: 4347 - DNA, 1030 bp, Zea mays
  Clone ID: TF_ZmC27970_1
ggcacggcacggcacggcacgaccgagctccagtctgcccccgcccccatccgcacgtccgccttgatccggcaaatggcgtcgccggcgcggcggctcctgcagaccaactccgtgcagtacccgacgctccccgcggccgacccgccgagcccgctggccgtcgactccgacgtggtggtcatcctcgccgcgctcctatgcgcgctcatctgcgtcgtggggctggcctccgtggcccggtgcgcgcgctcccgcgccgcgcccgccgccgccaggagggggctcaggaagaaggcgctcagggcgctgccgagcctcgcgtacgaggacgccgtggcggcccgggccgcggacggggcggcggaggtcctggcggagtgcgccatctgcctctcggagttcgcgccacgggaggaggtccgcgtgctgccgcagtgcggccacgccttccacgtcgcctgcatcgacacctggctcgccgcccactcctcctgtccctcgtgccgccgcgtcctcgtcgtcggcgacgcctccagtaagcgcccgccccagcctaagcgctgccgcaagtgcgaggcggccatggacgagccctcctcgtcgtccggttccgccggcgacacgcctgccggttcctgacccttctcacgagtgccacagccacgccgccgccgccgccagtttctagcaactgggctggcgatcttagctccactggaattccctcatcatcaggcgccgccggtttctagcaactgggttggcaatctttagctccactccacttcattccaaggattcgaacgttgatgctgtaaattgcaggttggtcgattatgtacatatttattttcagattagaaacatgctaaagtatcgtgtgaatgtgaatctcagaaacagaatctttcttcgcaactcagtttctcataatcttgccggcagcatgtttgacttctttttttctgtattagtgaactcatataatacagttcatattggaaatcacagggccttcttggctggc

SEQ ID NO: 4348 - DNA, 656 bp, Zea mays
  Clone ID: TF_LIB3608-056-Q6-K6-C10
ccaggtctcaaagggccagtaccactgtgacggatgtggaatatgtaggtaagcaccaccacgctgatggctacgtctaaagacttgacgcgcagaagtgtaaaacttctgtcagccgttcaaaactgataaattcgggttcctcgtcttcttgttgtttatgcagaaccggcggcgtggagaactttttccactgtgataaatgtgggtgttgctacagcaatgtcttgaaggattcccaccactgcgtcgaaagagcaatgcatcacaactgccccgtctgctttgagtatctgttcgactccacgaaggacatcagcgtgctgcaatgtgggcataccatccatttggagtgcatgaacgagatgagagcacaccatcacttctcatgcccagtgtgctcgaggtccgcctgcgacatgtcggccacatggcggaagctcgacgaggaggtcgcggccacgccgatgcctgacatctaccagaagcacatggtgtggatcctgtgcaacgactgcagcgcgacctcgagcgtgcggttccacgtgctggggcacaagtgccccgcgtgcagctcgtaccaacacccggagacgagggctgcgtgcccccagatctgaggcgaaccagaggccatgtcacaaaatgccagggag

SEQ ID NO: 4349 - DNA, 1041 bp, Zea mays
  Clone ID: TF_ZmC2210_2
gccggccgggccgggatcagccgcagtcgcgtcgcgtcgcgtcgcgtccagtccaatcctcggagcctcacacgggcggacgagcgggagcttctcccaatctcccctgcccagccctgccctgccgccgcgcttagcttcgcatcttcccctcctcctcctcctccttcctcggccaagcgaggagcgaggcgcgggcgcgagcgcgtcgttgagatggattcggaggcggtgcagcacgggtgagctgttctctctgctccaaggaacaggacgtgcaacagaactgctccagctgtggggcctgcatgggcaagtacttctgtaaagtatgcaagttcttcgatgatgatgtctcaaagggccagtaccactgtgacggatgtggaatatgtagaaccggcggcgtggagaactttttccactgtgataaatgtgggtgttgctacagcaatgtcttgaaggattcccaccactgcgtcgaaagagcaatgcatcacaactgccccgtctgctttgagtatctgttcgactccacgaaggacatcagcgtgctgcaatgtgggcataccatccatttggagtgcatgaacgagatgagagcacaccatcacttctcatgcccagtgtgctcgaggtccgcctgcgacatgtcggccacatggcggaagctcgacgaggaggtcgcggccacgccgatgcctgacatctaccagaagcacatggtgtggatcctgtgcaacgactgcagcgcgacctcgagcgtgcggttccacgtgctggggcacaagtgccccgcgtgcagctcgtacaacacccgggagacgagggctgcgtgccccaggatctgaggcgaaccagaggccatgtcacaaaatgccagggagatgccgtccaacgatcatctgtctgcaggacgttgctgcgcttaaagttaaaggctagcgcgagaccatgctggtagtccagtcttgagtttggtgctggagcatttgtaatgttccggaaaatgtatgcgtccatgagtctgtccaggcagta

SEQ ID NO: 4350 - DNA, 719 bp, Zea mays
  unsure (1)..(719): unsure at all n locations
  Clone ID: TF_LIB5045-072-A1-K1-G9
cctcgnagccggccgggccgggggtctcgctatctacacacaggaaaccaagcttgtcatccgggtcgcatcgagataactaaaacaccatgacgcaaggttccgacgaaggtgctggcgctgcgcacccgtcgtggccgagcggcgccgacgccgacacacccgtcgcgcccacggcgggtgcggcggccgccatgacgctcggcagcatcctcaccgtgtccggcatcctcctgctcttcgtcatcttcgccttcgccctcgcctccctccaatattgcttcgagtcccgcagggatagggacagggacgcacggaccgggcggccggccggtagtagcaggggcgggatgatgcgggccagcaggggcggcggcgtcgacccggagctgctgcgctcgctgcctgtcacggtgtaccgtgcgccgccgcaaggttcggacaagggacggcagcagggcgtggtactggagtgcgccgtgtgcctcgccgagctccaggacggcgaggaggcccggttcctgccccgctgtggccacggcttccacgccgagtgcgtcgacatgtgtctcgcctcccacaccacctgcccgctctgccggaccaccgtcaccaagcccgacgcatcgcctccgacgccttctttggctcttccacccgtaccgccggagcccgcgaactactacgccaccgccagcttgcccgccaccagcgtgctt

SEQ ID NO: 4351 - DNA, 708 bp, Zea mays
  Clone ID: TF_ZmC39016_1
ttccggctgctggcatggaacgccgtcgtctactcgctcccgttcctcctcttcctcctgctctgctgcttcgtgcccgcggtcggctacgcgctcggctacaacatgaacacggcctccgtcggccgcggcgcctccgacgagcagctcgccgcgctgccgcggtggcgcttcaaggagcccgacgtggcaagggaccgggagcgcgatgaccaggagtgctgcatctgccttgcgcagtacggggagaaggaggaggttcggcagctgccgtgcacgcacgtgttccacctcaagtgcgtggacaggtggctcaggatcatctcctcttgccctctctgcaagcaagagctcaagtgactgatgcctactccgctcctacagagagatgtgggtgtattctccctcccttactctgactgcgcctgccgatcagccacacctactacatatataccacgacgaccgccggacgatgcgtgcgtcgcacctctcgcgaggatctctcggcgggcccgtgctgacctctagtagacgctgacaaatgatgtgcagcaggcggcaggtgaattcggtaccttttttttttgtctagactagatcaaatgggaaatgtgtaaacaaaaaggtctcttttttttatgtatgtaacaatgtgatgtgcgcccttgcttcattcaagactgaatgcatacttttctttgtgcc

SEQ ID NO: 4352 - DNA, 1206 bp, Zea mays
  Clone ID: TF_ZmC235641_1
gccggccggtcaccgaaatgagccgctcgagccgcgcacccacccggccagatctgagttctgagttctgaaccccacgacaaggcgagagagaggggaaggaaaggaacgcaaaacatctatcaccagttcacgacgccaccagccacctccaacatttactccgctacccacgcggccccgattccacccagggcacccagcagaggcaccaccaccgtgcgcccgctccgccaatgccattccgccgctccctaccgcgatgcccctcctctcctcgctctccaacctgggcctcggctactccatcgccatcgcgctcggcttcatcatcctgttcgcctccttcctgctggctttctacttctgcttcggccgcggcggggactactgggccggggaagcagtcaccacggcgtccagctccggccacctctccatcaccgtcccgcgcgtgctcttcgtcgcggaagggtctgagtcccccgaagacgacgcttacccctcctccgccgccgccgcggcctgctcccccgtcgggctcgacgcggccgccatcgcttcctaccccaaggtcgccttctccagcagggccgccgaggcagacgccatgtgctccatctgcctcagcgagtacagggacggcgagacgctgcgcgtgatgcccgagtgcaggcacggcttccacgtcgcgtgcctcgacgcctggctgagccggagcgcgtcctgccctgtctgcaggtcctcccccgtcccgacgcccaactccacgccgctcgcgacgccgctttccgagctcgtcccgctctcgcagtacgccgccgaccggaggcgccgcagcttttctggtcgccttgcacagaaccacctgacctgatgtggttagcttgcttctctcgtgggtttgttgttaaatggttcttggcgtttggtttactttttccatcattctcacctgcccaagtccaaggaaacagccaaggagtggacgatggagtagaagaagatgcggtcatttatcacgctggagaaatggcgaccagtatgaggatgtagggcactgagcgtacatgcgtacggtgtagtactgcatccccttgcgctcgctacgtccggaatacgcgtcttcatccatcaggtacagtcagagcaggtcggcactccactgccaaccgcacatggacactctcaagagcattttctagt

SEQ ID NO: 4353 - DNA, 2423 bp, Zea mays
  Clone ID: TF_ZmC4657_9
tgggtacctcgaggccggccggggaggggccagccactccccgtcggatgccgccgccgccatgaccgtcacggccgccgcatggccggtatgcaccatctgctacgaggacctccgcccgctctccgaccagcacctccactgcctccccgcctgcggccacgtcttccacgccctctgcctggagcaatggctggagtactgccctgggggcaagaagaagcgcacctgccccgtctgcaagcagccctgcggcgccgcgcacccgccgacccgcctctacttcagctccaccggcacgtgcccgacccaggcctgctcctccccgggaagcgcctccgggagcgcggacccggaggcgctcgccgccgaggtcgcccggttggagcagaaggcggcgtcgctcggcaaggtggtcgaggagcagcgccagagcatcaacgatctcaagtctgaggctgcctggttgagggagcaggcggaggcgggagactttatgctgcaagccgcgaagaaggacaaagaatctgtccagatacttctgaatgcgaaaacagaggagttgtcgaggaagacatcagagtgcgggaggttgcaggagaagagccttgcattagccaaagagcttgcggcgctgaagctgtccgcagacatgaaccttcaggaggaagaaatcatgaagtttgcttcacttggtaaccagggaaacctgcagaatgctgttgatgttttaaagagatcacttgctattcggaacaagagctacaaggaattgatggtccagtgtaatgttttgggaagatcagagtctcgcatgcagcagaagcttgaaaaggccaaagaaattttaaagaagttaaaggcaagggtacaggaacttgagaaggaattagaagataaagaaaatggtctgttaagggacttgaagtcttcaaagaaatttaaagcagaccatataaaatctgggaatgccacagctaatagtgctttcactagttcaagtcctggatatgaaaatcaaacaaacaagctcgatgaggtgatgcaagatccgtgcaacgacaagactcactttgaccggtcaaaatctgaagctgggagtgttctgaatgcccaagacaacctggacaacaaggatgtagatgtgatagacctagaagccaatgattctgtttttggatatgaacagaaggctcagttttccgccaagccattcgggaccgaagatagcacaccgaattccgagaacaagtctagcctttgccaaaatgatgaccgacagtccgtggcatctgaatgcacaaccgcacacgcaacaaatggaggacccttcctcaaacacagagaagcaactgtaaaatcaacctttatggcgaacattagggccaaactgcatattcctcgggagagtccttccgtgagaactaacgcgacaagttcaacgctggagagtgaaacattgacaattgatggcatctccaaacaagcaacgagattggcatctggcactggacctcagcagatccacaacttcaactctttttctgatgatttccaagcgccaggaattcctggcacggatggagcaaggagaagcattggcaaatggtaagggcccagcagatcccagttctgcgagtgggagcagaggcaacctgatcgccgtgggaccggatggccgaggaggcaaggtcaagatcctgagggaccttggccgaccccaggatagcaagtcccaagcgctgtggcccaaggcgcagaaggttggaggcagaggtggccagtcccagatccatcagttctttggcaagagatgatcctgctactgaatgaatatgttgtgccgcatggagcctggttagctgaacctaaatcctgcatgcagctgtgtcggtatgcaatgcgtgctgtcgaacaactgaacgtgtatctctgttgtgcttgagctgatctacgtgtggatagttgtagagcacacctctggctcagcttggacgtagccctggtttcatcacatggcagctggatgcagcagaagagggaaacaagtttgttgaagagtctgatggtaggttctgggaggtggtgtgggcttgggagagcctacctacactacacgtcagctgtgttggatctaactctccaatcataacaggacaccgggcatgtatggcgcttctagtttgtttgtttgtgaggtagtgcaagtgttgagcttctctggagtccctgaaaaggatgtttagtggacagctacacgcctacaccagcttccgtctttttcctcaaagattttagctgcgataattgatgtacttgttttgtatagtaatccttttctatttaaatatagacataaaaatcaagaactaaaaaaaaaaaaaaaaaaaaaaaaaaaacccacgcgtccggttctagatcgc

SEQ ID NO: 4354 - DNA, 1346 bp, Zea mays
  Clone ID: TF_ZmC9505_1
gtgtgtgtctagtcgtccccttctcccatcggcgggagggcggcgtcgtcagcccgcaaaaaagcaaagcgtcacgagaagctcgttccttgacaggcagccatgattccaaggacgtcctcggtctcttcgtcggcggcggcggcgcccaccgcgggcgcgccgccggcgtggccgagcggcagcgacgcggcggcgttccaggcctcgggcagctcgggacatcagcaggtggtcatcagcaacggggtgctcctcgccgcggtcatcttcctcttcatggtcgttgtgttcgtcttcctcctctacctctacgccaagcgctacctgggcgccgggaacccgctcgcggcgccgccgtcctcgcggttcctcttcgtggccgcgtccccgctcccgcagcgcggcctgcccgcctccgccctgcgctccctccccgtcgcggtctacggcggcggcggcggcggcccgggcaccaagagcagcaaggaggcgctggagtgcgcggtgtgcctgtccgaggtggccgacggcgagaaggtgcggacgctgcccaagtgcgggcacgcgttccacgtggagtgcatcgacatgtggttccactcccacgacacctgcccgctctgccgcgcccccgtcggcggcgacctcgacgcgctgccgcgggaggagcccttcggcgcgtcgctcgagttccccaccaacgtcctgttctggggcacccacgacgaggtcgccaacgccggcctcgccacgcccccgcccccgccgccgcccgtcgccagcgccgtctccgcgagctcctcggcctccgggcgtaggaaggagaacctggtcatcgacatcccgacgcggcccgtggccctgaccaccacgccgcccttcaactccccgctgccgacgagccgggtggctgggagcgccgacgagacgcggtccccggtctccgccaggctgcggtcgctgcgccggctgctgagcagaggcaagcaggccgtggtcggcacctcctacagcccgcgcggcgccggtgacgtcgagcaggggctcgcaggagccgaggccgcccgcccgcccaagacgcctccggcgtcggactgattcagatccccccgagctccgggtcgcatttggctcgactcgccgatcaccggagcgcgcgtagcgtatgcgttcatttttgttccccctttttcttttttttatttacatcttgattcgaaaaaggaactatcggtcaaaaggttcctgtgtaaacagaggaaaagaccgatgctggttggttgttgttgggggaaaaaatggtggatttgttcatatgtttaccaagaaacttttcttgaaaa

SEQ ID NO: 4355 - DNA, 1399 bp, Zea mays
  Clone ID: TF_ZmC9623_1
ccggccggagctcttgcattaaacatcccttgtggacggatttgatttgagggtagatataggttggaacccctcgaggccggccgggacggagccaatccctcctgctggttcgatccaaaccctaccaaatcgatggccgacggcggcaactgcgggccgggcggcggcaatgcatcggcgccggtgtgcagtttcgtgaggaaaccacccaagaacatccggaagcgccccgccgcgcccgcggggtctgatgacgacgacgacggcggcggcggcgccctcgccgccgcgcgctccaagaaggggccaccgtcctcaaccgctggcaagctcgttttctccaccgcaggtgcttcctccgaggcgccgcggttccagtacgaatcgtcccggacgatccagtccacggacacccgcgcaactgccacgctcgagacggagacggagtttgaccgcgacgcgcgctccatccgcgagagacagctcaagcaggccgaggagtccctcaagaagaacccctccgctgttgctgcttccgcctccgcctccaccgctggagaggtgtacaaggggatccacggctacacggactacaaggctgggttccgacgggagcacacggtatctagcgagaaggccggcggttcgcatggtccgctccgggcgtccgcgcacattcgcctctcccagcggtttgactaccagcccgacatctgcaaggactacaaggagacggggtactgtggttacggcgattcctgcaaattcatgcacgaccgaggggattacaaatccgggtggcagctcgagaaggaatatgaggaggctgagaaggcccgcaagcgacgaattgccatgggtggtggtggtgagagtgatgatgaggcagcagatgacgaggatgaggaggaggcgctgccctttgcctgcttcatttgtcgggagccattcgttgatccagtggtcaccaaatgcaagcactacttttgtgaacattgcgctttgaagcaccactcgaagaacaagaagtgctacgtctgcaacaaaccgacgctgggcatcttcaacgctgcacaggagatccgcaagaagatggcacaggacaagaagcagcagcagcaggagtaggagagctcaaaacacaccgttgctaatttagctgtgttgtacaacgatgattggtgcgataactagagtccggtatttttcgccatcagataaaagagaccaagttttgaacgatcacaatgaatgcattcagatccagtcactagatccccacccccagacaggccatggtgcctgttggttcctggcgatgggcaaagctccaaaggtacagtgctagactgccaatgtgtttgtttgttgcagggcacccgaagctctttttttg

SEQ ID NO: 4356 - DNA, 788 bp, Zea mays
  Clone ID: TF_ZmC38394_1
ggccgcttttttttttttttttttagttttagcattcgaaactttgtagatgaagctgctgcagaggttgaacaaattcagacactgccgtgaaaaaacagtagttaatgggtcagtgaccagatgctaaaacgctggcacgttactatcttcttggtgccgctgacaggatgccggggaggcgttcgatctccttcgggttggttagcttgcgaccctgttgttgctggcaccagtcggcctgggattgccgcctcaccaagacgtgcctcgcccagccctatcttctcccgggcattcggctgcatcgtctcctgcaccttctgtggctccactggcagcgcctgcgcctccgctctgcgctggtgcgctgtgttgttgcgccacagacacaacaccaccaccagtcgtgctccgtggcgaatcatactcagcagcgtcacccgttgggagctggaaccggcagacaggacaggtgttcctgatggcaagccacgggcggatgcactccccatggaagtagtgcttgcaggggagcctaaggacactctgccccgccacaacgccgtccttgcacacagcgcagccgtgcgaggcctcctggtcgctgagcgcaacctctggtaagccgtccaccaccgcacgggatgccggcagccgccgtgtagcctccccgacgcggcgcgcgagcgcgtcgacgaggttgaggtcggcgtcgtcggagtcggtgtcctcgccgcccaccaccattcggaagggccgcgtggcctgtggcgctcggaggtcga

SEQ ID NO: 4357 - DNA, 343 bp, Zea mays
  Clone ID: TF_uC-zmroteosinte020e08a1
ggaatgcacaatatctatttttgtaaaatgagtgctttgagtaaaaaaaggaaggaaaatagttccaaaagggaaaaggaaggaaaagaattccaaaagggaaaatgtgagaggtgcggaggggatagaggacatgaagaatctatacacttcatttctgaagaaacatgaaacacgttgctacttgattttcagggcaacagatttgcatataggacaccagttcttctgtcgaagccagtgctctatgcaggaaaggtggtagtagtgtttacatgccatcttgcccacatcctcacccaataaatactcctcctggcatatgctgcattttgtttcacaa

SEQ ID NO: 4358 - DNA, 1666 bp, Zea mays
  unsure (1)..(1666): unsure at all n locations
  Clone ID: TF_ZmC28409_1
gcacgagccggactcctgttttatttcggatcgcgacgccacaatcccaccggccacagcacagaccaggccgccgccgccgccgccgctctgccttgttcgcagctctgttggccgctcgctttcgcaacattattatacccacccaatcgaccgacgcaatcgaaaccgcctcccatctcatccgtctctctcgaatcccaccgtgcgctcactgcgatggacggctcatccaagcggatcggcggtggcggcgacgacatgcccagccccgaccacgaccagaacgccagccccaacgtcccgccgtccgccgctggtgacggcggcgcatcagccactgcggcggcagcgcccgccgccgggaggcggccgttcaccagcctcagccaggaggaggccgacctcgcccttgcccgcgtcctccaggagcaggagcgggcgtacatgatgctgaccggcggcgagtacgcgatctcggacgccgagagctacgactacgacgaggaggaagacggcgatgggagcgactacgaggaggaaggcgaggcgctcgacgaggacgagcaggttggggacgcggaagcggagggggctgagggggacctggacctggacccttctcagtacgaggacgacggggagggcgacgtctccgacaggctcatggcgctcgtcgggatcggtgattggcgagcaatggagcaggatgatgctggggacgaggaggacgacgaagatgctgaggttcatacacagggtgcatgggaagatgttgacccagacgaatactcttacgaggagctaattgcgctgggtgaagttgtcggtacggaaagcaaaggccttgctgctgacactattgcctcattaccttgggtgacttaccaggcacaagacaagcaagatggcaacatggaacagtgtgttatttgtcgtgtggagtttgacgagggcgagtcattagttgcactcccttgcaaacatccgtaccattctgagtgcataaaccagtggctgcagctaaacaaggtatgcccgatgtgcagtgctgaagttcccacttctgtgaacaagcaggcatgactactcaacctgaagaagatagcggtggcttggtatttatctgccattgatggaatgaaagaagcgccaactgttaaattgttcagggaagcaagggaattggctgggttctgattccctgttttcttcagttcttatcccccctcccctgtacgcatgctaattctatggccataccgctggttatttatgcattccattagatgcggaggattcattgcttgtagatgtaaatcaacaatcataccaccatagtcaatagcagttgttttaatgccaatagcaacgttcatgtttaaaatggtagcatttttgttccttgttttctagaccggacattttatgttcctgaagaaaatgattgtgttacaaaaaaaaaaaaaaaanaaaaanaaaanaaaaanaaaaaaaaanaaaaaaaaanaaaaaaaaaaaaaaaaaccttgggggggggcgcggggcccaaattccccttatggggaggggattaacccgccgccctggcgcggggtttaaaacgggggggaggggaaaaaccggggggtcccccaattaaatgcctttggaaaaaacccccttt

SEQ ID NO: 4359 - DNA, 1255 bp, Zea mays
  Clone ID: TF_ZmC1149_45
cctgccgggatctcccgttcaggcgttcatccctctttctctcgtggcgacgaagacgaccgacgccaggtgccaggttccgtcgggtccttcgccggcgaagagcatccaccaggcgacccagtgctgttctggtgcggtttcattgcggaagttttgttgtgggattttccggtggcgaagatgatccgactacccatgtacgcggcgttcagcctgctggcgacggcttcggcggcgtactacgcgttcagcagccgggagcagttctacccggcgatggtgtacctctccacctccaagatctgcttcgtgctgctcctcaacacgggcctggtcgccatgtgcgtcgcctggcagctcgccaggcgcctcttcctcggctccctccgggaggccgaggtcgagcgcctcaacgagcagtcctggcgggaggtcatcgagattctcttcgccgtcaccatcttccggcaggacttctcggtgtccttccttgccatggtcgctgcactgcttcttgttaaggcactgcactggctcgcgcagaagagggtcgagtacatcgagaccacaccctccgtgcccttgctctcgcacatcaggattgtctccttcatggttttcctgctcaccgtcgattgcctcttcctgtcaaactcactcaggtcactcatacagaagcgggaggcgtctgttgccatcttcttctcctttgaatatacgatactagcaacatccactttatcaacatttgtgaagtacatattctatgtcagtgacatgctaatggaaggtcaatgggagagaaaggcagtttatacattttacttggagctcatcagtgaccttgtgcacttgtcattatacatgctcttcttcatagctatcttcttgaactatggtgtcccgctgcacttgattcgtgagctatatgagaccttccgcagcttcagaattcgcattgcagattacatacgttacagaaagatcacttccaacatgaatgaacgctttccagaagctacatcagaagagctcgatgcgagtgatgctacatgtattatttgccgtgaggagatgactacagcaaagaaactgctctgtgggcatctgttccatgtgcattgtctgaggtcatggctagagcgccaacacacttgccccacgtgcagagctccaatcgttcctgcagataatggacgtgctgcatcatcacgacaacatggagcccaggctggggttcaacctggtactg

SEQ ID NO: 4360 - DNA, 1365 bp, Zea mays
  Clone ID: TF_ZmC1149_78
tgggaccctcgagccgccgggcaagagtttccaggcctactccaatctccaggcccaggcaaaacagcaccggaccgcgtgcgtttcgcttccgccccctgctgtttctgtttcttggcgttcaccccctctctctctcgtggcgacgacggcgaccgtcgccgcccccctacgcgctaggtgccagggtccgtcgggtccttcgctggcgacgagcacctaccaggcgacccagtggtgtgtttgggaaggtttccgcggtcgggcggcgccccccagtggcgaagatgatccgactaccgacgtacgcggcgttcagcctgctggcgacggcatcggcggcgtactacgcgttcagcagccgtgagcagttctacccggcgatggtgtacctctccacctccaagatctgcttcgtgctgctcctcaacacgggcctcgtcgccatgtgcgttgcctggcagctcgccaggcgcctcttcctcggctcgctccgggaggccgaggtcgagcgcctcaacgagcagtcctggcgggaggtcatcgaaatcctctttgctgtcaccatcttccggcaggatttctctgtgtcctttctcgccatggtcgccgcgcttctcctcgtcaaggcgctgcactggcttgcgcagaagagggtcgagtacattgagaccacaccctctgtgcccttgctctcgcacatcaggatcgtctccttcatggctttcctgcttactgtcgactgcctcttcctgtcaaactcgctcaggtcactcatacagaagcaggaggcgtccgttgccatcttcttctcctttgagtatatgatactagcaacatccacagtaccaacattcgtgaagtatatattctatgttagtgacatgctaatggaaggtcaatgggagaaaaaggcagtgtatacattttacttggagctcataagtgaccttgtgcacttgtcattatacatgctcttcttcatagctatcttcctgaactatggtgtcccgctgcacttgattcgtgagctatatgagactttccgcaacttcagaattcgcattgcagattatgtgcgctacagaaagatcacttccaacatgaatgaacgctttccagatgctacatcagaagagctcgatgtgagtgatgctacatgtattatttgccgtgaggagatgactacagcaaagaaactgctctgtgggcatctgttccatgtgcattgtctaaggtcgtggctagaacgccaacacacttgccccacgtgcagagctccaatcattcccgcagataatggacatgctgtatcagcacgacaacatggagccccagctggggttcagcctggtactgccactc

SEQ ID NO: 4361 - DNA, 1373 bp, Zea mays
  Clone ID: TF_ZmC9227_1
agcatagtcaccaaccctccaaaaatccggccaaaacatcagtttcccccaggtaaagccaatcctttgatgccttctttttatccccaccccaatctcgcctaatgtcattatacatgctcttcttcatagctatcttcttgaactatggtgtcccgctgcacttgattcgtgagctatatgagaccttccgcacttagaattcgcattgcagattatgtgcgctacagaaagacacttccaacatgaatgaacgctttccagatgctacatcagaagagctcgatgtgagtgatgctacatgtattatttgccgtgaggagatgactacagcaaagaaactgctctgtgggcatctgttccatgtgcattgtctaaggtcgtggctagaacgccaacacacttgccccacgtgcagagctccaatcattcccgcagataatggacatgctgtatcagcacgacaacatggagcccaggctggggttcagcctgctgcaggtactgccactccatcctcagaaggagcaccaggtgagaacatgagcaggcaccaagcaaaacttgaagctgctgcagcggcagcttctttatatggaaggtcttttgtttatcctccagcaaacaccctaaaaaggtctgttcctccccagcctgcatcaagtacaccacaatctgaagcaagtagctccaatcatcagtcacaaaaagaccaagaaatgcagtcccgaaacagcagcgatggtttagtgcctctgcctcttaatgcagatggtgctgttggttcaggaacaagcacaagggaccttgaaaattcactgcagaaggcacaagaaaactttattaagagccagattgagatgttacaaatccaactgcaaatggtgcagcgtggcgctgctgggttgagcagtagcgagaacactgagcacacagaagactgactgaatctgtaaacaggcactcctgcatcgtggagtaataatgagaatactgagcacacgcagctgaatctgtaaataggcggagatgaggatggggataaaagaaagcaatcaaagaattggctatacctgggggaaactgatgttttgcctggattttggtaggcttgttgactatgctttcctgttactgtgttagtgccttcttgccagcgttagatgtttctctacgtgtggtggtttctgtaggttgggtacatctaattgctagtttaattatacgattacacaaaattcttgtaccgagggaaaatagaaaggataattgtacaaatgattttttgtgtgcatatccatgataacgggattgtctgtagattttgtgtttactggagtaaaacagaaaatttggctgctgattggatgttg

SEQ ID NO: 4362 - DNA, 717 bp, Zea mays
  Clone ID: TF_LIB4826-094-A1-N1-H5
ccggccggggtccaccatatcctctccagctttccgctccgtgtccgcccttgtcgctcgtccagccaccgtgcccgtgcccgtgcccgtgcccgtgccgccgagaattctatccagaagcaagcaacaagagcccacccccgcttcgcgcttgctttcgtgccagagagacacagagcacagctatctgctcgtgtcccggtccgtccaactcgctcgctcgctcgctcaatccactgatgatggggatcccgctggtgtgctactgcctcgccgtgcccaagccggtcatcgccttctgcaggctgctcagcgccgtcagggacgccgccctgctgatgctggccgtggtggggctgtgccgcttcccgcccgacagcgcggtggacgccggccaccagcccggcgaggtgaaggcccggctccccgccgtggagtacggccagctcctggccgagcacgacgagcagcagcagtccggcgaccacaactgcgacggggacgccgcgtcgtcggattgcatcgtgtgcctcgagacgctggaggcggcggaccaggtgcggcggctgggcaactgcgcgcacgccttccaccgcgcccgcatcgaccgctggatcgacctcggccgcgcgacctgcccgctctgccgctccgacctcctgccgcgcgcgccgggctgggccagccggctcggcctgggccggctcacgcgcgttc

SEQ ID NO: 4363 - DNA, 1614 bp, Zea mays
  Clone ID: TF_ZmC3771_2
cattgggtccctcgaggccggccgggcagcggccttgtgatgacggtctcgcattaatggccgctccctcgctatcccctttgtcgtctcgtctcgcccccttccggcttaaccctcaagattctccctcgcctcctcctccttcccgcttgggcgggcgcggcaccttccggttccggtttccggggcctcgggcctcggcctcctatatatatacacgcgcgcggccgtctcctctctatactccctagcatgctcggctcgctccccggattgatcgagctcgctcgttgcagagatggacccggtgcctgccccctcctcttctcgccgggccgccgctgctcccggcccctgctgccgctttgacgcgctgcggcgggcgtgcgccgggaacgccgccgccgccgcgcgggccgccgggtgggcgatcggcgcgctgctcacctgcatcttcgccgtcgtgggctcactcgtcggaatcttcattggtgccttcatggggatgtctacggaaagcggcatgttccgcggggctggtgttggagcagtttctggagcagtcttctccatagaggctgttgagtcctgcatcgagatttggaggtccagccattcaggaaaatacagcattctctttgtgctggacatcatcttgagcctcttcagcggaagaattgtgtgggagaaagtcagtccagcgctacagcgtgcagtgcaaagccagatgagtctaatgagcacaccgttcatcgacaacagtgacttttcgaaaccggcagtacaggaggcatgtcaagggatttgattgataggatcccaaagacgaggttcagtgctgctagcaactgtgatcaggaaactgatagcagctgctgcccagtctgcctccaggatttcggagcacggcaattcgtgagggccctgcctcagtgccaacacatattccacgtgcggtgcatcgacagttggctcctccggcacgcgtcctgcccgctatgccgggccggtgttcacatagaccatatacatatgtaaatgaactcgcagggtggcacctggtgtattttcgtagcgaatacccgtgctcctgttggatatcacaagtatagctgtatacataggggttttttgctctctctttttgtcacttcttgagacttgcttgtgtggggctatgctttcagctgcacgtttttgtcgaagcatgatgccttgatatgtacatctggaaaatggaccgactaacaagctccctgaattctggcactgtgcttcaaaaaaaaaaaaaaaaaaaaaaaaaaaaaaaaaaaaaaaaaaaaaaaaaaaaaaaaaaaaaaaaaaaaaaaaaaaaaaaaaaaaaaaaaaaaaacaaaaaaaaaaaaaaaaaaaaaaaaaaaagggcccttgggtttttacccctgttaaagggcaaattccaacaaactgggggccgtaacaaagggatccaactttggacccaattttggggaaataagggaaaaagcgtttccctggggaaaagggtaacccgttaacaattcccaaaaacaaacaacccgaaagaataaagggaaaagcctgggggcccaaaggagggaccaaacccaaata

SEQ ID NO: 4364 - DNA, 699 bp, Zea mays
  Clone ID: TF_700345248_FLI
agcaagtatatcaagaattgtcatgttaactgaggcgctatttgaggtgttggatgaaattcaccgtcaacctgcatcactttcactttccatggtgtctgttcaggctcctgaatctgtagttgattcgttgccatgtgccatatctgcctaaccgaatatgaggacggagaccagataagaacccttccgtgcaagcacgagttccacctgcaatgcgttgacaagtggctgaaagaaatacacagggtgtgccctctgtgccgtggagacgtctgcgaagtcgcctcgtgaagaccttggcgctgccatccttccgatgtggcgccggtggatagggcaccaccgccaggcgccagctgttccgtggttgaagctggttcggtcaggcaatggtgatcttgtcaacttggacagttgacaccgcaagagcacgtcaactttgactgtctccctgccgaagagaatggccaaaccaaccctgcgaccgatgagtcgctgttcctgtcatcaacttttaagataccgagactttgtatacagtagcttttgtagcctcccgcctcgtgtatgacagcctgtacatatttgtaaattctggaatcaaatgtcacaatcccctgttctcgtgacctgatgttgtagggaacatattcggtgctgatggagccgggaacagagatgtgctgatggagatgg

SEQ ID NO: 4365 - DNA, 1329 bp, Zea mays
  Clone ID: TF_UC-ZMFLB73175A10_FLI
tagggagcatcgccgtgctgtttttgatagtggtaatgaacaaaacactgctgcatgtcctttggggattcatcaaattggccgatgcacctgtaattctttctttattgctgaagaatctagcgcccgagcaagtatatcaagaattgtcatgttaactgaggcgctatttgaggtatcgtttccttcgtcttcatttgattatcatcagcattaacattctacgtgattatgacacataattggcaacaacagagaaacctttttaggattgaactccagttccaggctttagtcttataatgctataatctactctggccagtttgaactggtgttactcatctgtgctgtagttttgaagtttcatagttaaaaaaacatatattcatataggaataacatgtcagaacaacaaataaatagtacacccaaaacttagatggttttatgacaattgaaaattttgtgaggccaatgcacatcaataaagtttgcaggcaatcatgggatggttcaggcatgtttgaagcacagtagatagaacgtttttaaaagtaaagttgtactttagttctgaaatttcaaaggaaattgttgcagtgtttggactatgaactccattgctactgtcacattttcagtacattactagttattactctaggtatgtgataatggcctacacgattcttttcaggtgttggatgaaattcaccgtcaacctgcatcactttcactttccatggtctctgttcaggctcctgaatctgtagttgattcgttgccatgtaagagctacaaaaagcttgagacaccccaatgcagtgatgatatggaacagtgccatatctgcctaaccgaatatgaggacggagaccagataagaacccttccgtgcaagcacgagttccacctgcaatgcgttgacaagtggctgaaagaaatacacagggtgtgccctctgtgccgtggagacgtctgcgaagtcgcctcgtgaagaccttggcgctgccatccttccgatgtggcgccggtggatagggcaccaccgccaggcgccagctgttccgtggttgaagctggttcggtcaggcaatggtgatccaacttggacagttgacaccgcaagagcacgtcaactttgactgtctccctgccgaagagaatggccaaaccaaccctgcgaccgatgagtcgctgttcctgtcatcaacttttaagataccgagactttgtatacagtagcttttgtagcctcccgcctcgtgtatgacagcctgtacatatttgtaaattctggaatcaaatgtcacaatcccctgttct

SEQ ID NO: 4366 - DNA, 1234 bp, Zea mays
  Clone ID: TF_ZmC3219_1
ccgcgccatgtcaggccctcgctcggcgccgatcgagcgccggcgggcgatccgccgcggaccgctgcatcccggcagtgcgccggaggactcctggaagaggtaaggatgtttcggacaagagtggtactgggagaagtgaacatgtatgaccgctaccaggattggcgcctgcacgtcggcgtccgcgcatacggcgtgttgctcgggggtggagacaaaattggatatcttaacataggcgttacgcggccaaggtcggcgccggaaacgtgggagggacaaagggcacaagcgtgaggggcgcaggggtggaggcagagttaccggtgggatcggcgacgacgtgtggtgcgcacccggcaaaccatgagcggcgaagggtatactgcgtgaactgcgaggtggcgcgctaccagatggtgtggaggtgcggccgcggcgccgagggggacaggtcccacagagaaaggccgtgcttgtcccggagggtgaccgtgcaggagcagatatcctcgtcattcatggactcgccgccgccgccgcacctcgatgcccccttattcggcgccgatctcatcccctccggccgcctccgccggatgcgcgggtggcgccactcccccggaggactcgaggaagagataaggatgtttcagacaagagtgttactgggaggaatgaacatgtatgatcgctaccaggattggcgccttgacgttgataacatgacatacgaggagttgctcgagcttggagacaaaattggatatgtcaacacagggttacgtgacgacgagattactcgcaaccttaggaaggtcaagcacccatccttcagttccttacggttcgcaacagaaatggaaagaaaatgcagcatttgccaagaagaatttgaaacaaatgaagagatgggaaggctagactgtggccatagctaccatgtgtactgcatcaagcagtggctctcgcagaagaacatttgcccagtttgcaagactgccgtcagcaagaattgaaatccaaactccagtcacgctgtctgtagatctgggtgaaaacagcaaattctgttgtcctgtacagcccgttatatatattattattgtatgaacacaatccattcgtttcatcttgcagaaagaaaatgccatgttttggtcatgttccatcaaaaaaaaagggcggccgctcgcgctagttctagatcgcgagcggcccacaccgtctg

SEQ ID NO: 4367 - DNA, 1096 bp, Zea mays
  unsure (1)..(1096): unsure at all n locations
  Clone ID: TF_ZmC3219_2
cgtcaccggtgggatcggcgccgacgtgtggtgcgcacccggcatacccttcgcggcggaggcgtcctccgtgaactgcgtggtggcgcgccaccagatgttgnnnnnnnnnnnnnnnnnnnnnnnnnnnnnnnnnncccacagagagaggccgtgcttgtcccggagggtgaccgtgcaggagcagatatcctcgtccttcatggacnnnnnnnnnnnnnnnnnnngcgatgtcgccttattcggcgccgatctcnnnnnnnnnnnnncatgtcaggggacccgcggctcacggtagagcgccggaggactcgaggaagagataaggatgtttcagacaagagtgttactgggaggaatgaacatgtatgaccgctaccaggattggcgccttgacgttgataacatgacatacgaggagttgctcgagcttggagacaaaattggatatgtcaacacagggttacgtgacgacgagattactcgcaaccttcggaaggtcaagcacccatccttcagttccttacggttcgcaacagaaatggaaagaaaatgcagcatttgccaagaagaatttgaaacaaatgaagagatgggaaggctagactgtggccatagctaccatgtgtactgcatcaagcagtggctctcgcagaagaacatttgcccagtttgcaagactgccgtcagcaagaattgaaatccaaactccagtcacgctgtctgtagatctcggtgaaaacagcaaattctgttgtcctgtacagtccgttatatatattattattgtatgaacacaatccatttgtttcatcttgcagaaagaaaatgccatgttttggtcatgtttagggctgacaaaaaaaaaaaaaaaaaaaaaaaaaaaaaaaaaaaaaaaaaaaaaaaaaaaaaaaataaaaaaactaacaaatcaaggttacccctacctgcaacaacgccccataacaaaagaaaaatagaagaaaactaaatgaaatacgacgaataaaaataaacactgaaaagtaacatgataaaataattggggcgctggtttaaaaagataaaatttacaaccacccagctttgaacttat

SEQ ID NO: 4368 - DNA, 2286 bp, Zea mays
  Clone ID: TF_ZmC4668_1
gggcattgcttacctcgaggccggccgggctcccttcttcgattgccgtcttctctggcttccattttcgcgaggaggcgaggtggacagagacgccgccgccgcttccgcttcgacctcgacctcggcttcggcttccacgagaattctagcaagtcttctggagaatataatccacatctgtttattttgctgcattttggtatggacgaatctgcctgtagatccactgccccagttgggtttcttagaagaggttcgggcatttccttgagaaatcaaagcaatgaggataggtcaaatcagtacaacaagcagccagggaagagttcaaatcccaatcctgtaaaattacggttcactgaaaataaagagaaaccaaggtattttcaagggacatttcattcatcaggctccagggcctcatctgtaagctcttcaaaagctcctgctagaaaatactgcgacgagagacagaaacagccctttttggcagagacagacattgctgaaagcagtaacagaagaactgaggttagacgcctacaaagtggcaagaaagcttctgtatttggtgatgggcatccatacacacagaagagtatctcagaagcttcatcatcctcaacaattactggaggcttgccagaagagcatgatcttggagctttatatgtttctggttcttcaggtagttctgcacatccagttaatcccaggaatgctgcattgaatgcttcggcacatatgcaaaaggataaagaagaaatgagttcaggtagacctcaaggtgctcccacttttgttcgtcggcatactttacctcaaagtttttccactggtgtcaagtcaccaactgcccctggcactggagcacagagacgtggcctcaaaaatcttggttgcacttcaatatctgatgttctgccttcaggatgctcttcatctgattctgctcgtgataggagaatcgaagttacaaagaagagaacttctggtgcaggaagttcttcaagatcaaggataagtgaacaatctaatttcagtcagccacgtgctagttatcctggcagtactggtcctagagctagagctgctgaacaatcagcttctcaacaaacagcaaggaccaatagccgaaatattccggatcatacagattcaataaggactagacgaccttttactctgcgtgccagggagaggatgatgccaggtgaaagggaggacagtgtatttgctctgcatgagactgttgcaagcattcatccagaatgcggacattttcacatggatggtactcccccagagagattaggaagacccttttatgcagaactacctcatgcaatttattcatctaatcgtcaaggatcaagtagtcagacagcaaggagaagatctacgtctcgtactgaagaaagccctcaacggatgtttcatggtatgttttgggagagagatggctacagggggataaacatggaaggaattgcacaggcgttgctagcattggataggattgaacatgatgttgaattgacttatgagcaactgcttctgctagaaactaatctgctcttaagtggccttgatttgcacgatcaacatgaagatatgagattggatatcgacaatatgtcttatgaggaactgcttgctttggaagagcatattggctcagtgactactgcccttactgaagagcaatttaccaagtgtgtaaaccaaagtgtgtatgaagcaagaaattcttatagagatgtaagcaagatcgcagcagatgatgtgaaatgtagcgtatgtcaggaggaatacgttgatggtgaagagattggtacaatgcaatgtgaacatcagtaccatgtgcgctgcattcacgaatggcttaagcagaagaattggtgtccaatatgcaaagcttcagctataccttcagagatgaccaagggagacgcatgaatcttggcccaaacttgtaaatagcgtggatttattattagacattgtagatgctgacgcagttcaccccaatatgtggatacgatagtctctcccgaacggtcgaacgcctggaaccttttgttactgcatcttttatcttcttagcacacccttgctgcttgacagcagtacgggtcagaaactcgaaaataaccgtggttctcaagaaatttttccagattctaaaaaaaaaaaaaaaaaaaaaaaaaaaaaaaaaaaaaaaaaaaaaaaaaaaaaaaaaaaaaaaaaaaaaaaggaagacaaaaaaaaaaaaacaaaaat

SEQ ID NO: 4369 - DNA, 339 bp, Zea mays
  unsure (1)..(339): unsure at all n locations
  Clone ID: TF_LIB4829-029-R1-N1-G3
ccggccgggnaaagccgccaccggcgttgacgacgaggcgagctccaactcgtcgcccaacatctcgaccgccgcgacacgcggcggcgcggaagctgcggtggcccggtcctcggcccgcgccggcggctcggccttgccgcggcagaccgggcacgacgcgcgcgtcgcgagccacacgtcgatgcactcctggtggaacacgtgcttgcagccggagagctgcctcaccatctgcccctcgcccaggacgccgaggcagaccgcgcactcagcggcgccggngccgnngccgncagcatcagcagccactgaggntgagccgncggcgccggctcg

SEQ ID NO: 4370 - DNA, 1724 bp, Zea mays
  Clone ID: TF_ZmC3804_1
cattgggtacctcgaggccggccggggaataattcaaactctccgagagaaaagcgcaaaaaaaaaaaaaagcaggacggcaatcgcatgcttgcgacgatgaccgccagcaagtgaagaatccagccacctgacctcgtaacttcttcttcttcttcttctttcgtcgttctactcccatcgaagctactactgaggacgggcgcaggcggagaacgagcggatccgctagcaggggaacagccggcgcggaggaagggtttggaggatgacagaagctgcagttattacaaggtactggtgccatggatgcgagaaggtcatcgaggaggccatgggggaggagatcaagtgcccgttttgcggtggtggattcatcgaagagatggccggggaggattccgaggggttgcagttagagcgggagtggggaacgccgccaggggacagcgaggacgacgatgacgacgatatagcccatgagttcgagggctttatcaggaggcacggacgggcatcggctctgcgccgggtgctcgacagcatccaggacgaccttagagccgacagggaaagggacaactccgtcctcatcaacgccttcaaccaagccctcgcctcgcaaggctcggcgctgctggatgccgacgaggcccgagacggccgaggtggatccagcaacagcaacgacgatggcttgctggaagagtatgatgtcctgggggctgggctgagcctactgcttcagcatctggccgagaacgacccgaaccggtacggcacccctccggcgaagagagaggcggtcgaagctctgcccactgtccagatagcggaggccgtcagctgttcggtctgcctcgacgatcttgagctggggtccccggcgaagcaaatgccctgtgggcataggttccactcttcttgcatcctgccatggcttgagctccacagctcttgccccgtgtgccggttcgagctgccgtctgaagagacgaaagatctgaacgagcctagcgatgtgcacagaagaacagagagcacccgagagaacgacagcgagagcggtaacagcgcgtggccccttgtcccttggttcttcagcgggctgttctcggtacctgaaccgtcgcacactgacagaggcactctcaccaccgatcaacagagtccttccaccaacccaaatgctggaggaaattgatttcgtcatcctttgtgaataatgctcatacatctgagaatagcaaggagccttgtcagtagatggcttattttttttctgtactgataatccttctcggatgaatcgcaaggtacggagtctgtgtctgctctattgtcaggattctagcgatcgtttcgcctctagttaatctcatagctactgagactgtctgtctgcatcctatgcaaaagatcggttgctttctttgttcttggctcttctgactggatgtctttgagctatttctggaatatgtaaactatcatgccttgtatttattcattgtttagttgaaatatatcttcatatcaagtaacaagtaaaaaaacctctgggcggccgttcttgtgggtcctcgctttcgtccgcgtgcttgcttcgtcctcgcttcttctttgtgttgccttttttcttttcactggccggtgtttccttcgttcgtgctgttcccccctggcgttcccctcttttcgccttgctgtctttcctctttctt

SEQ ID NO: 4371 - DNA, 1534 bp, Zea mays
  Clone ID: TF_ZmC60532_1
cccccccggccgcccgcccggccccgcccccccgcccgcccgcccggctgccgttggccgcggcccaaccccccccgccacgctcaggactcgggccgcccgcccgcccgtgtgccgtttaccggagcacaacacaacgcggccccctcacggcgtggagtggattgggccgacgccgatcgagagcagaggagaggagcgcggtcggatagggtttgtctgggtgaggttttgagcgagagcgcagggcgagggaaggaggaggaggaggactggctcctggaggaggaggccggccggggcttggatggtcgcggagcgctcccgtaggtggtgtccatgggaaggtcgttcagggactcgctcaaggtgctcgaggccgacatccagcacgccaactccattgcttctgaatttcggagggaatatgatggcgcctcccttcagatgaggatggcatattgccctgctgcccactttttcctttttcttgtgcagtggacagactgcaaccttgctggtgcacttgggctgttgaggattctaatttataaggtttacgctgatgggacaaccaccatgtgtactcatgaaagaaaagcaagcattagggaattttatgctgtcatatttccctccttgatgcaattacatgaaagaatcaatgaagtggaggatagaaaacagaaagcaatatgtctagagaggtacagaagacgggatgaggatccgaaaactgtggtatcagagattgatgataatatagaggaggaatgtggcatatgcatggaaataaatgtcaaagttgttcttccaacctgtagccacgctatgtgcattaaatgctatcgtgaatggaggtcaaggtcccagtcctgtccgttctgccgcgacagcctcaagagggtaaactctgctgacctgtggatatacacggacagcaatgacatcgtggatatggcgacagtccgaagagagaacctgaggcgactcttcatgtacatagacaagctgcccaccgtcatcccagaatctgtatttgacgtctacgactcccatgtaaagtgacgcagttgagcacgtctgccagttgttttatgtatttgctacgtctactggtgctgattcctgggcctctggtgctgttgtgccttttttttaaagagtttcgaagcaactgggagccgaggaggctaatatacactgaatgtacgtagaacttgttctatcatcttgtgccatgcgatttcggcctgtatggtggtttagggtcctagcatttgacgctgtatatgtcagtgggggtatcatggttatgggcttatggcaagaaaggtataggcgttctcctgatgcatattctgatccatgatttttttactcatggatggatggatggactttgtttgaaggtcagaggctagtcaaatgcatgaactgtcgaatcaactactcccttattctgcatgcaaatgtgaggtgtccttaggttatctataactgttactcgaaaaaaaaaaaaaaaaaagcggcc

SEQ ID NO: 4372 - DNA, 682 bp, Zea mays
  unsure (1)..(682): unsure at all n locations
  Clone ID: TF_ZmC12601_2
tgaattcggcacgaggcctcatccgccgctgcctactccccatggcctcagcgaacaacgacgaccgcgaggcggcgggcatcctgcggctgctgatggggatggcggcggcggcggcgcccgcctcggcattgcctcggggcggcggcctgatgatggtgcagcacgtcatcctcgacgtcaacggggaactgttctcgggcggggtcggcggcggcggcgtgccgccggcgtcgaaggccgcgatcgccgcgctgaaggaggtgaaggccggggagggcgaggacgcgctgggcgagtgcgccatctgcctggacgcggtggagggcaccggcaaggagatgccgtgcgggcactgcttccacgggcgctgcctggagcggtggctaggcgtgcacggcaactgccccgtctgccgccgcgagctgccagcgccggccaaggaggaggaggaggaggacagcgcggcgtcggcggagggcggcgaggaggagaggcggaggcccagggccgcggtcgtcgtcagctacctcgtgttcngaggcgggcgggccggaggtgcagcaggagcccggagagngaggagccgtggaacattagaatagaggatgtggattagcattgatcactttgccattggntttcagaatggtttgatggcggaggagggtatgtacatact

SEQ ID NO: 4373 - DNA, 1639 bp, Zea mays
  Clone ID: TF_ZmC8390_1
agctcggaattcggctcgtggagcaatcaatcagagcgggcggggaggagaatacaaggccccttcgtctcgcctcccaccaccaacccttcctccgcctccgccgccgccgcctggagctgaaagtatcccagatctgagcccgccttccgatggcgatgccttcctccccttcccccacacgccttccaacggcctcctcctcctactggtgctaccagtgcgaccgcttcgtgcgcgccgcctccccgctctcctcccccgcctgcccctcctgcggcggcggcttcctcgaggagatgagcgcgccgccgccacgaccggcctacctccgccgcccccgcgcgcaccacgccgccgactcccgcgcggcctcgcccttcaaccccgtcatcgtgctccgtcgctccccgcccgccgccgccagcttcgagctcctgtacgacgacggcgcggggtcgggcctccgcccgctcccggagaccatgtccgacttcctcatgggctcgggcttccagcgcctgctggaccagctggcgcagatcgaggccgccggcgggctggcggccggcgcccgcgacgccccgccgccggcgtccaaggccgccgtccaggccatgcccgttgtctccgtcgccgccgccgacgcgcactgcgccgtctgcaaggaggccttccacctgggcgccgaggccagggaaatgccctgcgcccacatctaccacgccgactgcatcctcccatggctcgcgctccgcaactcctgccccgtctgccgccaccagatgcccaccgacgccatcccccttgagcaggaggaggaggccacggtcgggctcaccatctggaggctccccggcggtgggttcgcggtcggtagattcgccggcgggcggacgcccgaggagcgggagctccccgtcgtgtacacggagatggacggcgccgggttcaacagcggccgccgacccaggcgggtctcgtgggggtccaggcaggccgcgtccacgaacaggggcaccgtccgccgcttcctccgcaacgtcttcgcctgcttcgggcgcggccacgcctcgtcctcctcgcgctcccacgccgtgcctgagctcaacgacgacgcgttcagccatgggtccaggagccggagcaccagctggaggctcgaggacgggcatgccgacgccacggtgcagagttgacggacgaaccaactcctgctgcctgcctccctgtctctagtacagcacgctgcaagaagcgaatcttgttgcttttgtttcataattcattcgtcttgtattgtgtttaccatactgctgctcctactcctgcctgctacttagaagaaaaagaggaaggggaaggggaaggcgaaggaggaattggaggatttgtagaacaggtcgattgcaaggagaccatgcaagggttttcattgtaggtgggggattgttttttttttgcttcttctgtagctgtatgtatccatgctagtcctatcctttcctatgttgcagcaggatacttgtgctggctgcttgcttggcagggcagcggcatcactgtcccggccgttgtctgtcctggcttggcaatgaagcagcagagcacagaaagtcagaaagtggcatccccatgg

SEQ ID NO: 4374 - DNA, 491 bp, Zea mays
  Clone ID: TF_LIB3354-124-Q1-N6-A1
gagcggccggtgctgacgtcgtcctgggagccgaagaagaggacgttggtggggaagttgggggactcccggtcggccacgggcgtggccacggcgggcgggtcgtcgacggcggggcaccggcagagcgggcaggtggagtgggagcggagccacgcgtcgacgcagccgacgtggaaggcgtggccgcaccgcggcagcacgcgcgccgcctccccggccgccacctccgcgatgcacacggcgcagtccagcgcctcgcccgcgcccaccttccgccggggcagtctcgccatggccttgtcgtcgagcccgccctcttggcaccactcggtggcgccgacgtcgccgtccgcacccccgcctccgaacacggtgcgcagcagccacaccctggagccgccgacggcgccgtcgaccgcgcggggcgcctcttcccggtattgcttggctcacaggtcgatgtataagcagcacaccactttgaggaa

SEQ ID NO: 4375 - DNA, 733 bp, Zea mays
  Clone ID: TF_LIB4721-008-R1-K1-E4
ggtaccctccgaggtcgtccgtgtgatgagcattttctaaatgacggtctaggacgctctagggattctagcagcagtgaaacaaggaggagtcacagaaggattctatgggacacgttttccaggcgtggctcaagaggttatccagaatttgatgctgatgacctcggattttacagcacatggctagaccttggtgatgacatttttgaagagttgggggaatcaagatattttcatcgcaggcgacatggttcgatcagagtaagccagtattcaagatcccggattagggacatcgccgtgctgtttttgatagtggtaatgaacaaggcactgctgcatgtcctttggggattcatcaaactggccgatgcacatgtgattctttcttggttgctgaagaatctagtgcccgagcaagtatatcaagaattgtcatgttaactgaagcgtttttgaggtgttggatgaaattcaccgtcaacctgcatcactttcactttccatggtctctgttcaggctcctgaatctgtagtcattcgttgtcgtgcaagagctacaaaaagctagaggcaccccaacgcagtgatgatatggaacagtgccatatctgcctaactgaatatgaggatggagaccagatacgaattctttcttgcaagcacgagttccacctgcaatgtgttgacaaatggctgaaagaaatcacagggtgtgccctctgtgccg

SEQ ID NO: 4376 - DNA, 1172 bp, Zea mays
  Clone ID: TF_ZmC97939_1
aattcggcacgaggcgcgaaacccagctcagttcggtgagcgcagcgctcgaccatcagacatgggcgtcagcgacggcgacggcaacggcccccaaggcgagcgaggaggcggtctcgtgcgaagggagtcccgagtataggttgccgttctccaagccgcacgtccccagcccaccgcaggtgtccgacccgacgaactacgccatgactggcaagatcctgctcgccgcggcgggggcgttcgcgggcgtgctcctggcgctcgtcgcgctgcacctctacaacagcacacggcggcggcgcctcggcggcaaccagcggcggctgttccggagcctggccatcgccggtggcgacgaggaccgccgcgacggtgacggagagggagcgcctcccccccatcgcggcctcgattccgctgtgctcgccgcgataccggtcgtgctgatcgaagcgggcgcggatgcggggggcggggactgcgcggtctgcctcgcggagctcgagcccggggagaaggcccgcgcgctgccgcggtgcggccaccgcttccacatcgagtgcattggcgcctggttccgggggaacgccacgtgcccgctctgccgcgccgacgtcgtcgtcgtggcgccgggcgctatcgtgccagccgagggcggggcgctgtcggaggaggtgcggatagacgtggccggggacgccgtcgccgcgacgcccaatggatccacggtagtgccggtgatggggaggttgcatagcggccgggatcttgagaaagccaggcgggtctttgcttccacccgattctcttccttctgacagggctccattggctcccacagccacagactacaggacctcggaagcttcctctgattttcgcacatggacacctcgattgtttcggagcgttctgccattagactgtacatagatttgttggtgatgccagctgtgttttgccatgatttgtagtacgattttttgcggacgaactcatggacatatctgtctcgacgttgactcgagacatgtaaactgcttggatgctatttgcttcacaacattaatgattgatagttgtaataaatttgaataggtggagctactaatgtgatattttatttcggctgaatctaaacaaatataatctaacgttatcaattatct

SEQ ID NO: 4377 - DNA, 1142 bp, Zea mays
  Clone ID: TF_ZmC3485_1
cccggggtcgcacccacgccgtccgggaaaaaaaaaagaacaaaaaggaagacagcgaagttgtctacatcacttgacttgcgagcgaccgcggctcacgtcggctgcataaattgcttcgtagactagtaccacacagtttgcgagaaggggagaggtagaggttccgaggtagagagatagagaggaggagagggagggcgaggcggcggatccgtcactccgttcttctccgctgatctggaggaaggaggcgaggggagttgcaaatccatcaatggccactccaaccacctattcagtccgcatatcctcggagacccacaagattgaagcctgggtggtgtctgacgaagctttggccaggcaactgcaggaggaggagaacacgcgtgacgctgctgccgacaccagagaagtcgccggcaatgtacccttggagtcatcgtcaccggctgttgagtacaggcctgcacagaatgcagctcaggttgcaagggaagacaatgtggacccagataatatgtcatatgagcaactacaagcattaggggaagcagtaggaattcagtccagagggttatctgatgagctgatatcttatttggagccatttaggaacaagtgcactttcttctccaggaaaaagaacagtgaggaatgtgtgatctgcaagacaacatatagaagccggcagaaattgataagactaccctgcagccactgttatcacgcagattgcataactcgttggcttaagatcaacaaggcatgcccagtctgcaacgaggaggtgtttggatgaactgcaaggttcctggcagatgctgcggtttcatcgttacttgcttgcggcatgcttttgagaagacgttggacgcataaggtccattgtttgtgattatgttgtgagcctagtttggtgccctttgcttaagaggactggctctgcccatgcatgggtcggtctacacgtgtgctagtaactggaccaggtcgcgttttgtgatgcgtctatccatcttggttttatcacaaattgatagatctgttgtgtgggtagtttggttgccgttttctgaatataatggatggtgtttttgcccccttttgggagaagttcaagcaaagagcagttcaat

SEQ ID NO: 4378 - DNA, 1470 bp, Zea mays
  Clone ID: TF_ZmC26130_1
ccggccgggaaaaaaaaaaaaaaaaaaaaaaaaaaaaaaaaaaaaaaaaaaaaaaaaaaaaaaaaacccctaggccccccaaccaaagcagaggaaagagccgaggacgcgagggcgacgacccggaggagcaccggacccgaaggcggagccccccaagccagaacccggcgagggggtcggtgccgaccatgtcctcgcccgcgccctccccgcccgccggggcgccgtcggagccgctcctgctcccgctcccgcccccggagttctactgctaccagtgcgaggccacggtgtcgctgcccgagccggccgcgccctcctcggccaggctcctctgcccgctctgccatagcgacttcatcgaggagaaccctagcaccccgtctccaccaccacctccgccgccgccgcccccaccgcttttcctctccgactcctcctcctcctcgctctcggacgaccccgacgacgacttcgaccttgtcatggaccccgacgtggtgcgcgcctaccttagccgcttcgcccaccgccaccacctccagcagatcggccacggccccggcccgcacggccgaggggagccgcccgccacggccgcctccatcgccgcgctgcccacggtcgaggttgctgagcccaccgccgtctgcgccatctgcaaggacgacctgcccctcgcctccgaggcgcggaagctcccctgcgcccacctctatcactccttctgcatcgtcacctggctcgggatgcacaactcctgccccgtctgccgcttccgcatcccccccgccgacgaccccgaccaggccgcaccgtcgcagcaggacccgccgcccacgcggatcaccatccgcttcagcaccaccacacgccgccgcgtccgcatcggcagcgatgcgccactggcgtctcatatctcggcgtcgcccacgcagctcgcacaggctattaccggggatggagctggtggacctgccaatagcggcgagactgtgtcatctgagtggcctccgcaccccgaatcggatacagtcatgtcggaggcacgcgaggggggtggcttttttgattgagccagaggttccaattatcaggcgataaggtagctgctgttagctgtcagccaacaggagtaaaaggaggctaccacctaccatacgcttcctgtcttcgttcggacgaggtttctcgcaaggtgatggcgtgctgttacagctgaaactaaagctgtccttgttcggacgaggtttctggcgagcgagaagatggcatgttggttacagctgaactaaagttgtcctgttaggagaacaagagcattcatcgcatgggttcccggtgtcttgtatattggttaaacgtatttattcgtaataaatatataggcatgtacaatgtgcagtactcaaaaaaaaaaaaaaaaaacccctccatgcaacttggtaggtacatatggaatgaatc

SEQ ID NO: 4379 - DNA, 783 bp, Zea mays
  Clone ID: TF_ZmC828795_1
cattgggaccctcgaggccggccgggtctgctccatgggatactctcagaggacaatatatactgaagtattgacgcaacaagcactatacaccggcggcaatggcagagctagcattattgtccccgcctcaaagaccctacaacaacacgcacagcgtcatctcttcgggcagcaaagagaacctgccgggggacgtgatcaccccgtgcagccgctgctccaggaagctgctcctggcaggcgccgcgtccttcgcgttctgcctcctgtccgtcgccgcgtgcctcctactgcgcttcctccttcggcgctggtgccgtcgccgccgcggtccaggtctcgtgcagcaggaggaggaggaggcgcagctaaagctcggcggcggcggcggccttgacgccgaagccattgctctgctgccttcttccttcccgtaccaccggcgaggcaacgacaaccccgaggtggagtgcgccgtgtgcctcggcgtcctggacgaagggcagacggctaggcagctccctggctgcgcgcacgtgttccaccagcagtgcgtcgacgcctggcttgcgtcgaacgcgtcgtgcccggtctgccgccggaggactggcccgcaggctgaggaggaagccgcggcggcgccggtcgacgtgtagacgtatagtaattactgcagtgccggcagcgttgtcctaccatgagctcaagctagagctgtcgccacaatgactcaataatgaaagtggtttgggttgaaaataattttttttatgccagaag

SEQ ID NO: 4380 - DNA, 467 bp, Zea mays
  unsure (1)..(467): unsure at all n locations
  Clone ID: TF_LIB3354-042-P1-K1-E1
ctcaaacctttgttatcttctgggaagttattatgttgagctcctgtttttattattattattttttgctacttgcttaaaccgagtaaatacatagtattacatacatttgagttactcggtttgatcatcccttttttaatacaggagtgctgtatctgcctatgcccgtatgaagatggcgnggaactacgtgagcttccttgcaaccaccattttcactgcagctgcattgacaagtggcttcacataaatgctacatgcccattgtgcaagttcgacatcatcaagagcaaccgtgacatagaagaggtctaggtcactaaggaaaaaacnccgcaaaacttttcgtcatgtctctgctgtgttcttcagtactaccgctaccacatttgcgatcctgagttgtgattaccggtcctttaggtgatgcacaaatggtactcgtgagtttctttttattagca

SEQ ID NO: 4381 - DNA, 1461 bp, Zea mays
  Clone ID: TF_ZmC42210_2
attgggccggagctcgccggccccctcccgtcccgtcccgtcccctcccctcccctcccctccgctcccgtcgtctaccctcactcgaaactccgaatcgaaaccggcggagttcaatttggggatttcggcacctcgttccccgaaattttctggatctgagtctgtcggccgttctcgatttgcgtctggagtgagcctgcgagttttcaggctcgatttggtcggggcctcgggggtcccggtcttcgatttcggggatggactcgtctccggtgtcctattggtgctacagctgcagccgcttcgtgagggtatctccgtcaactgtcgtctgcccggagtgtgatggcggcttcctagagcagtttacgcagccgccgccccgcggcggcggtgggagcggccggcgcgggacgatgaacccggtcatcgtgctccgcggcggatcgctttcagggttcgagctctactacgacgacggcgcgggcgaagggctgcggccgctgcccggtgacgtccagcacctcctcatggggtccggtttccaccgcctgctcgaccagttctcgcggttggaggccgcggctccgcgtccaccggcgtcgaaggctgcggtggagtccatgccatcggtgacggtggccggaggtggtgctcactgtgccgtgtgccaggaggcctgccggcctggccgggccggacgggagatgccgtgcaagcacgtttaccaccaggactgcatccttccctggctctcactccgcaactcctgccccgtctgccgccaagagcttccggctgcagccaccccagatgcggaggcggatgctgggctcaccatatggcgacttcctcgcggtggatttgccgtggggaggttcgccggcgggcctagagagcagctcccggtcgtctacactgagctggatggtggcttcagtaacggggttgggccgaggcgggtgacatggccagagggagatggccaagtggatggtggtgaaggtcggattcgccgcctacttagaaatctatttggttgttttggtcatggcagccgaccagcaagttcgtcgcagtcccgtagtggctgagcacagttttccttgtaccattttttcaattgatagcactgaagaactagggctagtgtaagaatgaaacccagattataatttcttggggcttttgatgtaaatgaaggcctattgtctcattaagaattattaagagatggctatgagcaaacatcaaaaaaaaaaaaaaaaaaccaaatttggtcaaacataagtgcaagccttcaagaaaggaatatcaatgaatgttttggggaaacaaatccttggcaataatgtaggtagaaagaacaattggtgtatttgcatccctacaccctactgtttgtgtacatactgaattggttgaacatgaatttccattctgttatatcttatattg

SEQ ID NO: 4382 - DNA, 1157 bp, Zea mays
  Clone ID: TF_ZmC13117_1
caggccaccaccactgcaccaccgtccacaccagagcacggcacggtacggaagcgaggtgcacccgcttagtcccccgccattactccgattccccttctcggcttctcctccttccccggcaattaatgcggccaacaaccagatccagccccccggaaacctaagctcccgcaaacaaatacccttttcccattctgcccctcccccgcgcagcatgccatcccgccccacgaccacagccccgccgccgccgccgccgccgcccacgaccaccacgtggggagcgagagaggcatgtccttccttgacccgctcgcctcgctcggcctcgggtacgcgatcgccatcgcgttcggattcctcgtgctcctcgcgtcggtgctgctcgcctcctacttctgcctccgccgcggggccgccagccaggggttcggcgccggagccggcgtcggcgtcggctcggctccgcccggcacgccgcctcctccgcctccagctccggccacatctccatcaccgtgccccgcgtcgtcttcgtcgcggaggactacgactcgcctgggtcctcctcccgcggccccgccgccgcggcctcccccgtcgggctcgacgcctccgtcatcgcgtcgtatccgatggtgcccttctccaaggccggggcgggggcggacacggaggtcgcgtgctccatctgcctctgcgagtacaaggagggcgagatgctgcgggtgatgccagagtgcaggcacaggttccacctcacgtgcctcgacgcgtggctgcgtcgtagcgcgtcgtgccccgtctgccgttcgtcgcccatcccgacccccgtcgccacgccgctctctaccccactctcggagcttgtcccgctgtcgcagtatgccgccgaccgtcgccggagcaggtttgggtgattaatgggtgatggagatgtgaactgttcggctagagctaccataactaggacaaaagtttttgcttgacagcagtacattattggacccaggaggaagacatgcagtgtacatacattgttcttctgttctaagatagtgtctatcaagtgaggttacctgtgatcttatagttgtacgcggaagattgttctatgaatcatcttatttcatccatgacttgcattgcagtgt

SEQ ID NO: 4383 - DNA, 534 bp, Zea mays
  Clone ID: TF_LIB4073-011-Q6-K1-C3
ttggacgcgtgttgtcgatttgttccgtcgtctagagatctcatcgttgtgctcagtgaaatcaatccttggatgaattccaattcccgcgggcaaaatcgacgcatcgatctcgtttttaggccgagggccaggacggtgcagccatcctttttcgacgatcctgattacgatcccctgtgggacgatgatctggccgccgccgccgccgtgttcggcgatgatgatgatgattatctggtggcagcccccgctcatggcagcagcagcaagcgtcctcacgtcgctgccgctagcgaggaggccatcctgaggctgcaggaggtgacgggtcgttctcgcttggggtccgccggggaggagcagtgcgccgtctgccggcaagacttccgcgccgacgagacgctgagggccatgccctgctcccacgccttccaccagcactgcatctcggagtggctgcgccgcaacgccgactgccctctctgtcgctgccggctgcccgacgaggaggaagaggacaagcagaggagg

SEQ ID NO: 4384 - DNA, 1092 bp, Zea mays
  Clone ID: TF_ZmC13088_2
tgcaagataagggcgccgtgctgcggcgaggtatttggttgcaggcactgccacaacgaagccaaggactcgctggaggtcagcgtccacgaccgccacgtgcttccccgtcacgacatcaagctggttatctgctctctctgcaacaaagaacaggatgtgcagcaagactgtgcgaactgcggagcatgtctcggcaaatacttctgcgcgaaatgcaacctcttcgacgacgatgactggtggcgcagagaatttctatcactgtggcagatgtggatgctgctacgcgactccgctgaaggattctcaccgctgtgtggacggagctatgcatcacaactgcatcacaactgccctgtctgcatggagtatctattcgactcgatgaaagctatcagcgtgctccactgcggacacaccatccacctggaatgcctttacgagatgagagcgcaccagcagttttcatgcccggtgtgcctgaggtctgcctgcaacatgtccgacatctggcaaaagctggatcagcaggttgcagcgtccccgatgccagcgatctatcagaagaagatggtatggatcctttgcaacgactgtggcgtgacgtccaacgtgcagttccacatcttggcgcacaagtgccctggatgcagctcttacaacacccggcagacgaggggcgatccagccgcatgctctagagtatgagagcaaataaaactgctgtactgcactgcacataaactcgtggggttgtggggtcgatcgataggtagcttgcagggaggaaattaaagactaccattgcgcatggacacgattggtgccggcagttgagtacgtgtattaggcctgtcatatgtagatgtatcatatgctatgcattcccaaagaagaatttggcgcacggcagatgagaacatgtattaggcctgtcatatgtagatgtatcatatgctatgccttcacaaagaagaatttggcgcagcggacagggtatatatttttttgttgctatatacacataatttttgttgcgcggtgcttgtgccaatgatggagagttcgtacgttgtttttcttatattt

SEQ ID NO: 4385 - DNA, 2844 bp, Zea mays
  Clone ID: TF_ZmC10261_1
cgcgcgtccgcccgggcggcgctccccgccggccgccgccgcgtcccgtccgacctgtggaagaggagagaagactgaagagaagggaagacatggccgtgacggcggaagcggcggcagagatggtgttggagcggcgggcgtacgcgcgggtggggctcctcggcaaccccagcgacgtgtacggcggcagggccctgtccttcgccatcgccgacttttccgccaccgtccacctccgcccttcgcccgagctgctcatccagccgcatccgcaccacgacctcgtcgccttcccctctctccctcaactcgtgagccgttcgcaaagtgaaggatattatggaggcgtccggctactggttgttatctaaaccacttccatgcactattggggttcaaaatagcaacaagctggaaacatcataacctcaacctacactcatgtgggaatattcttctaaagttggtctatgtcatttgactgctgtcattggttctggaccacggagtctcatccactttttgtataaacagacatctaataatagttgaaatgagacctaatctgattctcaatgctgagaaagagcttgggattgttgctggacttcaggaccgagtggcacaggtttatggtggactagtttatatggattttagccagggtcatatggacaagctgggtcatggcatatacatgccattggatgtcaatctgcttcctcctctatacctcatctatgccgataaccccagtgactctggcaaggtccacagcactgttagacaaagatggctgtcaggtgatgattttataacatcacgtatgaaggaagtagcgcagctagcgctcgatggccacaaggctttgctgcagaaggattatactgagctagcgatgtacatggtaatggacaatcaagtgcaaatactgttacagcccacaggggctctttcataactgagcatattctgcatcatggagtttcttcggatgctataggaagttcttcaaggaatgcagaatgttttgttggtgcagcaggccaagacagtcatcatgcagcctttaagagaaagtatcttgatggatgtcatgcagagtcttctgctaacggaagctcacgcaatcgtcaccagaataatagtactctgctacctcctccgaccacctgtgaaagttttactatacccaccacgacaaattttagtgttccgtaccatcctgtggagcagctaaaccagagtactaatattgctgcaaattctactttgtctgatcactattcttcatacagtgatccacatggaaacgaattcgtgcgaaatacacggatgcgaataaaccctagtgattatgatcaatcgctgcccagcctattacctgaggggagtttcaggtgctcagcttaccaatctacacagcagcagtcatcatttattccagcgcaacctagacaagttagctcttcttctggttctcatagtcgatctcatgtgcctgctgttactcagttttcacaaaatcttcaccgtcaggacttgggcagattggactgaggaattgggagttcttccacttctggttctacaatactgatacctgcttcacaagatcctggtacaagcttgttgggaagcgattatcctgagccacttttgttaggttctttgtttacagctgattcaacaaatttcttatctgcatctggaagcataagtaaccagcaaaattctggatccagctctagttccatgctcaggcctgctgttaatgttggaacacaagtccctgagttcaacgtatctcagccaagtacaactttaagaggttcatctgatgtgttcaggaggtccttaatttctgctggcatttctcattctagaagttcaagcatcccattgcagcaccgtggaaattcatccacatcacatgagattaggaatcatcagccaggatcaagctctcgtgcacatcagcagcaccccttaagacccggtcattcctctgtagacaggcagagctctggttacttggaccttcagtcttttatgcagaccatagcttcaagggaaggaggcagaccaatgtcagagatccgcaatgtcttcgatcagattcgtcaggggagaaatgcacgattggaggatttgcttctcattgaccggtcacttattatgagacgagctaatttgattgatagacatcgggatatgaggcttgatgtggataatatgtcctatgaggaattgctggcactaggtgaacgcattgggtacgtaaacacaggacttactgaagaaaagattttgagtaacttgaaacaatggaaatgtgtcttaaaatcattggatgatcctccaacaagtgttgaaccatgctgtatttgccaggaagactatgtggaaggcgaggacctgggcaggctggattgtggtcatgacttccacaccgcatgtatcaaacaatggctggttataaaaaacctgtgcccaatctgcaagaaaacagcactggacacctaaaaacatggctgcctttttccttaggaaaaagccggtagcggcagggcaagtggttgccatctaaccacaccctcccatgactagcaaagtatgttacacctttcccatcatcaacatacatgtgggaatctatactataggtggtacatggcacttgcctgaagccaatggctgtagaccatggagttttatcctttgtttttttcaatcttagatttgggatttaaaatttattcaatgacatttgatttacttgggcaatcagcaatatttgctatcatcattaatcgctaatcatctgtgttttttttaacc

SEQ ID NO: 4386 - DNA, 1497 bp, Zea mays
  unsure (1)..(1497): unsure at all n locations
  Clone ID: TF_ZmC26137_1
atccacctaattcggcaggttcctaacccccacccacctcgcccaaattgcaaccttccccgagtgctccaggtcccgtggccggcccccagatcctctccaatcccaatccaagtatcgaacggatcccatcggtggcgctcgagcgagcgagtgcggccggaaccgagcgaagatgggcatctcgagcatgccggcgcccgaggacagcctgctggggttcgtgctgtacaacacggcggcgtcggtggcgatcctggcggggctggtgcgcgccgcgctgctgttcctgggcctggcggcggcggaggacgaggagccgcggcagcaggcggaggccgtgacggtcacggccgtggggcccagcctcgcggaccggttccggagcaggttccggccgtcgcgctacgggcggcgccggggcggggactgccgcgtgtgcctggtgcggttcgagacggagtcggtggtgcagcggctcccctgcggccacctcttccaccgcgcctgcctcgagacctggatcgactacgaccacgccacctgcccgctgtgccgccaccgcctcctgccccccgccgctgccgccgacgaggtgccccggattgcctgattagcgccctaggaattgagagtaggcgtagcactctgcacctcgcagcagcagtgtctctgtacaggtttttttttcttttcctttttgttcgggggagagagaggacagaacggagattgaaggaagaaaatggtggcaacaaagctgttccccctttcgtttctccgaagctctctgttgtctttattcattccaaaagtataatctactcgtatgaaccaagtactcaaaattgtctttgggcttgtgctggggtggacgcaaaaaccactatcttgctgtgaataagggattctataatagtggcacgactagattaccctttcgtatgtggttgctttatttgtgattgtacacgcattgatgtttttaaaagaatttttgggggggaaagtaagaaaagataatcaaaggggtcactttaataagctcttttgtttggctttgattaaaaaacatcanaaaagtctggtggacagcggcgttgggtcttttttagtgccggaaattttctttatccactccaaaccgaaggagagtggatttttggaaaccaagtttattaaaatttttattgttatgaccatttttttttataggtccccacgggatttgtttaatatggggcggtgcgtggtttttaattatacaaanaagggggtgcacgcccaaaaactggtagttctccacaaatttctcgaaacctcaagtatgtgtccgaacctccttctttttattggaatccattctgggtcacaattttgggggtggcgtgggttttatggaaacgtctttctgactggaaatattttgaccgtgttaaaggacagacctttctggtttgtaaaacccaatctccttaataaaaaaacttggtattt

SEQ ID NO: 4387 - DNA, 504 bp, Zea mays
  Clone ID: TF_LIB3245-012-P2-N1-A7
agagctatgacgtcgcatgcacgcgatcacgtaatgcacgcgtacgtaagctcggaattcggctcgaggcaagggacagacgccgctgctctcgtcctgcgctagcaagcgaatcgctggcccgacgccgcggcgggaggtatctcgctttcgatcaggattttggtcggggcgtcgttctccggtgcttatctcatttctatttatcggtgcctcgggttcacggccaaattcgctgctgcgtggggctttggagattggagccaattttatcattgttcctgcgtggagaaaaagcaggatggtttaaaagcagatggaactggcaaaactccacagaatgaactgacatgtagtgtttgcttagaacaagtcatggtgggtgatctgttgagaagcctaccatgcttgcatcagtttcacgtaaactgcatcgacccatggctgcgccaacagggtacatgcccaatctgcaagcaccaggtcagtgatgggtggcatgcc

SEQ ID NO: 4388 - DNA, 600 bp, Zea mays
  Clone ID: TF_ZmC3298_15
gttcccctctctcttccccgtcctgcaggctccaggcgctgctgctctcgtcctccgctagcgagcgaatcgctggcccgacgccgcggcgggaggtatctcgctttcgatcagaaaaagcaggatggtttaaaagcagatggaactggcaaaactccacagaatgaactgacatgtagtgtttgcttagaacaagtcatggtgggtgatctgttgagaagcctaccatgcttgcatcagtttcacgtaaactgcatcgacccatggctgcgccaacagggtacatgcccaatctgcaagcaccaggtcagtgatgggtggcatgccacaggcaacggtgaagaggatgcttcatacatggtgtaagtagctgcccaggagtaggccataggtaactagtagtagatgctaacagaatccgtggaaacgctgttttggaggtgacggtttggacttgcaatctagggatgtggtctaatccctatctatcctaacaaaaaaccgagtgtggaatcagctgtccagtgcactgagttcttgtacaactcatgtttatttctctcattctctgtgatgttgatgcataaaaaggttgctaac

SEQ ID NO: 4389 - DNA, 1068 bp, Zea mays
  Clone ID: TF_ZmC3298_6
tggacgcctttcgagctccggccgggctgctgttagtgctgttcccctctctcttccccgtcctgcaggctccaggcgctgctgctctcgtcctccgctagcgagcgaatcgctggcccgacgccgcggcgggaggtatctcgctttcgatcaggattttggtcggggcgtcgttctccggtgcttatctcatttctatttatcggtgcctcgggttcacggccaaattcgctgctgcgtggggctttggagattggagccaattttatcattgttcctgcgtggagaaaaagcaggatggtttaaaagcagatggaactggcaaaactccacagaatgaactgacatgtagtgtttgcttagaacaagtcatggtgggtgatctgttgagaagcctaccatgcttgcatcagtttcacgtaaactgcatcgacccatggctgcgccaacagggtacatgcccaatctgcaagcaccaggtcagtgatgggtggcatgccacaggcaacggtgaagaggatgcttcatacatggtgtaagtagctgcccaggagtaggccataggtaactagtagtagatgctaacagaatccgtggaaacgctgttttggaggtgacggtttggacttgcaatctagggatgtggtctaatccctatctaccctaacaaaaaaccgagtgtggaatcagctgtccagtgcactgagttcttgtacaactcatgtttatttctctcattctctgtgatgttgatgcataaaaaggttgctgataataaaaataactcaaattcagggggtagaggatgagaaatgattttatgcattattagaatttgtttctactctgtcatgtcacttacatgacactcttcgtctcagttctctatagtaaaatgtaccacaaatatctccgatatcttactaataatagtatacaaatatattttgcataaaaccgaattaacttaattgatatatgcctaaattactattattagaatggaattcaattccaataaaaattaagggctgaagtttagaccattttaactcatttgtttgaggt

SEQ ID NO: 4390 - DNA, 473 bp, Zea mays
  Clone ID: TF_ZmC3855_1
gccgcagcaggaggaggacgcggacgccccgcccgtcctgacaccgctgctggggtcgccggacggcgcgcggccgtcgacgctggccaaccgttgcttcgccgtcgtgttcatggtcttcgtgccgctggtcatcgtcgtcttcgagcggagccaggccgacgtcgtggcctacgcgctctgcctcgccaacatcatcgtcatggtcgtctggctctcgccggacaccgggtcaacggtctcggccgccaagtcgctcctgcgtctcagcgacgacgaggatgaaggcagcgggggcagctccggcgcagaggacaagtgctgcgtctgcctcgccggcatgcgggaggaccaggcgcttcgggcgctgccgcggtgcggccacagcttccacgacaagtgcatcggcaagtggctcaaggcgcacccaacgtgccctgtgtgccgggccaccgccgtgccgaattcgagct

SEQ ID NO: 4391 - DNA, 790 bp, Zea mays
  unsure (1)..(790): unsure at all n locations
  Clone ID: TF_LIB4764-025-R1-K1-F2
attgggtacctcgaggccggccgggtccgatttgccaggtacgtgcgaatttctcgtccctctaccgcgtggattgattaccaacgttgatttggcgaggcaatcgcgggggatggaggggttcgatcgctgcgccgccgattctcccggtccttaggttcattgtgaagttgaggtgggtggtataagcatcgaagagagcatgagcactgccagtggtacaaggcgtgcaccaagaagacagtcgcaggatgggtctgctgataaagtagtggtgatcatcgaagcaacctccccggtggtggggagccgtcgtggaccaccgacccctgttcctggcgcccaaaactcacccattgatgtggaggccatcgaagatgaagttcaggcagtatctccctcgcgagtgcccccaccgaggagggacaggagaaccaggagggaacctataacagtggttgacttggaggttgacgctagccaggaagggaacaaacgccagagggttgtggcagtagatcacctctctcccgattggggagcagggtccagcttgcagccaaatggcgtacaaaccggcaaagagcctgctaaggaggttcccaaggaaccatcttttacctgcccaatatgttggaataagatggaggagccatccacaacgacttgtggncatatcttctgcgacacgtgcatcaaacaggccatcaaggttcagaagaaatgccctacttgcaggaaggggctgaaaatgaatagggttcatcgtattttccttccgaacgcttct

SEQ ID NO: 4392 - DNA, 1841 bp, Zea mays
  Clone ID: TF_ZmC2205_4
cgaggccggccggggttcctcacgccgcctgcacgcctccaaccgaataaccctaagctgccctcgctccgacgccgccacctcgtcgtccgaccgtatcaattcgatggcccgcatctccgccgtcgttgccgccgtgatctccgccgccgttgtcggtgacgcgctgttcacagctcgcctccgccaccgatgcggcggcccccgccccgatggccggcgggggctgccctctcagcgcaggtctccgtcggctgcctctcgaccggtcctctggcgccttttcctccgccgactgtatcgaccgtgcgacgccccgctctgtcgtgctccgatcttacactatctagagccacagcgctaccgcgagctgcaggcgactgttacgcccaggaatccgaacgagggtgtgagcgtgatctacatgacgctgtaggcgttgaccacgtagcgggacgagtggatgacgctacccgtgtcgatagccgttgatctaccagtgccacaaggacgtgcattgggtcggtcgagcgggggccgggatattcacccaattgaaaggaagaagcgctccctacccaccgcggttgccccctttcggcctttccccttctcgatcgaactcgggtccttcggcgacgtgcggatttttcgtccctcccgatgcttcgcctgtatctgtccggggtgcgtggattgactaccggtgttgatttggcgaggcaatcggcggggagggagggggtattaatttcgatcgctgcgccgccgattcccccggtccttaggttcattgtgaagctgaggtgagtgtataggcataaagagagcatgaacactgttagtggtacaaagcgtgcaccaaggagacagtcgcaagatgggtctggtgataaactagtggtgatcgtggaagcaagttcccggggggtggggagccgtcgtggaccacatacccctattcctggcgccctaaactcacccattgatgtggaggccatcgaagatgaagttcaggcagtatctccttcgcgagtgcccctgccaaggaggaacaggagaaccaggagggaacctataacagtggttgacttggaggttgaagctagccgggaagggagcaaacgccagagggttgaaccagtaggacgtcacctctatcccgattggggagcaaggtctagcttgcagtcaaatggcgtacaaaccggcaaagagcctgctaaggaggttcccaaggaaccatcttttacctgcccaatatgttggaataagatggaggagccttccacaacgacttgtggccatatcttctgcgacacgtgcatcaaacaggccatcaaggttcagaagaaatgccctacttgcaggaaggggctgaaaatgaatagtgttcatcgtattttccttccgaacgcttctagttaaggtcgattggctttgtcaaaggaacttctggtaacatataaggctgtgcaatgtacagtgaggatcagaagttcttgggtgaacagcagatagatgtttcatcctagtctgtatcatttaacagcatcactaggagctcattatgaaaacttcctgactagggaagtggatatcagcctcagtattactggcctcttattgcatccgtggttcataatgttatttcgctgttgtatgtattaggttaataccgtggtggattagtgtaactgggatttgcttcattgtaaaatgataatggcgagttgaaacgtttagcatttttggatgcttttgtttgttacgtactctattccatttagccattccaatattctatgctaaaaaaaaaaaaaaaaaaaaaaacccaaacc

SEQ ID NO: 4393 - DNA, 1062 bp, Zea mays
  Clone ID: TF_ZmC2205_9
ccggccgggtccggtcccttcttgaactcctccgctcttatcgaactcagttccgattcggcaggttcattgtgaagttgaggtgggtggtataagcatcgaagagagcatgagcactgccagtggtacaaggcgtgcaccaagaagacagtcgcaagatgggtctgctgataaagtagtggtgatcatcgaagcaacctccccggtggtggggagccgtcgtggaccaccgacccctgttcctggcgcccaaaactcacccattgatgtggaggccatcgaagatgaagttcaggcagtatctccctcgcgagtgcccccaccgaggagggacaggagaaccaggagggaacctataacagtggttgacttggaggttgacgctagccaggaagggaacaaacgccagagggttgtggcagtagatcacctctctcccgattggggagcagggtccagcttgcagccaaatggcgtacaaaccggcaaagagcctgctaaggaggttcccaaggaaccatcttttacctgcccaatatgttggaataagatggaggagccttccacaacgacttgtggccatatcttctgcgacacgtgcatcaaacaggccatcaaggttcagaagaaatgccctacttgcaggaaggggctgaaaatgaatagtgttcatcgtattttccttccgaacgcttctagttaaggttacagccgattggctttgtcaaagaaacttctggtaacgtaaggctgtgcaatgtactgtgaggatcagaaattcttagcctgaacagcagatatatgttccatccagtctgtattatttatcggcatcaccaggagttcatcatgagaacttcctgactagggaagtcgatatcagccttagttttactctcttattgcatccatggttcccagaatgtgttgttttgttaggatgtgaccctcagatggtgtatatgacagtgcaaaacattattttgcaccgtattctgtatcatttatgtagtagagttttaaaatataaatggtgagtaaagccgctgaagatagccttat

SEQ ID NO: 4394 - DNA, 261 bp, Zea mays
  Clone ID: TF_uC-zmroB73070d02b1
gctgtagaacagagcaacccttgcgccatatgcctgggtgccatgggcgccgacggagggcaggctatggccaccttcacggcagagtgctcccacacgttccacttccactgcatctccgcgagcgtggcgcatggccacctcgtctgcccgctctgcaacgcgcagtggcgcgagctgccctccgtgcgcccgtcgcatccactttctatgccacccattctaccatgagcatcaataggtttgatggctcctactcac

SEQ ID NO: 4395 - DNA, 1223 bp, Zea mays
  Clone ID: TF_ZmC36740_1
gcaaaatatgggataacactacacctgtaaacaatgtcgattctgccaatgttgtcctgcagggtggtgaagctccccgcacaacggtcaaatactattaacatggaatgcatccaacaggtaaaaaaacctcaaacccctgccctccacacatacacaacggcgccgtagcctatgtgagtacgaccatgaccgagacgggctttagacttgtgctttgacgtgggacatacaagggggtttttttaaccacaacctaaaattcgctcctagaaggagccaaactcaggacctaaggagggctactcagaccacctaaccaactcagctagaggtcctttcgcagctactgttcattgataagcactgaaacatgtttgctgcagtttattgcacatatgttacgtaagatcacatttgtgttgtctgctgcagatgtctgttatttccagttgcttcactgaaaattgttattatgtttgtaggttgtttggcaagacaacattgagcctgataatatgacatatgaggaactgttggatttgggtgaggcagttggaacccaaagccgtggtctctcccaagaacgcatttcatcgcttcctgtcacgaagtataagtgtggttttttttcaaggaagaaaacacgccgtgagaggtgtgtgatttgccaaatggagtacaggagaggaaatttgcagatgacacttccatgcaagcatgtataccatgccagctgcgtgacaagatggcttggcataaacaaggtatgccctgtttgctttgctgaagttcctggcgaggatcctgaggcaatgagtcaacagttatgaggccaccgggaagttgttgcactttgaagctgagtactgcccccaatgaacgcatgatgtttgcttgaaggcagcttattgtccccactttataattgtgtattagcaccgtattaccaaatgtaggttattgttagatcagatgtatttagtgtttggttcagcgttttgtaacgtaatcaaatcaggaacagagagataccgttacttgcgtttggttggacgaggcccataatgcaaatctataactaaaaaaggctccccctagggggtaaaaaaaaaaaaaaaaaaaaaaaaaaaaaaaaaaaaaaaaaaaaaaaattccgttcaaggaaggaaacacacctttcacggcttgcacggtccctgctgttgtcgaccgtggtgacc

SEQ ID NO: 4396 - DNA, 1804 bp, Zea mays
  Clone ID: TF_ZmC38633_1
ccggccgagaggccctcttcttgccccctacgcagccgcgtgtgccactgtgccgtacaccgtgcacgcacgccgctcctcgcctccctgcaccatggacgccggcgagtgctccacctccaaacctcctcagccctctgccgcctccccgtcctcccccaccgtatgggctaggctggtgcccgccgattctgcgtgcccgacggtggaggtggccgaagacgactccgtggtctgctccctcgttgcgccgccctgcggcggggaggaggtcgcgtggtgcgagatcaggcggaatgccggggacgcgtcgttcgccactattcggaaccttagcttggatgcaattattgttgatggaagaattgtcaaacaagaatgcgtaggcatcaaaccaggcagtgagattgtctctggaccccagaaagaagggcatttaatatatacatttgaaattacagaggcagaggatcatgaaaaaaagaatgtcaagattgttctagatatcgagaatgcaaaatgcagcatatgcctgaatttgtggcatgatgttgttactgttgctccatgcctgcacaacttctgcaatggatgtttctcagagtggttaaggaggtcttcatctaattcacgtgataaaagccagagcgctgcatgcccacaatgtaggacaacagttcaatcagttgcaaggaatcaccgcatgcgtgggcttttgtaggctatattgcaagctttttcctcactacagagatctgatgaggagattgcgttgttagagtcgtatgcttcagttaagtcgaatatggttttgggtcaacagaaaaaccaatcaaggaaaagacgtttttcacgttctagtgatgataccgacaattcagatctaccatgtcctcaatgccgtaatgaatttggtggatttagatgcagcccaggatctgtgcacttgcaatgcagtggatgtggaggaatgatgccagccagatctaacatcagtatatcacaaaaatgcttggggtgtgataaaacgttttgtggggcttattggtattcgcaaggtgtgagttcaagtcattgcaatctgatctgcaaccaggatactttgaagagtatttctcagcgacatatctctgcacttcctgacacaattcatgggggcaatccatatgaaaaagatattacagaaagatgtatacagcaatcaggcaaaacattgcaagttgtaatctcagagtggatatcaaaatttgacaacatggaaattgatcgttcaaggttgcaattgaataatgtggatgcaattacttccaggacatatatctgcaaccattgctacagcaagtttgttgatttcctgctctactggttccgtgtatcattgccccaaaatcttcttccacgagatgctgcggagagggagagctgctggtacggcttcatgtgccgcacccagcaccatcggcctgaccacgccaagaagctgaaccacgtgtgtcgcccgacaagaggcaaccagccctagcctccggcacaaagtagaaccacatgtaacgatgtcacgtgagacttgactgtttctgtgaccattgtcatcaccatccattgtatgtgtgtgtcatcaaaatggtcaggaagtgtggcgtccatgtttggaacccttttttggtttgatcctggctggacctgacaaggaaattatattgctgctggtgccggaaccgccgctctgtcggcaggtcgggggggatggttgaattgaatgaaaataccccaggctagtttcacaaaaaaaaaaaaaaaaaaa

SEQ ID NO: 4397 - DNA, 636 bp, Zea mays
  Clone ID: TF_LIB5116-043-A1-PF1-G8
ttatcagcgaccttgtgcacttgtctttatatatgctattcttcatagcgatcttcctgaactatggtgtcccactgcacttgattcgtgagctgtatgagaccttccgcaacttcagaattcgcatttcagattatgtgcgctacagaaaggtgacttccaacatgaatgaacgctttccagatgctacaccagatgagctcgatgcgagtgatgtcacatgtattatttgccgtgaagagatgaccacagcaaagaagctgctttgtgggcacttgttccatgtacattgtttgaggtcatggctacagcgccaacatacttgcccaacatgtagagctccaattatccccccagataatggacgtgcagcatcagcacaacagcatggagctcaacctggagttcagcctggcactggtactccaagttcaggaggagcaccaactgagaacgtgaacatgcgtcaattaaaacttgaggctgctgcttcagctgcttccttgtatgggagatcatttgcttatcctccagtgaacactttgaataggcactcaggacctctgcacgcaacaccaagtacctcacaatcaggagaagcaagtacttccactggccatccattagaacctcagc

SEQ ID NO: 4398 - DNA, 636 bp, Zea mays
  Clone ID: TF_ZM4578.C2.o3.fg
atgagctccggcgggacgccgcccgtggggctggcaccggtggacggcaactccggcggcatgttcagcaccgaccgcatcggcggcttcggctacggcgtcggcgtctccgtcggcatcctcctgctcatcaccaccatcacgctcgcctcctacttctgcacccgggcgcccgtcgacgcggcgggggaggctgctgctgccgccgccgccccgtcgtcgtcccggcgccacggcggcggcggcggcggcggcgaaggggcgcaggcgcacgacgtcgagctcggcatcgacgaggacacgctcaaagggtacccagaggtggtgtacgagaaggaggccaaggccgccgccgccaacaagaagggcaccacgtgcacgtgctgctccatctgcctcgacaactacggcgacggcgaggtgctccggatgctgcccgactgcggccacctgttccaccgcgagtgcgtcgacccgtggctccgctaccacccgacgtgccccgtgtgccggacgtcgccggtgccgagccccatgccgacgccgctcgccgaggtcacgccgctggcgatggccggtgtaattgtaaatttgggatgggctcaggcgctcagcgtattttccatttctccttga

SEQ ID NO: 4399 - DNA, 1214 bp, Zea mays
  Clone ID: TF_ZmC21544_4
cattgggtacctcgaggccggccgggctttttgactctctcaccagggcttgctgctgcttgcaacctcaccctcctctccgggagagcctctcgcctacagctccccagctgcccttccacgccacgccgaccaaggcgccaaaagcaaacgctacgccagtacgtggtgagggagcttgtcacggctgcgttgcttgccacctcgtcttcgcggaggtcctcgccgcgacgacgacgatggaggttgccgaggcgcccgacgaggacggcctggacgagcgtggcgtggcgctgcacctgcacctcccgaggctgctggccggcgtcgtctccggtgccctcactggcctcttcgctctcgctggagctctgacgggggcggtcaccggcgcggtggcgggcagagcttccgacagcggcgcgttctgcggggagctgggctgggggcggtcgccggagccgtcctctccatcgaggttctcgaggcttctcgcgcctactggtgctcggaccggctgcggctgggctcgcacggcgcgtcgtccatggctaatttcattgagcagcttcttcgtgcccggtttgtgcaagagcagtttacaacttcaggatatgcatcatatcgctggcaggtgagcatatcggattttggtcacgatgacctatacgacatattcggggacatctcatcgaaagggctcccacaagagtcgctgaagaaactaccacactatgtggtcactgaccagacgcgcgcggactcgttcggccagatcctgtcctgccctatctgtctacaggacatcgtagccggcgacacagcgaggaggctgcccagttgctcccacactttccaccagccttgcgtggatagatggctcgtggatcgcggatcgtgccccgtctgcaggcaggacgtgtgagatagccagataggtgatcgacctgagtagatggagcaatagctgggtgatgcgaaatgtttgctcctacactaagttcatatatatagctactagagagaagatgcgtactgtggtgtaaattagcagagaatctgcctgtcctgttccactaccagccagcgtaaacggccgtgcgcatcggacttcgtttcttgcacccggttccaacgtgtaatgaaataataacactgctgttgggaagcagtactacctgtttctgtaaaaaaaaaaaaaaaaaaggccccta

SEQ ID NO: 4400 - DNA, 576 bp, Zea mays
  unsure (1)..(576): unsure at all n locations
  Clone ID: TF_uC-zmflteosinte051b01a1
ggaacagaacaggcagattgtgtgctaatttacaccacaggacgtatcttctctctagtagctatatatatatatatgaacttagtgtaggagcaaacatttcgcatcacccagacccagctattgctccatctatctggctatctcacacgtcctgcctgcagacggggcacgatccgcgatccacgagccatctgtccacgcaaggctggtggaaagtgtgggagcaactgggcagcctcctcgctgtgtcgccggctacgatgtcctgtagacagatagggcaggacaggatctggccgaacgagtccgcgcgcgtctggtcagtgaccaatatggggggtagtttcttcagcgactcttgtgggagccctttcgatgagatgtccccgaatatgtcgtataggtcatcgtgaccaaaatccgatatgctcacctgccagcgatatgatgcatatcctgaagttgtaaactgctcttgcacagaccgngcacgaagaagctgctcaatganaatagccatgaacgacgcgccgtgcgagcccagccgcagccggtccgagcacagtaggcgcg

SEQ ID NO: 4401 - DNA, 1773 bp, Zea mays
  Clone ID: TF_ZmC21204_1
ggaagaattcgagtccaagtcttggagctctcgcattaggcctcgaggccggccggggttgttgaccgccgctggagactgaagggaaagaggaggaagaattcgagtccaagtcttggagctctcgctttaggtgaagtggatctgacctactgtaggggaaagagcaaagtacattatcttgtacaaatgtgcattacgctacctttatcataaaccaaatcatctctgtttctgggaacagcaaccagtaatttcccatgcaacctcttggttgatggatgttcttcctgttgggtcagaaagagaaagtcaaacagatagtcaccctttactcatggagcatgcgattggcatcccaaggcatgatgttgcttctacttcgacacctcatcgagacaataatgatggcatggatcaactgccccgtgattcagaaagttcttctggaacaactgatgcatcttactctccgaatgctcctctagcaaggagagatgataatcgccttcggcgtcagcaaagtctaaattctggcttctggatatcaattgaactagctgtaaatcttagccagattatagctgctatctgtgttctgtctgtgtcaaagaatgaacatcctcatgctccattgtttgagtgggtcattggttatacaataggctgcattgcaactcttcctcatctatactggcgctatctccagcgcaaccagctggccactgtgcaagggtcaaatcagaactacgttccagacaacagctttgagagtagttcttttactgggatttcgccccctcctgtgtctgaagctggtgttgtaactgtatcaaatggagtcttgagaaacaatgtggttatcacaaatccaagggcccaagcttttgctgatcacttcaagatggcgctggactgcttcttcgctgtatggtttgttgtgggaaatgtgtgggtgtttggtggacattcttccgcccatgacgcacccaacctgtacaggttgtgcatagccttcctcactttcagctgcattggctatgcgatgcccttcatcctctgcgcgctgatatgctgctgcttaccctgcataatctccctgatgggcttccgggaagatctggacgaaaacagaggtgctacttcggatgcgatcaacgccctgggcacatacaggttcaggtcaaagaagcctcgtaacggggaggcaaacgaaggtggcggtggagtctttgctcctggaacggacaaggaacgcgctgtttctgctgaagacgccgtttgctgtatctgcttggcgaggtacgtggataacgatgatctccggttgctcccttgcgggcacttcttccacaaggactgtgtcgacaaatggctcaagataaatgcgctgtgcccactctgcaaagctgagatcgacgtcgtcccgaggaccgctcctccagccattggctttgggcgccgcgacagccacaggagggtaggaaacgacattgaatcacaacggcttccatgatgtatagtgagacagcaacttgccttgggcgtgtgtgtggcttccagaagagcaccttgtaaattatatagtgagagatagaaagagattatgtcatggaccaacgagtccttacatgatccagcaagtaatcgcctgactgaaaatatgtcgttgttgtcaatatgtgtgaatgtgtcccaaaaaaaaaaaaaaaaaactctccaaaatgtaccttgtcatagctaccgtgacgtcaattaactaatctattttat

SEQ ID NO: 4402 - DNA, 1299 bp, Zea mays
  Clone ID: TF_ZmC483_1
cattgggtacctcgaggccggccgggaaaaggagggaggtcacgtaaacttaatccaatccaccaaaccccaaatctctgtctcgcgctggcgcagcgcagggcaccgccacgcgcgcctcatccggtaccggcatgacgagcgcctccgagctcttcaccgcgcgccgtgccgcccgtggggcccgcctctccgacctcgacctggatccgcacgccgacgcgctccgggaccagcacggacttggcgcccggcaccggcgccgcgggtgccgcccgcgacgccagctcgacgccgccggggacgtgcggcagcacctgcacaccggggccccgccaccgcgtcgccgcgggtcgtacaccgatcagatcttatcgtacatagacaacaacaaccttggggttggggattctgcagctcggaggaacagacttgataggctgatgttcaggacaaatgagcggcttcctggtgctgtactgcaagcacaagcgcgtgtcctggagagactcagaggcatttctcttggttcatctgcgtccaggccatccatctcattagatgaattttcagctagcgatgtattcagaatcatcgacttcagaaacagggaagcacggcatgaagcaaatcggcaccactcatcgtcgttccacccaagcagtgaatcagatgaagaaagaccaaccgtcagttccactcactccaaccggtcaaccggacttaccaaggcggctttcctgcgtctgcaggtcgagatttttgaggctagcaaagatgatagcagagaggcatcgcctgaatgttctatttgccttgatggattttacgatggagatgagctgataaggttgcgctgtgggcacaggttccactcgacatgcttggagccatgggcgcggaaatgtgcagactgcccatactgtcgaacgaacatacggtcacgatcctgacgacaaacccttagttcagaataagcttataaccaccatggagtttcactgttgtaaaattcgctgttgtgggcatgccagttaatccggtgctcctatggcgacatgtaatttctaatatcctgaatattttgtgttgtgtcgctcagagaggtttatggtgttgtgtgcgagtggaggctgatagcagtatagcttagaaagcacccttttgtgtgtatgtagcgagggatcacgcaaatgatcctgtactactcatgataatgttctgatgtctgaatttcagttgttactgcatgcttcttgttatggagggtgaggaacatgactttgctatgatgcggtt

SEQ ID NO: 4403 - DNA, 629 bp, Zea mays
  Clone ID: TF_LIB3354-120-Q1-K6-F6
ttcccgtgtcccgtagtcgtctcctctccgcttcgctcatcagctgcgcctgcggcgtcgtcagccagcggcaagaaacaaaagcgccgcgataagtccgttcgttgaaggcaggcagccatgatccctaggccgtcctcgcggttcctcttcgttgccgcgtccccgctcccgcagcgcggcctgcccgcctccgtcctgcaatccctccccgtcaccgtctacggctcccccggcggcaaggacaaggacgcgctggagtgcgcggtgtgcctgtccgaggtgggcgacggcgagaaggtgcggacgctgcccaagtgctcccacgggttccacgtggagtgcatcgacatgtggttccattcccacgacacgtgccccctctgccgcgcccccgtgggcgacctcgacgcgctgccgcgggaggagccctccggcgcgccgctggagttgcccgtgttccccaccaacgtcctgttctggggcacccacgacgaggtcaccaacgccgggctcgtcgcgccgccgcgcgccgccccgtcggccagctcctcggcctccgggcgcaggaaggagaacctggtcatcgacatcccgacgcgggccgtggccacgaccacgaccacgcc

SEQ ID NO: 4404 - DNA, 1175 bp, Zea mays
  Clone ID: TF_ZmC9505_2
cccacgcgtccgcccacgcgtccgcccccgtgtccgctggcaagtccggggtgctcctcgccgccgtcatcttcctcttcatggtcgtcgtcttcgtcttcctcctctacctctacgccaagcgctacctgggcgcgaacccgctgctggcgccgtcgtcgccgtcctcgcggttcctcttcgttgccgcgtccccgctcccgcagcgcggcctgcccgcctccgtcctgcaatccctccccgtcaccgtctacggctcccccggcggcaaggacaaggacgcgctggagtgcgcggtgtgcctgtccgaggtgggcgacggcgagaaggtgcggacgctgcccaagtgctcccacgggttccacgtggagtgcatcgacatgtggttccattcccacgacacgtgccccctctgccgcgcccccgtgggcgacctcgacgcgctgccgcgggaggagccctccggcgcgccgctggagttgcccgtgttccccaccaacgtcctgttctggggcacccacgacgaggtcaccaacgccgggctcgtcgcgccgccgcgcgccgccccgtcggccagctcctcggcctccgggcgcaggaaggagaacctggtcatcgacatcccgacgcgggccgtggccacgaccacgaccacgccgccgcccgccaactccccgctgccggccagccggatgcccgggagcgccgacgagatgcggtccccggtgtccgccaggctgcggtcgctgcgccggctgctgagcagaggaaagcaggccatggtcggcacctcctcctcctacagcccgcgcgacatcgaacaggggctcgcggggggcgaggccgccgccgccgccaccgcccgcccgccaaagactccgaagacgcctccgtcggcgcacgcgcactgatccatccagatcccccccatcccgagctctgctccgggacgcatttggcccgactcgccgatcgccggagcgcgcgcagcgcatgcgttcattctttcttcttcccccttttttttcttttacctttcatgattcgaaaaaggagttttttggttcgaaaattcctatgtaaacagaggaaaatattggtgttgattggttgccgttggtggtggggatgaatggtgaatttgttcatatgttgatcaggagtctcttttcttg

SEQ ID NO: 4405 - DNA, 609 bp, Zea mays
  Clone ID: TF_700577710_FLI
agctagtgttgtagagcttgaaactgttgttgctgctttgtgaggcggttcatgatggaccagttggtcttttacgaatcaagagcagcagccgctgacccccacagggacatgagactggacatcgacaacatgagctacgaggacctgttggctttgggagaatctatgggcaatgtcaacacaggcttggccgatgagaaaatttcgaagtgcgtgaaagaagtggtctgctgcagttccgaccagacgcaaaccgatcaagatgaccaggatgacggaagctgcgtcatctgcctggagggttacagagacaaggatatgctggggatactgaaatgcaggcacgacttccacgccggctgcatcaagaagtggctgcagacgaagaactcgtgcccggtgtgcaaagccgccgccgcctaggacgacaccagaggagcgagcaactattttgtgctcctcctcgatctattcatttttttaggctcaggtcgaattatatatgtcgttccattcttttgattccagccagtcgtgtaaataaatgccgtgtgttggttattttagttatcacttgggttacattagcccaaattctcctgttgc

SEQ ID NO: 4406 - DNA, 849 bp, Zea mays
  unsure (1)..(849): unsure at all n locations
  Clone ID: TF_LIB4974-022-Q1-K1-D10
cctcgaggccggccgggccgggagttataaaataatgtcctactcctaccccgccaccacgccgcggcagcacaagcccctctccgcccccagccagccctcctcagatctcaatcccggcgctccctccctccctcctcgcctcgggacagcgagcgccgccgtccgccgtccatggagcacgacgccgaggcgcgccgcgggttcgccaggatgggcttcgggtgcaagcactaccggaggcggtgccggatccgcgcgccctgctgcggcgacgtcttccactgccgccattgccacaacgagtccacgaaagacgggcacgagctggatcggcacgacgtccaatcggttatctgcctcgtctgtgacaccgagcagccgatcgcgcaggtgtgctgcaactgcggcgtctgcatgggggagtacttctgcgcagcctgcaacttcttggacgatgacgttgacaaggagcagttccattgcgacgattgcggcatctgcagagtaggaggaaaggagaacttcttccactgccaaaagtgtggatcctgctactcgacgacccttcgcgacaggcactgctgcatcgagaactcgatgaagaacaactgccccatctgctacgagtacctgttcgattcgctgagggagacgtcggtgctccgctgcggccacaccatgcacctgcagtgcttccacgagatgttgaagcacgacaagttctcgtgccccatatgcgccacgcccatcttcgacatggacaagttcttcaaggncctcgacgcagagatgggagcaagctacttgtacacgggaaagggatgggtcgtgtgcaacgactgcagg

SEQ ID NO: 4407 - DNA, 2376 bp, Zea mays
  Clone ID: TF_ZmC9878_1
aggcgaagaagaccaaccaaagccaagcgaccgggatctccctctcattccagaggactccgcgtcgccaggcccgcttcgcgtgcgacgccggcatatagggtttcgccggcgccggcgatggacccaccccccgtgagccccgatcgctgggggcccagtcagggcgctggcgtcgggccctccggcctccgccgatatggcctcaatttctccgcctccagcctcctccaggcccccatcgcggccctccttgagtactccggcgtagtccagtccggccctgccctgtcggcgcaccacccgtccgcggggccctcgtcgccgttgtccgcgtcggaggtcgatggtcttctctccgctgccgccgctggggacggggaggtttcgatccggattcagggcggcccaggcgacacggaggccacgggcgggccggatgcggggacctcgtccgaggatttgatcgaggcgaccgccggctctgaggttgaccaggcctccgctgcgggcaggggtgcaggcgctacggatgcggaggcaaacggtggcggggccggcacgtcggggaacgggggcggggaccgcgcgtaccagcgctacgacgtgcaccacgttgcgcggtggttcgaacagatattgccgttctcgctgcttctactcgtcgtcttcatacggcagcatcttcaaggtttctttgtcacaatttggattgctgcggtaatgttcaagtcgaacgatatattgaggaagcaaactgccttgaagggcgagagaaaaatatctgtactcattggtattacagtaatcttcatgattcatgtgtttggcgtatattggtggtacaggaatgatgatcttctcagacctttgttcatgcttcctccaaaagatataccaccattctggcatgcgatttttgtcatcatggtcaacgatacaatggttcgccaagctgcaatggctgtcaagtgcatgctgcttctgtactacaagaactgcagaggtcgtaactaccgtagacagggccaaatgttaacccttgtggagtaccttctgcttctttatcgtgctttgttgccaacttctgtttggtatcgtttctttctgaacaaggaatatgggagtctcttctcatctttaaccactggactgtatctgactttcaagttgacttcggtagttgaaaaggttcagtcattcttggccgcggtgaaagcactgtcacgtaaagatgtgcattatgggtcttatgcgactgcagaacaggtacttgctgctggtgatatgtgtgccatttgccaggagaagatgcatgtgcctgttctccttcgctgtaaacatattttctgtgaagactgtgtttccgaatggttcgagcgagagcggacttgccccttgtgcagagcattggtaaaacctgctgatatccggtcatttggtgatggttctacaagtctattcttccagttgttctagactgcaagcggtaaaatcctaacataacaatggacgagctattgcatgaaaactcgagtggaggtccttttaacgccatcatgtgaaaccatcttccgcaatgttgagatcaatgtgagaaggttcatgacagtcacgacagtgcagtcgttatttgtttatatattcaaccaaatagtttacagagctttttagttgcaacagaggcaaaatgtttccagcagactgctttcagagcctttagaactctgctggacaaacaatttgatcgttgaggtctgctgagccgacaaccgtatgcctcctgtaaaattctggtatttttttttaattttttttttgcatatgtgggcttacgtgggtgtaactgaaatttgaaagtaccgcttgcacagcaagaattgccggtgggggttgaaagtggtaaatgaatgtaactgtaaagcgttgttacatgaagacaaaaatttccacccgttgcaacatagtaaatgctgacagacgcgacttgtgtacttttttattaaaatataaaaaattctaaaaaaagtgctttctttttgacacacaacagtgcacttgctgctggtgatatgtgtgccatttgccaggagaagatgcatgtgcctgctctccttagctggaaacatattttctgtgaagactgtgtttccgaatgggccttatcattttgtgaagaagcatttggatcgcgattcattaccacccctacgtgtgagttatcttaggacaaggcgcttcatgggggagcgaggggtgcttgacaggagtgaggtcaagccttgctaccctggagctgagagtgaaagagataaatactggcaagaccaactttgtcttgctttatttatggttcgagcgagagcggacttgccc

SEQ ID NO: 4408 - DNA, 1447 bp, Zea mays
  unsure (1)..(1447): unsure at all n locations
  Clone ID: TF_ZmC279877_1
cccaaaaaaagcgagctttctattgtggcgacgtgggggaggggtgtcggcagaagttcaaggggtacgatgcagctgggacgataaggggaaaattacgcaaacattcttgtgttattgttgcgggttangcaggcttgtgaccaccctcttcttttgaacgggacatgaatcagatctaggtgaggggaattccatagaaaggggaaagcaacttcctaaggaaacagtgacaaatttgcttgaaaaggtggaaaaaggcgcgggaatttgttccatatgcaatgatccacctgaggatgctgttgtcacgacatgcggtcatgtgttctgctaccagtgtgtgcatgagaggttaacaagcgacggacatgtttgcccctatgcactctgtggaaacaagctaagttttcgatctgtttttacaccagcggtattaaaactctgtatttcgccaaagccggagtttggtgaagaaactagctgttccacagcagccgacaaaccatcctcgatctgtgaaagcagttacatctcctcgaagatccgggcagcagtggaaatacttaattcaatcatcaagacacctgcccttacagcgggggacactactgaatcgattcccagcatggcaccccctgtcaaggcaatagtcttctcccagtggactggcatgctggacctgctagagctttcactgagcagaaatggtatacagtttaggaggctggatggtgcaatgtccctcgacttgagagaaaaggaagtgaacgggtttaaaactgatcctgaggtgagagtaatgcttatgtcactgaaggctggcaatctgggtctaaacatggtagctgcttgccatgtgatcatgcttgatccgtggtggaatccttacgctgaggaccaggcggtggacagagcacacaggatcggtcagacccgtcctgttactgtttcacggttcacagttaaagacactgtggaagaccgcattttggctctgcaggagaagaagagagagatggtggaatccgcgttcggcgaggacggttccagaggcactgctaccaagctgacggtggaagatctcagatacctcttcatggtgtgatggcagcttgtgatcatccgtagggctgatgacttttgttgtgacaatcctaacaaataggctagggtagacttgatcacagtacttggcaccgcagtttgtgcaaaagtagtaggcatcttgaagctgaggtagcgtgtgtttatgttaatcccctctaatccgcttcagtccatcgcatcagtaacggtctaaccaaacagtcctttcgangttctgttgacctgtattcctgtgggatggagctcgtcctgctcggcaagctggttaatctgggagtttaaaggaacagctttaaggcttgtttggtgattgagtatcaagctggttaatctggac

SEQ ID NO: 4409 - DNA, 1212 bp, Zea mays
  Clone ID: TF_ZmC18703_1
gccgccgtgctctcgtcctctgccgaggagagccccgtcaagccgctccgcctgtgggtcgtcgggtacgccgcccagtgcctggtccacgtggggctcgtctgcgccgacacccgcggcgagacgcggggcgcccggagatcggcgtatgactgtgcgtcctagatgcgctgggacagacagctctgacgccgacagcgaagatgacgaaaggggtctagggaggagcagctatacaggtcgtggcgagtcgatgaacacgttgatatcatttctgtaggatgctattggttgttactgtctatcatcatacggagatggagctgagttagctgctctcccttgcagacatcacttccactggagtcgtattaccacatggtgttttgctgtgttttgtgttgctgtggcctgtttgcttgggattgcactgtgttgctgcttgccttgtgtcattgctattctgtatgctctggctggccaggagggtgcatcagatgcagatattagtgttcttctgagatatagatattctgatccaagcgaagatggtgagaagggggtcgatgaaggactgatgatccctatcctgaataatagtggaatgtcaacaagtgagcgtattctccttcgcgaggatgctgaatgctgtatctgtctatcatcatatgaagatggagctgagttatctgctctcccctgcaatcatcacttccactggccttgtattaccaaatggctgcgcatgaatgcgacgtgtccactctgcaagtataacattctcaaaggcagtgacagtgcatgaccaacttattctgacataacttccgtacacagcttcctttcaagtggcgttctcaaagcaatgctgttttcacagctgtgttattaagtgacagtgatctgtgtttttctgtttaggatgtggtgataacctgtagatggatgaaaccttatttacaattgtccttgttaatatcgcttgtaaatacctttcgagttgttttctacgtatgatggaattggaattgctgaaaaactttgtgattctggtttgactttatgcaaaaaaaaaagcaaaatttttaagtgacagtgatgtgtgttctgctgtttaggatgtggtgagtggtgacaacctgtaaatggatgaaacctaactcagtcaccctaatatcgtttgtaaatatctttggagttgttttcaaaaaa

SEQ ID NO: 4410 - DNA, 589 bp, Zea mays
  Clone ID: TF_LIB4764-042-Q2-K1-E12
ggcgcctcaggggcaggtctatctcgcccacgtccacgtccacgaccatcagcttggccaccggcccgagcccaacagcaggcgccggctccagctccggggagagggacagggacagcgacgccaacatctccgacccggagaagctggccgtggaggcgcccccgcccccgcccccgccagccctggtttactccgcggtcgggaccaagctggtgggcgccgcgatggagtgtgccatctgcctggccgagttcgcagacggggacaccgtgcgcgtcatgccggtctgcggtcacggcttccacgcgcgatgcatcgagctctggctcgcggggggacgccgctcctcctgcccgacgtgccgcgcaccggacggagctgccgcggccacgccatcgtcgtcgtgaataatggctcgatttggccatggtcagttgcgacgatgttcactgttcttggcacaggcgcacagctagcatgtgtcggttcggcgttccttcattttcagattgcgtgctgcagaggatccttctatatattctaatatactgtgtccatatatcccgcaacaaactaaatagcggcc

SEQ ID NO: 4411 - DNA, 1784 bp, Zea mays
  Clone ID: TF_ZmC11659_1
actagtttctttcttttgtgcgcgcatccactccaccaccacctgcccccgaccaccgaaaaaaggtccaagaattcgaggacacctcctcctcctcctcctccacgatggccatgccaagatccttccccaaaccgtagcctttgtttgttcccccaaaaggaaggatttcattccttgccgttccatcgttccgacttgccgtcaagcaaatgcgaagcgtctcgcctgtgatcttcttgcaccttgccgagctgtgcgactgactggttgatccaggctgtacatacatagggtcaattaatgagcggcgccaattcttcgttgccgatgccgccaccggcgcccgctgcgtcggcgctcgacaacgtggaggccaagataagccccagcatcgtcttcgtcgtggccatcctggcgatcgtcttcttcgtctgcggcctgctgcacctgctggtgcgccacctgctgcggctgcggcgccggcgccgccgcgcgcgggaggacgcggacagcgtcacggcgttccagggccagctgcagcagctcttccacctgcacgacgccggcgtggaccaggccttcatcgacgcgctcccggtcttcctctaccgcaacgtcgtcggggccgcgccgggcggcaaggatccgttcgactgcgccgtgtgcctgtgcgagttctcgcccgacgaccggctccggctgctgccccagtgcagccacgcgttccacctcgagtgcatcgacacgtggctgctgtcccactccacctgcccgctctgccgccggaacctcctcgctgatctctcgccggcgtcgtccagccccgtcgtggtggtgcagctcgggtccgggagcgcccgcgacatggccgcgtcggcgggtggtgccacccacgacgatgccgacggcggcgagccaagcgaccgggccacgccggcgcaggagatggtcgaggtgaagctggggaagttcgtgtgcgtcgaaggcaacagtgacagcgcgagcgccaccgccacggacgcagcaggcaccagcggcgacggcgacggcggtgccagtgcagaggaaggtctcgggcagagaaggtgccactccatggggtcctacgagtacgtcatggacgaccgcgcctcgctccgcgtggcgatcaagccggagcccaagaagaagcccgcggcctccaagtcgcgccgccgaggcgccatgtcggagtgcgagttgggcgcgtccaagcgcggggagacctcgctccgcctgccattcccagcaacggtgcccaagcagcagcagcagtccgactccgacgcgaccatggcgaagctcgccaaggacagcttctcggtgtcgaagatctggatggtgccgtcgtccaaggaagaccccgacgcggccggcgagaggcgcacggtgtcgttccggtggccggtgaggagcaaggacgagggagacggcaggaaccggaagagcgggagcgaggccgactgggacgtggaggccgggagcggcggcggcggcaacagcgccgcgtcgtcgctggcggaggagaggccctccttcgccaggaggaccctgctctgggtcgtcggaggccggcaacagagcagagtcgggagctgttcatgatcggcgcaccactgtttgaagacacacaaaacacacacaaaacaaaggcaaaggaattcttttgtgctcttttggcacattggtaagtgcgagtagtgattgcaatagctagaaatttgtaaaacaggaaagactctgaaaaaatttctttctttcgc

SEQ ID NO: 4412 - DNA, 1881 bp, Zea mays
  Clone ID: TF_ZmC22803_1
ttgcacaccctgtctctacagtctctctctctctctctctctgctgcgcccgcggctattaagcccgatctggatgagtcggtgagggagtgcgacgaggagagccggcgacatctaatcactggcgagggtcctcactttgagcgacagaaaggtggcgggcatgacggaactatatggcacgggcttagaaatcaattgaaaacgcggggttggcaatttgggcctggtgaaggtcctgatgtgggcgctcgaattccgttgctgtcgcagggaagcgaggccaagggagcggagcggggcttcggctgggttccgcgcgcggccgctcgctacttccagtgttccatggtgtgggtgtgggcggctgtggcgatagccggagcctgaagcggcgggtggtgtgtggtgggcgcaaggagccacacggagcaggccgccacggcgaggaggaggaggaagaggaggagatggtcgtctgctccacgcgcaagtcgttcaaggactcgctcaaggtgctcgaggccgacatccagcacgccaacaccctgtgagtgcccccggccccgtttccatcccggccgccccgaattcacgctcgccgcagctgccgcctgccgcagatcgatctccgcgggctccgcccgccccgattccatcctgaccgaaaccggggcggcgaaataaagttgctccagtgggtgggtggggtgggtatgctacagtggcggttgagctctcatgtcatgtcatgtcgtgtcacgccgcgcgcatgagcgagcggtgggcgccgacgatcgggctggcacaccacctgccttcctgacgcgtgccttccctcgtgctgactgctcgctcgctcaaacaactcgacagtgcagcggatttctcgagggactacgacggggcctgcctccagatgcgcatgtcctacagccccgccgcccacttcttcctcttcctcgtgcagtggacggactgcagcctagccggcgcgctcgggctgctcaggatcctaatctacaaggtttatgtagatgggagtaccaccatgtcgacgcacgagaggaaagcgagcatcagggagttttatgctgttatctttccctccctgatgcaactgcccaaggggatcagcgacgtggacgaccggaggcagaaggcggcgtgcacggagaggtaccggaggagggacgaggacgagggcaagaggccggtttcggaggccgacatcgaaagggaggaagagtgcggcatctgcatggagatgaacggcaaggtggtgctgcccagctgcagccatgccatgtgcatcaagtgctaccgccaatggcgatcaagatcgcaatcctgccccttctgtcgggacagcctgaaacgagtgaactccggggacctgtggatgctcaccgactgccgggacgtggtcgacatggcgacggtgacgagggagaacatcaggcgtctgttcatgtacgtcgagaagctgcccctcgtcgccccggacaacatcttctacgcctacgattctcatgtaaaatagctggagctagctgtagtgtagcagcacaccatctgtgctgtgctgtgctgtgctgtgttgtgttctgagagtgatgacgcatgatttatcgattattcatgcagaggggtagagggtgttcctcgtcctagctaggacgtggctaaacgcttggaccggggtgcggactctgacgacagacctttttcagtctatctaactgggtgtacagtctgctcaggtcctgtaaatataatgtctgtgcatatttatggcttcaaatgccccgttgtttttcagctggataaaaatgtgtctcccataaaaagccatagagttgcacagacattatatttaca

SEQ ID NO: 4413 - DNA, 1003 bp, Zea mays
  Clone ID: TF_ZmC22803_3
agcgtccgcggccgcgtgggctgctccagcgcagtcgttcagggctcgctcaagtgctcgaggccgacatccagcacgccaacacccttgcagcgggtttctcgagggactacgacggggcctgcctccagatgcgcatgtcctacagccccgccgcccacttcttcctcttcctcgtgcagtggacggactgcagcctagccggcgcgctcgggctgctcaggatactaatctacaaggtttatgtagatgggagtaccaccatgtcgacgcacgagaggaaagcgagcatcagggagttttatgctgttatctttccctccctgatgcaactgcccaagggatcagcgacgtggacgaccggaggcagaaggcggcgtgcacggagaggtaccggaggagggacgaggacgagggcaagaggccggtttcggaggccgacatcgaaagggaggaagagtgcggcatctgcatggagatgaacggcaaggtggtgctgcccagctgcagccatgccatgtgcatcaagtgctaccgccaatggcgatcaagatcgcaatcctgccccttctgtcgggacagcctgaaacgagtgaactccggggacctgtggatgctcaccgactgccgggacgtggtcgacatggcgacggtgacgagggagaacatcaggcgtctgttcatgtacgtcgagaagctgcccctcgtcgccccggacaacatcttctacgcctacgattctcatgtaaaatagctggagctagctgtgctgtgttctgagagtgatgacgcatggcttatcgattcttcatgcagaggagtagagggtgttcctcgtcctagctaggacgtggctaaacgcttggaccggggtgcggactctgacgacagaccttttcagtctatctaactgggtgtgggtgtacagtctgctcaggtcctgtaaatataatgtctgtgcatatttatggcttcaaatgccccgttgtttttcagcttggat

SEQ ID NO: 4414 - DNA, 375 bp, Zea mays
  unsure (1)..(375): unsure at all n locations
  Clone ID: TF_LIB3069-029-Q1-K1-D11-TCA
gacctcaccgctnaaggcattcttccnccgcagcgtgatcaacggagcgcactacatctgccacagtggcggccactgccccatggacacctacatgcgtcccatgtgccaggagtgtgggcttctcaaatgccgccaggctgccatgcatcaagagtgtgtcctgtcagaagaacagatccgcctgaataatctgatgctgtaagaggaggaacaggctcatgccacatccttgccccccagggcttactaacccccccaaatcctgccccagttaactccggaacaactggggatgatcgagaaacttatctcttgccagcatcagtgtaacccgggctccttttctgaccggtcttcgaattaacggccttg

SEQ ID NO: 4415 - DNA, 1355 bp, Zea mays
  Clone ID: TF_ZmC3751_3
cccacgcgtccggagaggggaattcagacttcgcatctttgctctgagtagtgaatactgccatactgcttaggcgtttactaccttgcattgttaatggcgttgggaagaccacaggtatggagtacccagagcgccctggacagccactctgtgagtactatgcaaagaatggcacatgcaaatttggttccaattgcaagtttgatcatcccagggaaagtggttttgtacctgtcgctttaaacaacagtggattccctctacgtctgggtgaaaaggaatgttcctattacatgaaaactggacattgcaaatttggaggtacatgtaaattccatcacccagaacttggttttcttacagagacgcctggcatgtacccaccagttcaaccatcacctatttcctccccacatccatatccacatcattccaactggcaaatggggaggcctgctgttgtgccagggtcatttttaccaggcccgtatccaccaatgatgcttccacctacagttatgccaatgcagggatggaacccttatgtttcacctatgaaccaaactacaccagctgggggccagcaagctgttccagcagggccatcttatggcttgtcgcaccaggagccaacctctgcagtgacttatggcagtcattatgcgcaattgtattcttctgggacttcaagcagcaacatacaagaatatgtgtttccagagcggcctgggcagcctgaatgtgaacattacatgaagacaggaacctgtaaatatggagcagcctgcaaatatcatcatcctcaatacttcagtggaccaaagtctaactgtatactgagccctctgggtcttcccctgcgtcctggttctcagcgatgtgcttactacgcacaccatggcttttgcaagtttgggccgacatgcaagtttgatcacccgatgggtactccaaactacagtcttccagcaccatcacttactgatttgccagtcgctccatatcctcacactttctctgttactcctattgctccatatctgctgccccctgatccgcggccgcaattctgactgtagtcggattcagagctccgttattatctcgtgtaacgtgcacaattgcaggggattcgaatgggaaagctgatgggttccatagctctagcccaaatcttttgtttatctcgtcatcttattacatatatgatatgatgtttatctcgccaagcttactaaagtttagtaaggggaaccaagacccttctaacataatatgtaaaacgatttgtgaagcgaggtggctatatatatgagctatctctataatttatacacagccggctccgttct

SEQ ID NO: 4416 - DNA, 835 bp, Zea mays
  Clone ID: TF_ZmC39160_3
gcatagatggctgaacatgtaattggtcttaggagtgctccaatctcgaggatggttatatttacacgtagttccaaatttgcaatcgccagtcctcatataatattgacactcaggctgccctggtcgctcaggaaatccatgttcttgatgattattgcttgattgtccagctgaggaagaatatggcaagtatgtaccgccataagcaattgcggtggaagatccatggtgtcctataccatataacggtccagcttgaacagtttgttgtgctccacctgatgccacatgatttaccgatgccggataagggctccatccttgcaatggaaccattccagatgagatcatcattggagtgtatgagcctggtatatatgatccaggaactgcaggtgatcttcccatttgccaatttgaagcatatgtaaggggggagggcacagatgctgattgtaatgctggatatatgccaggggttaccggaataccaccaaattctggatgatgaaatttacatgtagaaccaaacttgcattgcccagtcttcatatagtaggagcattctttctcacccggacgtagagggaatccattgttgtttaatataacagactgcacagatccatcttgcttaggatggtgatatttgcaattggaaccaaatttacaagtcccagtcttcaaataatactcgcatacaggttgcccttgtcgttctggaaagtattgtgctgctccatttttggcacctccaccaaactcaagtgccgccacgattgcgggggtggttgtaacggcagcgctccccgaaaccgcaggcggccgtggc

SEQ ID NO: 4417 - DNA, 576 bp, Zea mays
  Clone ID: TF_ZmC2870_1
aattcggcacgaggcacagccgactgccgccgccatggaggacgttctgacaccgccgccgcagccggaactcgccggagagaagcgtaagagggaggagagttcgctggatgcgtccatcgaagacgctccatccgcccccgcctccacctgcagcgctgaggatgcggccggcagcgacgtcgcccggcacccgatgtggaagacgagcctgtgctccttcttccgccgccgcggcgccggcgccgaagggtgcagtcacggggactcctgccgctacgcgcacaccgaggaggagctccgcccacggcccgacggcacctgggaccccacctccgaccgcgccaaggagctgcgcaaggtcgccgcggaggcccaggaggaggccgaggaggaggtcacggtggatgagcagtcactcgacaagtgcctcgtcgggctccccaggggctggacggctgataggctcaagtccttgctccaggatcagggaatctcgtatgcaacagcgtgggataagaagggaatgacagttgggttttgggacttttgagagtgggtgacaactaacaaatg

SEQ ID NO: 4418 - DNA, 1815 bp, Zea mays
  Clone ID: TF_ZmC493_3
cattgggtacctcgaggccggccgggattctattcctccacaccgatcactcgctgctcccctctctcgccggagctccgggccggatggcggcggcagcagcagctcctcccgcctccgtgatcgcgtgatggacgcacacaccgccgcgctccgccgatggacgacgccggaaggccaccaccacacgctcccgtggcggtgaccgcctccgcctccgcctccgccaccgccgcgcccgcccctccccaaccctcagccactgctgccgtcgacaggtcctcccccgaccccgacgcgctctatgaagaggggatgtggcaacagatggccatggacagcggtgccactatgcaacctgggtcatatcctgagcgaccaggtgaacccgactgcacttactatctcaggactggattgtgtcgatttggcatgagctgccgattcaatcatcctcccgataggaatctggctattgcctctgccagaatgaagggagaatatcctgagagagcaggacagccagagtgtcagtattatctgaagactggaacatgcaagtttggccctacatgcaaatttcaccatcccagggaaaaggctggaattgcagggagggtgcagctaaacacatcaggatatccactccgcccggacactgtaaatatgcaaatacttgtaaattccaccatccggaacttttcaatgtggtgccttcgtcacgtggttctcctatttatacctctgtacattcctctgcgagtgctggtccgcagtcctatactggaactatgccaagctgggctttcccacgagcttcttttataccaagccctaggtggcaaagtccttcaaattatgcgccgatgattgtacctcagggccttgttcaaatgccgagctggaattcatatactggtcagctgcagtcacctggggctcaacaaacttatggaagttcacaacaaggcgaagctagtacaggaaatcagggaatgctatcaccctacagatctagttcgtttcctgtgcctcaatatgcgctgcagagagagaatgtatttcctgagagacctgatgaaccagaatgccaatattacatgaagacaggagattgtaaattcggtgcagtgtgcaagttccatcatccccgggtgagatcactgccccctccagattgtgtcttaagtccaatgggtcttccactacgtccaggtgaagaactgtgcaaattctattctcgttacggcatctgcaagttcggcgccaactgtaaattcgaccatcctacagtggttgctccaatggtctatgcgtatggtttctccgcgtctgcttcccctgcatccgcttcgactaatgtacctatggcgcgacgccttctgggatccccaccggggtctggatatacatcttaggcgtcgttttttttttcagttgacctacttcgatttataaaatccatggcactgcctcaggcgctgtgaatgtttctcctaacttcctgccgggatcaaagttctgtaaattgagttgctaccggagatgtacagccccgttttttttggttttaatccagatctttgggaataactcccgaaaccgaataaactttggatacagagatgccagttttcaggtgcctgcactatttgacattattgctgcccctatggttccgaacagaggaacagttgaattctctggaggggctgaagcctgcccttgtgcagttgagattatatcatcgcgtcgatttaaaaaaaaaaaaaaaaaaaaaaaaaaaaaaaaaaaaaaaaaaaaaaaaaaaaaaaa

SEQ ID NO: 4419 - DNA, 855 bp, Zea mays
  Clone ID: TF_ZmC5498_5
ccggccgggagtcccgtcccgtcccaccctatcagttgcgggcgcgcgtccctgtttcgctcgtgccgttgcgctgcgccaagcctccccacctctctcgtctcttctccacccgccgccctcgtgggagtgaaaccctagctagggttctgcccgccgccgccttcgatcaagacgcctgcagccttagcgcgagcccgccatggacacaggacgcaagcgcatcgcgccggggggcgccaacggcgcgggcggcccgaagcgcgcgagagcactgcgggttgtccctttggttcaaattgccattttctccataacttcccgggtggctacctggcggtttcaaagatgaccaacttgggtgggccacctgttccggctcccccaggaaggatgcctatgggacctggtggtcctgatgggccaccttcacctgctctgaagactcgcttgtgtaacaagtacaacactgcagaaggatgtaaatgggggagcaaatgccactttgctcatggagagagggagcttggaaagcccctgcagatggacaactcgatgggagctcctccaatgggtccagggccaaacggtcacttcatgccacctccaatgcctatcccagacatggttcctcactccacattcggtgcttcggccacagccaagatcagtgtcgatgcatcccttgctggcgccatcattgggaagagtggtatcaacacaaagcatatatcccgagtgactggggccaagttagccatccgggaaaatgaggctgatcccaccataaaacatcgagctcgaggggacgtttgaccagatcagcacgctagcgcaatggtcacagagttgatt

SEQ ID NO: 4420 - DNA, 1472 bp, Zea mays
  unsure (1)..(1472): unsure at all n locations
  Clone ID: TF_ZmC493_7
ctcgatcgcggccgaggtccatcgtcctcgtccattccgatcactcgctgctcccctctctcgccggagcgagccccgggccggatggcggcggcagcagcagctcctcccgccgccgcgatcgcgtgatggacgccgacgccgacgccgccgcgatccgccgatggacgacgccggaagggcaccaccacccgcgccagcggcggtgaccgtctccgccaccgccgcacccgcgcctaccccgccctccgccacggtcgccgccgacaagtcctccctcgaccccgacgcgctttatgaagaggggatgtggcaacagatggccatgaacagcggtgccacaatgcaacctgggtcatatcctgagcgaccaggtgaaccggactgcacttactacctcaggactggattgtgtcgatttggcatgagctgcaggttcaatcatcctccggataggaatctggctattgcctctgccagaatgaagggagaatatcctgagagagtgggacagccagagtgtcagtattatctgaagaccggaacatgcaagtttggtcctacatgcaaatttcaccatcccagggaaaaggccggaattgcagggagggtgcagctaaacacattaggatatccacttcgcccgaatgaaaaggagtgtgcgtattatttaaaaacaggacaatgtaaatacgcaaatacttgtaaattccaccacccagaacttttcgatgtggtgccttcgtcacgtggttcacctatttatacttctgtacattcctctgcaagcgctggttcacagtcatatactggaactatgtcaagctggacttttcacgagcttcttggggttttttgggagggggtttttttggggggggtttatgtttttttctttttttttttttgggtggtttttttttttataaaatccatggcactgcctcaggcgctgtgattgtttctcctaacttcctgccgggatcaaaactctgtaaattgagttgctaccggagatttacatagcccgttttctgcacctcattgaatggcatgtcgtcttgattatcctgtccccaatggtttttcagggtgaagaactgtgcaaattctattctcgttacggcatctgcaagttcggcgccaactgtaaattcgaccatcctacagtggttgctccaatggtctatgcgtatggtttctccgcgtctgcttcccctgcatccgcttcgactaatgtacctatggcgcgacgccttctgggatccccaccggggtctggatatacatcttaggcgtcgttttttttttcagttgacctacttcgatttataaaatccatggcactgcctcaggcgctgtgaatgtttctcctaacttcctgccgggatcaaagttctgtaaattgagttgctaccggagatgtacagccccttttttttggttaatccagatntttgggaataactctc

SEQ ID NO: 4421 - DNA, 695 bp, Zea mays
  unsure (1)..(695): unsure at all n locations
  Clone ID: TF_ZmC2222_1
gggaagnactactgcgactactgcgacaagcagttccaggacacccccgccgcccggaagcgccacctccagggcgtgcagcaccaacgcgcccgcgccctctggtacgactccattcgccaccaagaccagcatggcggcgcttcctccctcctcctgcctgacggcaccctcgccaagggcatatgccaccacttcgtccgcacggggacttgcaagtatggggattcatgtagatacttccatccgaagccagatggtgccaatccagcattagctgcaccagggcctgggtctgggcctggacccatggtgcagcagtctgattttattgcgaaccaacccaatttcgttggataccagggagtagacataaattcttcctcagggaagatactggggggacacgcctcttggggcaacctgccgccatcactgcaacctcctcctgaaggcggctaccctcccctcccgttcatcgactggggctgaaggggcgttgtctcgctgaaattcgaaccatttagcatttcataccttgattggttgtgctaaatcgcatatacttggagcgcagtagagtaaaggtgatcccagtttattttgatcttaaatttatctctgtaatagatatttacagtcaaaggtacacttcgcagattgcgttgatgtttgaatgaactcacatttgcatc

SEQ ID NO: 4422 - DNA, 689 bp, Zea mays
  unsure (1)..(689): unsure at all n locations
  Clone ID: TF_ZmC2222_2
ctcgccaagggcatatgccaccacttcgtccgcacggggacttgcaagtatggggattcatgtagatacttccatccgaagccagatggtgccaatccagcagtctgattttattgcgaaccaacccaatttcgttggataccagggagtagacataaattcttcctcagaaagaattgtgatgtatgacaagctagatgcttatcatattctcacttcagtcagctgtcatgccatgatgtgagcccttgccacacaatcatcctatttggacattccaatttactccatcatgtgccagcgggtccattggttagtgacttggcgcctaccagagactgatcgtgtgctgtttggatgtttcgaggctatttgattgcaagcggtcctgtcggttggtgcctcaggatgactaggaaggagggcctacagattaaagaccttaaatttgtttggtttggagctgttgtcagcttcatggcctgcaggaaccatgctcctgatgctttctctgaattttgaaatgtcgtgatgctttcaagtgcttaagcttccagggcagcatagggttcaccgattgcaaatgctccatcatgatttatctcgttaggctgttntgggtgaacccggaaaattgagaggatctatgggggaggaatntncnnttactatttaaataggaaggggat

SEQ ID NO: 4423 - DNA, 1245 bp, Zea mays
  Clone ID: TF_ZmC35732_1
gacgagacagatatcgcgcaccaggaggttctgaagggttctaaagataaaagaaaggaaacctttgcagaaggcaacactcaggaggaatgcaagtattattcaacacctggaggatgcaaattcggtaaaacttgcaaatacctccaccgtgagggaaatggagggaaaacagaggttgaaaaagctgagctaaactttctaggtcttccactgcgaccaggtgaaaaggagtgcccatactatatgcgcactgggagctgcaaatttgcgactaactgcaagtttcaccacccagatcctactaatgcatcttcaaaagaaccagggttggaacatgagaatggcgatgtaccactgcaaaatgtccaaggatcctctcagcctagccttcagatgtggcctgaccagagagcattgaatgaacagcatgttccttttcttgctccagcaccgtcatacagtggagggatggttccacctcaaggaatgtatccatcttctgattggagtgggtatcatcaggtacctttgaatccatattaccctcccggtgttcctttcccgcattttccagctgcccatatgaatcacccgatgtacaaggctgcagatataccaggacatcaaccaccaccatctgatgagtatcccgagagacctggccaacctgaatgccagcatttcgttaagagcggtttctgtaaatacaggatgaaatgcagatatcaccatccaaggtcgcgccagtctgcaccaccaccagcaggtcttagccccatcggcttgcctatcaaacctgatcaacctgtgtgcacttactatggacgctatggcttctgcaagtatgggccagcctgcatgttcaaccaccccttcaacttcgggcctcccgtgccggcagcaggaccacccctccctgggcagtaccctacgcatggaaacttcgcctagcaggcacgtgacgagcgattttctgagtcgccacgattgcttgtaataacctcctccacctgtaaagtagcgtagacaaaagctgtacgtggttggcagtagacatccagcatgtaggcgcaacgaagttgcatggagatgggtacgttacagttggtattgcaaactttacgctgtacaagttacagtccatacataagctgccatcgcatttaaaaaaaaaaaaaaaaaagcggccaaaaaaaaaaaaaaaagagagtacttaaaaaaacggccgcgggcccggggttt

SEQ ID NO: 4424 - DNA, 678 bp, Zea mays
  unsure (1)..(678): unsure at all n locations
  Clone ID: TF_jC-zmshLIB3587P032f11b1
cccacgcgtccgcccacgcgtccgcccacgcgtccgcccacgcgtccggcctctccaaccaggcgccactcgccagggcctaggctggtcatggaaggaaacgccgcagccgggaagaggtcccggacggagacggcgaacggggctgccggcggcgggaagcgctccaaagtacgattgggtgcccgtttggtgagggatgtcgttttctgcactttgtccctggcggttacccggcagttgcaaaaatgctcaatctaggtagccctgctgtatctgcgccatcaagaactcatgtggatcacgccgctcttactggcgcctctcattcagcttcgtcaggcaagacacgcatgtgcaccaagtacaatactacagaaggctgcagatttggtgataagtgccactttgctcatagcgaaagagaacttgggaaaccagcgtacatgccttatggagaacctcctatgggcggtcgatttggaggccgacctgaacctgtgcagccagctgccatgggccctccagcaggaaactntggtgcctcggcgactgccaagatcagtgtggatgcgtctcttgccggtggcantattggtaaggggcggggtcaacactaagcagataagcagagttacaggcgtcaagctctgtatccgcgaacacgaatctagcccc

SEQ ID NO: 4425 - DNA, 820 bp, Zea mays
  unsure (1)..(820): unsure at all n locations
  Clone ID: TF_LIB4766-083-R1-K1-H10
ccggccgggaatagtaaatctcttggttttggctaggcttcggattagcaaaggaaattctcagtttttttgtaaaaaatcgtgtggaaattctcagtgagaccagagctgccaacacccaacacgatgcccttggggaagtactactgcgactactgcgacaagcagttccaggacacccccgccgcccggaagcgccacctccagggcgtgcagcaccaacgcgcccgcgccctctggtacgactccatccgccaccaagaccagcatggcggcggttcctccctcctcctgcccgacggcaccctcgccaagggcatctgtcaccacttcgtccgcacgggggcttgcaagtatggggattcatgcagatacttccatccgaagccaaatggtgtcaatccagcattagctgcaccagggcttgggtctgggcctgcacccatggtgcagcagtctgatattattgggaaccaacccaattttgttgtataccagggagtagacatattacatcaaaaaatacatcaagaatctcactgctgtgttggagccagagaaagcggatgagttcaaaaagggtgtcgagggtgcaaccaagtttctccttagcaagctgaaggacctccaattttttgttggtgagtccatgaaggatgatgcgtctgtggtattcgcctattacaaggatggtgccactaatccgacattcctctatttctctcatggtcttaaggagatcaagtgctaggcgtgcggcgaaattagttacccatggtgngtactatctatgtactattattatatccaaaactatagt

SEQ ID NO: 4426 - DNA, 606 bp, Zea mays
  Clone ID: TF_700424071_FLI
cacccttttgaccggtctgcacctcattccaaagaaaacgaggatacacagcagcctgtggcacttactcttgctggccttccaaggagagaggatgctgaggcctgtgccttctacatgaggtctggcacgtgcgggttcggtgcgcgctgcaagttcgaccaccctcctcgccagcgacaactaaaaaaacggaggaagtatcctgtatcaggatgtggtaccatgcgaatcgcactgttaatgcttgatgctgtcactgccatggtgggagcctgacttgtaaagttcagtatcaccggaagtgtttgtcggcgcgtgctggtactaacggtgtaccttcggcggttggatggtgtcaagagtaaaaatacaccgcctgttctcaaactttgactggatgctaatctccaaaatgtgagaaccaagttaccgtaacttgagttaatccgcttgcatggttatgtgatgataaggcgttgggacgtggagtctacatgatggtagggatataggagatcgaatcgcatgttcgcctcacatgttgatgcaatgccaacgtgcaattagcttgtcaacagattaatttagcattattggcatatt

SEQ ID NO: 4427 - DNA, 695 bp, Zea mays
  Clone ID: TF_ZmC292_11
cggacgcgtgggacagcagcctgtggcacttactcttgctggccttccgaggagagaggatgctgaggcctgtgccttctacatgaggtctggcacgtgcgggttcggtgcgcgctgcaagttcgaccaccctcctcgccaggacgatgtctaatacggtgtactccctccgtttcgttttagttgtcgctggatagtacaaaattgaactatccagcgacaacttaaaaaaaccggaggaagtatcctgtatcaggatgtggtaccatgcgaatcgcactgttaatgcttgatgctgtcactgccatggtgggagcctgacttgtaaagttcagtatcaccggaagtgtttgtcggcgcgtgctggtactaacggtgtaccttcggcggttggatggtgtcaagagtaaaaatacaccgcctgttctcaaactttgactggatgctaatctccaaaatgtgagaaccaagttaccgtaacttgagttaatccgcttgcatggttatgtgatgataaggcgttgggacgtggagtctacatgatggtagggatataggagatcgaatcgcatgttcgcctcacatgttgatgcaatgccaacgtgcaattagcttgtcaacagattaatttagcattattggcatattaaagagtttaggccttcaggtatcaggatatacattttggaattttg

SEQ ID NO: 4428 - DNA, 1894 bp, Zea mays
  Clone ID: TF_ZmC292_3
tcctctagagcggccgccaccgccggcggcggcgagacgtcggtgctcgacctgccggagctggccatggattgcattctggaccagcgcgtccgggcggagctgcggagcatggccgccgtctgccgctccatgcgcgagcgctgccgcggcgaccacctctgggagcggcacatgacaaacaggtggggccgtgtcctgggccgcgccgccagggacgaatggaggacgcacctggcgtccgccagcgagtcccgcgccgcgggcggcggcggcggcggcaagcgccggaggtggctcgccgcgctgtcctgcgtttgcccggtggtgtcctggatgcggcccagggccgacggtggcaagtcgtccgcccccgtgctggacgattccatcatgtcgtggtacctgtccgtggagagcggcaagttctggttcccggctcaggtctacaaccgcgagcatgggcatgttgggttcatgatgtcatgctatgatgcagcgctcagttacgatttccatacggacacattccgtgcaaggtacccaccacacggtcgacgaaccgtggtgttggaggatggcgtgcaatgggacagggtgagggcaccgcctgttgacacccttgcgcatgacctgcacacctctgactgcctgcatgagctccggcccggcgaccacatcgagattcagtggagaaggaacaaagaattcccatacggctggtggtatggagttgttgggcacttggagtcatgtgatggaagcgaacacttttgtcggtgccatcttagtgataccgtggtgctggagtttaatcagtacacgccgggctcaaggtggaggcaagcgttggtgaaacggaaggagcatagggaggagggcaacgagggcgacgggttctacggcggcataaggaagctccgcggcaacgatgacatctccaagtggaggcagctgtggccaacagacgtcctggagtaagcaggaaccgcatcccttctcacaccgacattgatccatcgctcaaatgacacgcctttctttcatcatcatattgaccaaattcgtcgtctctgtcgcgctgttgtaaacgggttagtagaagaacaaatcccgtagctggacaagggtgtaacacttactctctccgtttcgttttagttgtcgctggatagtgcaaaattgaactatccagctacaactaaaaagaaacggatggagtatttgttaggcgtaccaggcgcagactgcttcctatttgttcgtggggctgtaactgtaagccttgtttgtgacccctaagcagtctgcgtcttgtgcctgctgctgtagcggtagagcagagagagatcaaatgtaaattacatttttttagctcaaattcacgacaaattggttgtcgaaaacgaggatcacagcagcctgtggcacttactcttgctggccttccaaggagagaggatgctgaggcctgtgccttctacatgaggtctggcacgtgcgggttcggtgcgcgctgcaagttcgaccaccctcctcgccaggacgatgtcctgcccgaccctgatgtctaatacggtactccttctgtttcgttttagttgtcgctggatagtacaaaattgaactatccagcgacaactaaaaaaacggaggaagtatcctgtatcaggatgtggtaccatgcgaatcgcactgttaatgcttgatgctgtcactgccatggtgggagcctgacttgtaaagttcagtatcaccggaagtgtttgtcggcgcgtgctggtactaacggtgtaccttcggcggttggatggtgtcaagagtaaaaatacaccgcttgttctcaaactttgactggatgctaatctccaaaatgtgagaaccaagttaccgt

SEQ ID NO: 4429 - DNA, 832 bp, Zea mays
  Clone ID: TF_LIB4746-091-R1-K1-D4
attgggtacctcgaggccggccggaagtatatacgaggggcagggcccccctcctctcccttcgtccatcgtcctcgtccattccgatcactcgctgctcccctctctcgccggagcgagccccgggccggatggcggcggcagcagcagctcctcccgccgccgcgatcgcgtgatggacgccgacgccgacgccgccgcgatccgccgatggacgacgccggaagggcaccaccacccgcgccagcggcggtgaccgtctccgccaccgccgcacccgcgcctaccccgccctccgccacggtcgccgccgacaagtcctccctcgaccccgacgcgctttatgaagaggggatgtggcaacagatggccatgaacagcggtgccacaatgcaacctgggtcatatcctgagcgaccaggtgaaccggactgcacttactacctcaggactggattgtgtcgatttggcatgagctgcaggttcaatcatcctccggataggaatctggctattgcctctgccagaatgaagggagaatatcctgagagagtgggacagccagagtgtcagtattatctgaagaccggaacatgcaagtttggtcctacatgcaaatttcaccatcccagggaaaaggccggaattgcagggagggtgcagctaaacacattaggatatccacttcgcccgaatgaaaaggagtgtgcgtattatttaaaaacaggacaatgtaaatacgcaaatacttgtaaattccaccaccccagaactttttcatgtggtgccttcgtcacgtggttcacctatttatacttctgtacactcctct

SEQ ID NO: 4430 - DNA, 584 bp, Zea mays
  Clone ID: TF_ZmC292_8
caacagcctgcgacacttgctagcctgccaaggagagaggacgctgaggcttgtgccttctacatgaggtctggcatgtgcaggttcggtgcgcactgcaagttcgaccaccctcctcgcgaggaggctatttccgagctgcaggcagccggaaaggaaggaatagaagggccgagcctcgtccagcgcgaccatgatgtctaatactgtatcctgcttcagtatgtaataccatgtgaatcgcactgttagttaatgcttggtgctttcagtcttgttgggagtctgactcgtaaagctcattatcatcggaagtgtttgtcggaggagtgctggcactaactatttatcttcagttggttgtcgtgttgccaacttgcgatgtcaaggtgcatatttcagtttttttagagtaaaaatgcactttacatcctgccgccaaacttaactatgggcctgtttatggccctgtttggtttagcttttttttaccagcttttctaaaaatctggttgtggaaagaatttgagtatcgtgaagattacatgtggagaagatgaagtggtccaaagggtccatgatct

SEQ ID NO: 4431 - DNA, 777 bp, Zea mays
  unsure (1)..(777): unsure at all n locations
  Clone ID: TF_ZmC1553_10
tgggaccctcgggccggccaggcccacaatctcgcagtcctttcttcctccgacctccgcagcgaatcggaattcggctcagggttccgccgcgcctctttaaccaggcgccgctcgccagggcctaggctggtcatggaaggaaacgccgcagccgggaagaggtcccggacggagacggcgaacggggctgccggcggcgggaagcgctccaaagtacgattgggtgcccgtttggtgagggatgtcgttttctgcactttgtccctggcggttacccggcagttgcaaaaatgctcaatctaggtagccctgctgtatctgcgccatcaagaactcatgtggatcacgccgctcttactggcgcctctcattcagcttcgtcaggcaagacacgcatgtgcaccaagtacaatactacagaaggctgcggatttggtgataagtgccactttgctcatagcgaaagagaacttgggaaaccagcgtacatgccttatggagaacctcctatgggcggtcgatttggaggccgacctgaacctgtgcagccagctgccatgggccctccagcaggaaactttggtgcctcggcgactgccaagatcagtgtggatgcgtctcttgccggtggcataattggtaagggcggggtcaacactaagcagataagcagagtcacaggcgtcaagctctgtatccgcgaccacgagtctagccccaacctgaagaacattgagctggaaggcaattntgaccagatcaagcaagcccgcg

SEQ ID NO: 4432 - DNA, 1106 bp, Zea mays
  Clone ID: TF_ZmC1553_3
cctcggggatctttcgatcgttcatcctttcttctccaacacccgtcgctctcttctccaactcgaagatgtcggccgccaccgccctgcttcatcgaggcccaagacccgatctctgtttttgataaagaaaccaaacaacaacctagcagtcttccttcacttctctgcttccgacctcgtagcgaatcagatcggggggctagggttccggtgcgcctctacaactggacgcgaggctaggctgggcatggagggaatcgtcacggcctgaaagaggtcccggccggagacgacgaacggggttgcagccgccgggaagcgctacaaagtgtggacgcctctctggccggttgcataatcgacaagggtggggtcaacactaagcagagttacaggcgtcaagctatccatccgcgaccacgagtctaaccccaacctaaagaacatcgagctggaaggcaattttgaccagatcaagcaagccagcgacttgttgcgtgatctcatcgcaaccatcagcgcaagcatgccagcgaaaaatccatcttctgctgtggcgccagcaggaggaggccaaggcagtggtccggggggcacgagcagcaactacaagacaaagctgtgcgagaacttcttgaagctatgcgagaacttccaacacgactatgtatgagatattatctcttattatgactggatgagatgtgtcttatggctatagatgagacttttgtggtgtaattgatgagactatagatttaaatgttgttatgtgattgtgtgtgagatgttttatgtgaaaatatgttgtgatatagttgtttatatatttgttatgttttggaatgtggtgttagatttaaatactgtgaagggtgcttgtgttttcggttttatgtgccactttgcccatggcgagttcgagcttcggaaaggtgctgttttagagttgaggtgccaactctaggcatgacatgtcctgtgctctccatttgcttctctgaatttcctccttgtagcgttagacggttagactgtcgtattgcgatttcaatggattcaattgagttcagctttaaggaaacgttaatcccctgtgcccc

SEQ ID NO: 4433 - DNA, 1999 bp, Zea mays
  Clone ID: TF_ZmC3751_2
cagtgcagtgcaggcaggcaggccgagagaagagccggctccggttaatggcgttgggaagaccacaggtatggagtacccagagcgccctggacagccactctgtgagtactatgcaaagaatggcacatgcaaatttggttccaattgcaagtttgatcatcccagggaaagtggttttgtacctgtcgctttaaacaacagtggattccctctacgtctgggtgaaaaggaatgttcgtattacatgaaaactggacattgcaaatttggaggtacatgtaaattccatcacccagaacttggttttcttacagagacgcctggcatgtacccaccagttcaaccatcacctatttcctccccacatccatatccacatcattccaactggcaaatggggaggcctgctgttgtgccagggtcatttttaccaggcccatatccaccaatgatgcttccacctacagttatgccaatgcagggatggaacccttatgttgtaagtttctattacttgtcattttgtactttattactttaaagaaggcacttgcgtgccttatataaattaggaagatatctttgttctaaattggcatctccaatattgcggtaaatagtgagaattcagtggtaagttcataacaaaatagaggcaatgggctaaaatggaggttttataggaccacatataattggatgtaagttagtaattccttcatgccttgaaaacacaatcttagccatgaatagaagacaccactgactgcctgatgatttttaaaaactctttttggttctcagtcacctatgaaccaaactacaccagctgggggccagcaagctgttccagcagggccatcttatggcttgtcgcaccaggagccaacctctgcagtgacttatggcagtcattatgcgcaattgtattcttcttctgggacttcaagcagcaacatacaagaatatgtgtttccagagcggcctgggcagcctgaatgtgaacattacatgaagacaggaacctgtaaatatggagcagcctgcaaatatcatcatcctcaatacttcagtggaccaaagtctaactgtatactgagccctctgggtcttcccctgcgtcctggttctcagcgatgtgcttactacgcacatcatggcttttgcaagtttgggccgacatgcaagtttgatcacccgatgggtactccaaactacagtcttccagcaccatcacttactgatgtgccagtcgctccatatcctcacactttctctgttactcctattgctccatatctgctgccccctgatccgcggccgcaatacactctagccaaggatccctctgcttatccaccacaagcgcccggaactacgtacggacctgttggggcgatatcaaaggtttatgcccgccacacgcttatccgatccccgacttctggagctgctggcatgcaagcgtcgtaatgagacaagagttgagagcactagtcccctctctgtcatgaagatagatcttgggcaaaccttctcaggatttttctgccataggtggaatggggtctcggattcttttttttgctccaattcgacttcccatcaactgtgaataacggccgcagctgacatagaaaggtctcaataaatggaaagatagggattggcaagctcattcacttgccatttttctgtccatctctgaaacgagaggaggtaattctgactgtagtcggattcagagctccgttattatctcgtgtaacgtgcacaattgcaggggattcgaatgggaaagctgatgggttccatagctctagcccaaatcttttgtttatctcgtcatcttattacatatatgatatgatgtgtatcccccgtcggaacagcaacatgtatatctatctatatatattactctaaactcatgttactgttaaaaaaaaaaaaaaaaaaggcccctaatgagctatctctataatttatacacaga

SEQ ID NO: 4434 - DNA, 2688 bp, Zea mays
  unsure (1)..(2688): unsure at all n locations
  Clone ID: TF_ZmC5023_1
gaccgactgcctcgttgggggccgcggcgacgtttgggactgtcccgttcgtcgtgtcccaaagtccaaaacccaacccacaatggccgccacctcgccggccccggcgccgccgcgcatcctcctcgccggggatgcccacggccgactccaccagctcttcaagcgcgtcaaatcggtgaaccagtcaacggggccgttccacgcgctgctctgcgtggggcagtttttctcccccgagggtgctgcagagggctcaccggaggacgtcaccgactacctcgaggggcgcgcttccgtgcccatcccgacctacttcaccggcgactacggcccagccgcgccgcgattgctatcgaaggccgccgctggtgctcgcgggttcgcacccggtggcatcgagatatgccccaacgtcttctggcttaggggaagcaaccgcttcaccctccacggtttgtcggtggtttatttgtcagggaggaaagggttaggagggcctggctgttacagccaggatgatgtggatgccctacgggctcttgcagaagagccagggattgacgatctgttcttgactaatgaatggccgactggagtggtcagtgggtctgacacttccaatgtgcctaatcaggttttggatcccaatgggtatgatcctattgttgctgaattggttgctgagattaaaccaagatatcacattgctggcacaaaaggtgtcttttactcaagggaaccatatgtcaatgattctgctgctcatgttacccgctttattggacttgctaatgttggaaacaaagagaagcagaaatttattcatgcgatttctcctactccagcatctgtcatgtccagtgctgatatcaatgccaagcctccaaacgccactttgtcaccatatgttggttcagcaaaatcagttcctatcgaagaagctccaaaacgtgcagcggagaacatagattcacaatattggcgttatgatgtcaagcggcaaaggcatggggaagctggtgggggtggattgtgtttcaaatttgtatcctcaggatcctgtcaaagagggagtagatgcagttataggcatgatgaagaggcagtggagcattaccagagaaatgtctgttttgattttctaaacaaaggaaaatgtgagaggggcccagaatgcaagtttgttcacagtctttctggggagactgctctaagggatgcaagacctcctagtgaaagaagacgagtggagagcagttgctggttctgcttgtcgagtccagatgtcgagtcacatcttgtcattagcatcggtgaaggttactactgcacacttgcaaaggggccacttgttccaaatcacgttctaatgattcccgtggaacactgccccagtacattgatgatgcctccggaagcagaggcagaacttgggagatataagattgctctgagtaagtactttgagaagcaaggaaaaactgcagtctactttgagtgggtttcaccacgctctcaccatgcaaacctgcaggctgttcctgtaccattgtctaaagcagacgctgttaacaagatatttcatctagcagccaaaaaactgggatttgaattctctatggtgaatccagatggtgcaaaaactgctagagaatcattgatgtctcaatgcgaaagcaaatcagggctgttttatgttgagctcccggaaggtagaattctcttgcacatggtcgacagtaacgagaagttccctgttcagtttggacgcgaggtgttagcgggactgctaagcatggcggatcgtgcagattggaggaactgcaagatttcaaaggaggaagagattaaactggtggacgatttcaaacaaggtttccgcgaatttgaccctgcagagtgaaaacaatgctctgcgcctgtgtttttgttttgcaatttgtagtctatttttgaggtctcatttgaaatggacatatatgaagcacaagaatgtagtaacgttttccaatgccgcaatttttgttttagggctagttttggaaccccattttttaagggattttcattctcctaagcaaaattagttcattttcttttgtgaaaataggttggaaaaatggtgttttaaactagcccttagataaacgtatgtctgatctcggcgtgagtgggcnnacgcctagggatgaaaacggacggaaaaacccttcttccgttttcgtatccgtattttatcatcgaaaatgggatccggtccggaatagtcgggaacggaaatgggagcggtataaacggaattgcgaaaacgaaaagaaacagaaatactaatggaaacccataatttaatacaaataagaatgatattgatgtttgactagtgattgattggcatgacaataacataaaataaatagatatagagagacaacattctattattatttgattgctaatagtgtatatttagctatatccgatgttgtttaagattttagacttgtcattgaaaatagtcgatggttacaattgtcatttatgctataatttggcacctaaagacacgaggctttattttttatactaatgcatattaggctcgtcccatatttatcanatacggaataaatacggttttaacccggataaaaactggatctcgcaaaaatggacggnataaatcat

SEQ ID NO: 4435 - DNA, 1394 bp, Zea mays
  Clone ID: TF_ZmC5023_2
ggccgactggagtggtcagtgggtctgacacttccaatgtgcctaatcaggttttggatcccaatgggtatgatcctattgttgctgaattggttgctgagattaaaccaagatatcacattgctggcacaaaaggtgtcttttactcaagggaaccatatgtcaatgattctgctgctcatgttacccgctttattggacttgctaatgttggaaacaaagagaagcagcatctgtcatgtccagtgctgatatcaatgccaagcctccaaacgccactttgtcaccatatgttggttcagcaaaatcagttcctatcgaagaagctccaaaacgtgcagcggagaacatagattcacaatattggcgttatgatgtcaagcggcaaaggcatggggaagctggtgggggtggattgtgtttcaaatttgtatcctcaggatcctgtcaaagagggagtagatgcagttataggcatgatgaagaggcagtggagcattaccagagaaatgtctgttttgattttctaaacaaaggaaaatgtgagaggggcccagaatgcaagtttgttcacagtctttctggggagactgctctaagggatgcaagacctcctagtgaaagaagacgagtggagagcagttgctggttctgcttgtcgagtccagatgtcgagtcacatcttgtcattagcatcggtgaaggttactactgcacacttgcaaaggggccacttgttccaaatcacgttctaatgattcccgtggaacactgccccagtacattgatgatgcctccggaagcagaggcagaacttgggagatataagattgctctgagtaagtactttgagaagcaaggaaaaactgcagtctactttgagtgggtttcaccacgctctcaccatgcaaacctgcaggctgttcctgtaccattgtctaaagcagacgctgttaacaagatatttcatctagcagccaaaaaactgggatttgaattctctatggtgaatccagatggtgcaaaaactgctagagaatcattgatgtctcaatgcgaaagcaaatcagggctgttttatgttgagctcccggaaggtagaattctcttgcacatggtcgacagtaacgagaagttccctgttcagtttggacgcgaggtgttagcgggactgctaagcatggcggatcgtgcagattggaggaactgcaagatttcaaaggaggaagagattaaactggtggacgatttcaaacaaggtttccgcgaatttgaccctgcagagtgaaaacaatgctctgcgcctgtgtttttgttttgcaatttgtagtctatttttgaggtctcatttgaaatggacatatatgaagcacaagaatgtagtaacgttttcc

SEQ ID NO: 4436 - DNA, 2080 bp, Zea mays
  Clone ID: TF_ZmC202_1
gggtacctcgaggccggccgggacctcacccaggacgaggcccagggaggatcctcccgactccgacgctgcgtaggactccccgactccgacggcgtccgcccgcgtcgcgtgccacgcccacgccacgccggccgccgcgaggaaagaacaccgggtacttccccttcccttacgctccagtttcacaagtcgcgagccgtgcgtcgcgtcgacgcgagttccgcgtgagggagcaggcagttgcagttggaggcggtgacgaaaccctaggacttgagctccagcgcacggctcgggtcctcctcaccgttcccggcgatggaccggcggcaggagctctgcaggaacttccagcgcggcagctgcaagtacggatcgcactgcaggtttgtgcacgcctcctctcagcagcagcagcaggcgaagcccaacccgtttgggttcggcttagggagtaggcagcagcaacagcagcagtcttcgtttcgtgcgcagttccagcagcagcagcagcagaagcccaacccgtttggatttggagtgcaaggcagtgcggctgcacagtccagaaacgctcctggccaggcaaagccatttcaaaataaatgggtaagggacccctcagccccaacgaagcaacaggaagcggcacagccaccagcagcagcccacacctcctgtacagatcctgagtcctgcaggcaacagattgccgaggattttaagaatgaaactccactctggaagcttacgtgttatgctcacctcaggagcggtccttgtgacatcacgggagatattagctttgaagagctgagagctaacgcgtatgagcaaggcaggcaagggcatcctctgcagtcaatagtagagggtgaaaaaaaattgaaaaatgcaaagctgacggactttaataatttcctgaacatgccacgtctatcggtatcacaaactccaagctttccaactgtggcttccttccctgaagtgaaaaataactcagcatttggggtttctcaaaataatggaccaccagtgtttagtagtttcagtcaaattggagtaacaactaatatgggacctgggtccagaactacaccaggagtcccaaccaatactctttttggtcaatctacccaaccaagccatccaacatttcctgcacctacttttggtcgttctgatatgaaatttggagtttcaggtccatttggaagccagatatcacaacaatcatctgggagttttcaaggttcaaacatgtccagttttggcaatttctcaaagcctcatgccagctaccagcagtccccttcctcctctagccatcacagagacattgataggcagtcacaagatttacttagtggaattgtggttcctacaagtgccacaaacgaagctcctgttgaggacaataaaaatgaaaatcaggatgatagtatctggttgaaggaaaaatggtcaattggagagattccgctgggtgaaccgccacagaggcacgttagtcatgtgttttagcaacattcttgtatttctgtgtcgtggaaccactgtcaagtcagcttcactgtctccttccatattgtcgggacaccatcttacaatttctcctccaggttcataaccataacacgtcaaattgggggcataaaatgcacctgaaatgctgattgggcagcgtagaaacttcttgtatcctgcatcacatactctgtctctattgttttcttgttagctccatgtacttcgtcacattcagggctcgtaatatcccgatttcttgttttagggtttgttgagtttagctgtgggttttaaaaagccgttgcagctgtttttttttttgcggaaattgtaccatacatggaagcagtagtttttgaagaagcggaatttggttctaaaaaaaaaaaaaaaaaagaaaagggggaggggggcttggcgatttgtttgtttctcttttttgtagaagagacggtttctaaaagttaaactgtacgtccactaggtcaatcttgcagggtttgtgattctagggtcctttgcgcatgcaagacgattttgtttctag

SEQ ID NO: 4437 - DNA, 466 bp, Zea mays
  Clone ID: TF_ZmC493_13
gcggttaggttgaatccccacgcgtccgggctattgcctctgccagaatgaagggagaatatcctgagagagtgggacagccagagtgtcagtattatctgaagaccggaacatgcaagtttggtcctacatgcaaatttcaccatcccagggaaaaggccggaattgcagggagggtgcagctaaacacattaggatatccacttctcccggtttgttttttcttgccagttacatgtcctcttctacatatgtctgtttgttttgctgaaaaggagtctactttacttttgtagaatgaaaaggagtgtgcgtattatttaaaaacaggacaatgtaaatatgcaaatacttgtaaattccaccacccagaacttttcaatgtggtgccttcgtcacgtggttcacctatttatacttctgtacattcctctgcaagcgctggtccacagtcatatactggaac

SEQ ID NO: 4438 - DNA, 813 bp, Zea mays
  Clone ID: TF_LIB4759-098-Q1-K1-E12
gggtacctcgaggccggccgggattctattcctcccaccgatcactcgctgctcccctctctcgccggagctccgggccggatggcggcggcagcagcagctcctcccgcctccgtgatcgcgtgatggacgcacacaccgccgcgctccgccgatggacgacgccggaaggccaccaccacacgctcccgtggcggtgaccgcctccgcctccgcctccggccaccgccgcgcccgcccctccccaaccctcagccactgctgccgtcgacaggtcctcccccgaccccgacgcgctctatgaagaggggatgtggcaacagatggccatggacagcggtgccactatgcaacctgggtcatatcctgagcgaccaggtgaacccgactgcacttactatctcaggactggattgtgtcgatttggcatgagctgccgattcaatcatcctcccgataggaatctgaatgaagggagaatatcctgagagagcaggacagccagagtgtcagtattatctgaagactggaacatgcaagtttggccctacatgcaaatttcaccatcccagggaaaaggctggaattgcagggagggtgcagctaaacacatcaggatatccactccgcccgaatgaaaaggagtgtgcatattatttaaaaacaggacactgtaaatatgcaaatacttgtaaattccaccatccggaacttttcaatgtggtgcctttcgtcacgtggttctcctatttatacctctgtacattcctctgcgagtgctggtccgcagtcctatactggaactatgccaag

SEQ ID NO: 4439 - DNA, 778 bp, Zea mays
  Clone ID: TF_LIB5117-029-A1-PF1-C11
ccaggactagtgggccaagcggaggcctttccagcaccaggcccaatgctgctaggggcttcttaagtcatgccttgggcgtaccggacaggcccaggcccaggcccaatgctgcgaactcgaggttgcctaccgcctcctttcaaaggcgaaagctcgcgggcgtcatatatacagcctccgcctcaccgtcctcttcctcgccctcttcttcacccttcccggagcgagaagcttgcgcgggcatcatatacagcccccttcctcggtgtgctgaacccttcctggagtggagaaagaccaggaaacagaaaatggcttggatgtctgaccagccttgccgctcctacatcattgatggatcttgcaagtatggttcagactgtttgttctctcatggacttgacttatttgggaggatagagatgcaaatcagggcacttctgcatgtgccggatgtatatcaagttccagtagagcacttgccatggagtcgccctgagttgggcataatgcttcggcaagtggggatgggatgggactcttggtcacctaatgagtttgctcgagcgtttcatactatttgtgtggtttataacagctatggatattatgcaatcctggttggagaatgcttcacactacctgggttacttaccttacaatccaaatgtgatggatgctgatagtgaagctcaccagatttatattaacttctctgctcaaagtatagaaatatgcactgaagaaaatgttcgtatctatttcagccatttat

SEQ ID NO: 4440 - DNA, 646 bp, Zea mays
  Clone ID: TF_LIB3969-004-Q1-K1-E7
ccccctgggtcgacccagcgtccgcgtcgtcttggcttcatcctctcgcccgccgtctcgactgtagcaagcggggctgctgtccgccgcattcaggagccatgcgtgaggggatgagggagagggacagaggcgggagcccggatgcgtcaggtcctccgcccttccgcggcccggcgtacaagacgaagctgtgcgcgctttggaggggcaggggcggctgcccccgccccaactgcggtttcgcccacggcgaggctgagctccgaaggccgccccctcgcgcctccttccagcctcgcccacgacctgggagaagggattacagagatcatgagtttagactcaggcctgatagaagacactcaccccatgggaggtattcccctgaaagagatatcaggcgtcgttcatttcatgataagagaccaagttctgaagataggggatctagtcattcaagatcacctattaggaagagtgagagaaaacatagtaaaagtcctgatggtggagaaaccgattcatccgtaagtgttcgaagtcctgataacgaagacagaggaaaagatgaaaggtacttaagcagtgatgagaaaaatggtcatgaagatcatctgaaacaaatgcatctggacatggaaaa

SEQ ID NO: 4441 - DNA, 1793 bp, Zea mays
  Clone ID: TF_ZmC4867_1
cattggggccctcgagggcggccgggatttttccctgtgtcattcgttgtcttcggttcatcctctcggccgccgtctggactgtagcaagcggtgctgctgtccgccgcgctccggagccatgcgggaggggatgaaggagagggacagaggtgggagcccagatgcctcgggccctcctcccttccgcggcccggcgtacaagacgaagctgtgcgctttatggagaggcaggggcggctgcccccgccccaactgcgggttcgcccacggcgaggctgagctccggaggccgccccctcgcgcctccttccagcctcgccctcggcctgggagaagggattacagagataatgactttagagttaggcctgagagaagacactcaccctatgggaggttttcccctgaaagagatatcaggcgtcgttcatttcgtgataagagacagagagcaagttctgaagataggggatctagtcattcaagatcacctattaggaagagtgagagaaaacatagcaaaagtcctgatggtggaaaaaccgattcatccgtaagttttagaagttcagataacgaagacaaaggaaaagatgaaaggtacttaagcagtgatgagaaaaatggccgtgaagaacaattgaaacaaatgcatctggacatggaagcattgcgtgaagataaatcaaagctggaggcgatattggagaagaagactgatgaagagcgcaaactttgtagcagagtagaagatcttgaattgcaattgaacaaagagaaagatgatttccaaaggatgacctccaaaaccaaaaagctaatcaaagcacatgggcgttatataaaagcacaggaggatttaaagaggtctcaggctcgctttgagaggctagcagatttgcttgcttcagatattttgaagccttataccaaggagcagggttccatcggtattactgccaatgacgatccatataatgctaatgaaatgagcccaagcgaccaaagacaaaaccatgtttcagcatcgagaaagagacctatttccctcccaagaagtgaagaagcaaaaactgggaagagacagagagagaatggtgatgatatgattccaacaccagagaactatagacctgaagatgctctagaacatgtccaagatagcaagggaactgatcgactagaatcatttacagtgaagaagttaagagtgggtgactacgatgatgaaggaaacattgtttcttcaagcaatatttttgcggataggtacaagggcgatgatgaggaagttgatgttgattagtgacccgatgccgtcggtcgctgataacgatttgagctgtacgaagcaatttcagcagacgacatcgatgtcagcttctaaaactacttgtatgccttttgcatcgggtaatagggcctggtatatttggtagctatttatgtgcttagactgagttgtgatgctgtcaaacatgattacatgcgatgctagaattttcttcttttctgtgtttcctgagactcgaagaggatattaatctgtattcgcctcatgtattattcttagccagtttgagtattgagatttttggactggtgttattctcagcctcaggttagaaacaccatgcatccatgattcatttacctatcatgaaatgcatgtgtgatcattaagcttactaagggtgtgtttggttgaggagtggagaagaatatggtggatggtggctttatttctattttttggatgttaagggcctgtttgtttaccccaatgaatt

SEQ ID NO: 4442 - DNA, 1748 bp, Zea mays
  Clone ID: TF_ZmC28685_1
gcacctgctcctggccgctggcgcgtccgccgacgcgctcgctttctcgggcctccgcgccggcgacctcctcccgcgcgccaacgccgccgccgacagggaccgcgcgctccgcgtgctcctcaagtcccccgcggcgtcgccgtcgtcctcgcccaagaagtccgcctcgccgccaccgccgacggcggcagctgcggcgccggagccgaggaaggagtacccgcccgacctcacgctcccagacctcaagagcgggctcttcagcaccgacgagttccgcatgtacagcttcaaggtgaagccctgctcgcgcgcctactcccacgactggaccgagtgccccttcgtgcaccccggcgagaacgcgcgccgccgcgacccgcgccgcttctcctacagctgcgtcccctgcccggagttccgcaagggcggcgcctgccgcaagggcgacaactgcgagtacgcgcacggcgtcttcgagtgctggctccacccggcgcagtaccggacgcgcctctgcaaggacgaggtcggctgcgcgcgccgcatctgcttcttcgcgcacaagcccgaggagctgcgcgccgtcaacccgtccgcggtctccgtcgggatgcagcccaccgtttcgtcgccgcgctcctcgccgcccaacggcctcgacatgggcgccatgctcaacccggcctggccctcctccccggccagcaggctcaagactgcgctcgccgccggccgggagctggacttggacctcgagctgctcgcgctcgaccagtaccagcagaagctgttcgacaaggtgtcgtcgccgagggccggctggggaggcgggatgggctcgccgctgcccgccgcggcgcccagcaccagggccgtgccggactacgcggacctgctcggctccgtcgacccggccatgctgtcccagctgcacgcgctgtcgctcaagcaggccggcgacatgccggcgtacagctccatggcggacacgcagctgcacatgccggcgtcgcccatggtcggcccgaactccgcgttcgggctcgaccactccatggccaaggccatcatgagctcccgcgcctcggcgttcgccaagcgcagccagagcttcatcgaccgcggcggccgcgcgccggccgcgcgctcgctcatgtcgcagcagcccaccgccggggcgccgtccatgctttccgactgggggtctccggacggcaggctggactggggcgtccagggcgacgagctgcacaagttccgcaagtccgcgtctttcgcgttccgtgggcagtccccggcccccgcgccggctcccgccgagccggacgtctcgtgggtgaactctcttgtcaaggacggccacgccggcgacatatttgcgcagtggccggagcaggagcaaatggtggcctaatctatcgaccgtcactgctggctcatagcatctagctgaccaaagttcattcctttccttcaattgttttccccctttgtttgcttaattcgattcatatgagatgttttttactagtacatatatataggacgttctataatatttggttcatcgccagaacacccagtggatgaccccaaagggagctctgtattggatgaggaaggatttaccaatattttatgatatcgaatttataaatatttttaaaaaaaatttaaaaaaaaaaaaaaaaaaaaaaaaaaaaaaaaaaaaaaaaaaaaaaactcgagaggggcgcggtacc

SEQ ID NO: 4443 - DNA, 939 bp, Zea mays
  unsure (1)..(939): unsure at all n locations
  Clone ID: TF_ZmC292_7
cggccgggntattcggttatttgcctatgttcgtacccaccgccatcactacgcatgccggtccgttaagcttcctccccagcttaccgcgtgctgaaaccctagccgccgaggagccgacgatgtcggacccttacaacccgtactaccgtggagccttcccaggcggcgacggtgcgccgccgccgctgccgccttactcggactttgatgtcgacctcgtcgcgacccgttacaccggcaccccacggtctcatccatcctctgccgacgtcggcgccttcgaatcgcatctcggcgcgagacgattcgcggaaggtcctgaatgatgaggattcttatcctgagcgaccaggggaaccagattgtccttatttattgagtagtagatgtaagtttaaatctaaatgcaagttcaaccatccaaaggaaatggtgaacgcattaggaacaagaacagacaatgaatgaggccttctgaacccgtttgttcgttctatgcaaaaacaggcaaatgtaaatttggtgccgtttgcaagttcaatcacccaaagctagaagatattaagacatcatctttgattgcaaaggaaaccatatatagagcaacaactgatgcagcagcgcacattggtgggacagatgattctgttcccgcaaagacacatgcaccaattgccccagccgaggcacataatgcaaaggggcttccaataagaccagtatgtatttaccaaatggttgtttagctagagcagtaaacttcagttaacttttttctttgatagaacatttgatacagtaaatttctgttttatccagatcttttatttggaaacctcattagtaaatatgttgcaaaaatgcaaaatatatgcagaaatgtaaagctagaactctgtcccatgcttactgaaaaaaaaaaaaaaaaaagcggcc

SEQ ID NO: 4444 - DNA, 397 bp, Zea mays
  Clone ID: TF_jC-zmX700082717a1
agcagctggtaacttaccgacaagtcacaacatttaggggcccaaaaaaataacctttttttaaagctgaacttagttgaaacccttgaaaaagcaataccacagtttaacccgttaacccttcaagggggaaattcaaaaaaacaaatggggagcccaggacatgttatgcctggagttggcaccttaacttttaaacagcaccttttcgctgttcgtttttgccatgggcaaaagggcaccccttgccgaaaggacaaacccccttcacgaaagtttcgcatagcttcggcttggaggtggttttggcacccaaaccaccgccttggtcttcaaatggagcccccggagcaaaagaatttttctccaacatgctcttgcttatgggcccgaaaag

SEQ ID NO: 4445 - DNA, 2775 bp, Zea mays
  Clone ID: TF_ZmC533_1
gccggccgccgggaagaaactgcgagtcctcccatccgtgctttgtcgcctctctctatctttctctctctcctctcccactgccgttccccaaactcagcctcggcttctcttctctggacggggggcggctgccggcgtcgaccttcgcgaggaaggagaggaggccgttggatctcgctggattcgattgggttaggacgggatcaccgcgggcagatgcgctgaactcttggcgtgtgcagtgcgcgatggtcgatcttgctgatctcgagggtgcgggcgaggcggcgcgctcgcatctcgccgcctgcggccagcgggacaggctggcggcgctgctggagctcgcggcggccgacgacgtcgcggggttccgcgaggcgctcgcgggaggaggcggctagggcgacgcagcggagctggcggacggggtggggatgtggtacggccgaagcaaggcgtacgagccgcgcacgccgctgatggttgcggcgacgtacggcagcgtcgaggtggtgtaacgttggctcggcctcggatgagtcgacgtcaaccggcgcccgggcgtagacgtcgccaccccgattaataggcgtgaactgagctgtcaggatggctcgcgagatgagagagttgctcctgggtgccggggcctgcccggtaacccccgactccgacggatcgcttgcctgccgacgtcatcttgtctccgtgtgcttcgcccgacgccttgggcgatctggagatgctccttggccgccgccgagggctcgctgtcgcgacctcggttccatcgctctcgtcgtccccgccgctctcgacctcgccggatgagggcacaggtcgcctcacagattgcgtcttcgttgtcgccgattaccgtcgaccgtgccaagaaggagtacccggtggatccgacgctgcccgacatcaagagccgcgtgtatgcctccgacgaattccgcatgttcgcgttcaaggtgcggccttgctccagagcctactcgcatgactggacagagtgtccgttcgtgcaccctggcgagaacgcccgccgcagggatcctcgcaagcacccatacacggcggtaccctgccccaacttccgccgccctggtggctgccccagcggtgatagctgcgagttctcccatggtgttttcgagagctggctccacccgtcgcagtaccgcacaaggctctgcaaggagggcgcagcttgtgcccgccgcatctgcttcttcgcccacgatgaagatgagctccgccatgtgcctcacaatagtggtgcaggtctgctgtctccccgtgcctcttcatccattgacatgaccgctgctgctgctgctctagggcttctacctggatctcctaccaggcactttgtgccaccacctctgtcaccatctgctgccaacaatggtggaggtgctgctgctcattggctccaaggtagcaggctgcgctcttctttcaatgcaagagatgcacaggctgatgaccttggctcgctcctggaatgggaatctcaataccttggagcgctcagcctcccacaaagcagccgatcccagccccgtctttctactggtctgactattcgtccaacagcagttgctccatcctacctcgaagagatgtatgcttcagacatggctatgtcgccaaggttcaccaatgaccaaggtcactcagtcttctcaccagcacacaaatcagctcttctaaacaagtttcatcatcaacagaagggccttttgtcgcctgtcaataccaacaggatgtactcaccaaggggccttgatccatcaattatccattctccatttggtggcatgtctcctcggtcccctcggactatggagctaacatctcccttaagtgtccgtgttggggctgctgctactccgcgtgatatgttggatcagttttcttccctgaacaagcaccaggtgccatctgcgggatcgccacggaatcttaatgtctcatggggcaacattggtaccccaaagagtaaggtggattggggtgttgacaacgatgaactagtgcgcttgaggcaccctgtgcaacctggaaatacagaagaggagccagatgtgtcttgggtgcagtcactggtaaaccatgctgagctgagtggcaagaggggtgaaatggcaggcatggcttctccatcaactaataagcctgaactgagcagtcaggatgactcactggatgagagtgttattgcttcttggcttgagcagcagatgcacttggagccgaagtaactgtgaaagaggtcttttgctctcaaggtggatgaaaccatatttttgccgcgttagtttccgagaagaatatttgtcctagtaaataataatattctttttttattcttgaattttttgttcgcaaagtcggagatggtggtcttcaggaaagcatttgctcacaaattggtagctgaaagaagctgtcgagtattggtaaacagcctcgttaccttggaggtcctaactagtattcttttgattagttcagatgaggtgaaaattcatatggtcgaccgtgagagtcgatagtaattgtgttgatctctgtaacaagagaggttatagatttttttacccccatttgtcaatgaacaatttcataaatacattgatatttccagtttattcttctgaatacgtttgtacctatgtttttttccctattttctaccatggtagttttgtatctgtgtcaattctattacaataaagtcccaaatttggcccc

SEQ ID NO: 4446 - DNA, 447 bp, Zea mays
  Clone ID: TF_LIB5116-018-A1-PF1-C7
ccgtgctgcctcctcctcctctctctctctaccgacgccgcccccgccagagagaaaccctagcctagggttccacgcgccgccgccgccgccgacgtcgaccccgcgtcgccctccccccgagctcgccatggacgcgggccgcaagagggccgtgccggagggcaccaacggcggtgccgccgtcaagcgcgccagagaatcggagtcggttcaaacgggtgtaggaagcaaatcgaagccatgcaccaaatttttcagcactgctggttgtccctttggttcaagttgccattttctccataacttccctggaggtcaccaggctgtttcaaagatgaccaacttgggtggtccagctgtttcagctcctcaaggaagaatgcccatgggacctggtgttcctgatgggccacctacacccagcttgaagactcgcttgtgtaa

SEQ ID NO: 4447 - DNA, 698 bp, Zea mays
  unsure (1)..(698): unsure at all n locations
  Clone ID: TF_LIB4727-020-R1-K2-C6
cgggntattaacaaaatgctgctatacttggtagctgcaagttatattttaatcccgagtgttttttttttcaaattatatgttttatgaccttctatgcttgcaaatgatcacaactttgagtgttgctcttactcagtatttactgttaacacctgcaagtctgcttctgatgatctgatcccatttttctgatcctaaatgatttaggatatctgaggtctgctgcaaccaaatctctagctgccaattgctaatgttttctaatagattcgtagcaaatggcttcacaaaattctcctgaaacgccaagctgataaatagtttcttcttaaaacctatttcaaaaattttagtttggtggaggtaccaagaatggtgcagcacaagactttccagaacgacagggccaacctgtatgcgagtattatctgaagactggaacttgtaaatttggttccaattgcaaatatcaccatcctaagcaagatggatctgtgcagtctgttatattaaacaacaatggattccctctacgcctgggtgagaaagaatgctcctactatatgaagactgngcaatgcaagtttggttctacatgtaaatttcatcatccagaatttggtggtattccggtgacccnctggatatatccaccattacaatcaccttctgtgccctcccctcatacatatgct

SEQ ID NO: 4448 - DNA, 415 bp, Zea mays
  Clone ID: TF_LIB3205-035-P1-N1-F9
gagaacaagcggtgtatttttggggcttgacaccatccaaccgccgaaggtacaccgttagtaccagcacgcgccgacaaacacttccggtgatactgaactttacaagtcaggctcccaccatggcagtgacagcatcaagcattaacagtgcgattcgcatggtaccacatcctgatacaggatacttcctccgtttttttagttgtcgctggaaaaggaagagtagcttgaactggagccataaaagctatatccacaactgaccgatcaggatgattgaagcgacaaatagaaccatatttgcagctgcctgtcttcatataaaacgagcaatccacttcacctggtcttattggaagcccctttgcattatgtgcctcggctggggcaattggtgcatgtgtctttgctg

SEQ ID NO: 4449 - DNA, 672 bp, Zea mays
  Clone ID: TF_LIB5116-066-A1-PF1-D7
gcgaacttgcctgcctgaaggcgcgcccggaggagagcagagcaggagacagaggaggagaccaaggagatgccgctgggcaagtactactgcgactactgcgacaaggagttccaggacaccgccgccgcccgcaggcgccacctccagggcgcccagcaccaccgcgcccgcgccctctggtacgactccgtccgccgccaagagtcccacggcggcgcatctcccctcctccagcccgacggcgctatcctcggccagggcgtctgcaaccacttcgtccgcacgggaacatgcaagtttggggatgcgtgcaggtacttccatccgaagccacatgctgtgaacccagcatttgctccgtctgggcctgttccaggagcaatggggcaacagtctaattttcttggaactcaaccaaattttgttggatatcaggcgatggaaggaaattctttctcagggaacatactaaggggccacacttcttggggcaacttacctccatcgctgcaacctccccccgaaggtggctatcctccgcttccttttgtcgactggggttgaactgtcacctgtctgaaatgttgatcatttgggatgctgtatatttgaccggccattgaaatgtgtgaaagaaatttcaccaataacaagtgcttgcttcctgta

SEQ ID NO: 4450 - DNA, 769 bp, Zea mays
  Clone ID: TF_21209055
cgcctgccggtaccggtccggaattcccggccccgcccacgcgtccggtcagttctatatgaagaccggagactgtaagtttggtgctgtatgcaagttccatcatcccagggagcgaataattcctactcccaattgtgcactgagtccattaggcctacctttgcgcccgggagagccaatatgcagtttctacaatcgctacggcatgtgcaagttcggtccaaattgcaaattcgatcacccaatgggaaatgccatgtacggccaggctccatcgccagctagcgaggccccagctcctcggcgcatgctggcacatgtaccgccgtcgcacccagaagcatcgcctgatggtggttccggaaggtctaggaggattgcccactctgattcccagcaaataccctctggtgaaaggagcgctgagagagaggcgtcctaggccatcctcggtgtcttcgttccccattcttgactggagtaaccatctgcaaccaacaacattcgaggatccgaagctgtacaggtcttttgccccacctctgagctttacataccggagcttgcttcaacgtgtattgcattcaggcaggaaaaagttcttgcctgttcgggatgctcatttgctcccccactgaaacgggaacaaacctaccttatttaaaacatatgtatggatggaacctactcacctctggacattcaaacccattcgagtcatgtgcactggtcccggtgctgtagttatagagctgtctttgcatgg

SEQ ID NO: 4451 - DNA, 620 bp, Zea mays
  Clone ID: TF_LIB3587-272-Q1-K6-G8
gggacatcatggtggaaaagcagttgaaggtgtttttttacaagatcaagatgaagcagtggagcaatgcaccagtgatcaactgaggacaatcacagatgggaggtgctcatatgggtcatcgtgccacttcaatcatccacggctcaaagcaaaactagaagtttcaagtttcccttctgaacaaagaaatcatgaagctgaatttctggaactgaaccgtgttggcctccccattagagaaggagcaaggaagtgtatctattacatgcgtaatggtacatgcagatatggaaagaaatgttgttttaaccatccagagcaagttcttgatgttcaacaccacactgcaacaggatgggatgatactaacttgcaatcttcaccacactcaaagaagttacctgaacataaaactatggatgacatatcgtctggatctgaggttcttcctccaaacatacttcggatgcttttacctccccagaatgtgccccctagtacaaaagaaaaggaaatcaggataaaaaaggatcctgattgggcttcagcttcagatgattctgatggctgctgctcggcagatagttcaaatgggcctttgtgcaagcaggaacatg

SEQ ID NO: 4452 - DNA, 840 bp, Zea mays
  unsure (1)..(840): unsure at all n locations
  Clone ID: TF_LIB5117-050-A1-PF1-C5
acccacagcctcccaccccagtccccaccccgagcccgtgaaccctagcacattcgtgcgccggcggcgatgtcgggctaccctttttacccatacggccgcggtggcgtaggcgaagatgcgtcggcgatgtcgggctaccctttttacccatacggccgcggtggggtaggcgacgatgcggcggcgaggtactcttcctacgagatcgacctcatcgcggcacgctacgctggcgacccgtcaccctacccctacccctccgcctccggcggattcgacccgcatgtcggcgcgaggcgacccgcagatgttctctatcatcaatctattatgggaagccatagtactattgggcagagttatgcattttattctccgaacactatggtcaaacgccctaggcttgaaagcagccttcctatttatccacagcgacctggggaaaaggagtgtgctttctatatgaggaccagaacatgtaagtatgaagaaacctgcaaatttgaccatccacaatgggttccagagggcgggattccaaattggaaagagggtacaaaggctggggaatcctatcccgaacgtccaggggaaccaaattgtcctttttttgtaaagactggtgactgtaagtttgggtctaaatgcaagtccaaccattcaaagaaaaaggatgatggaacagtggctggaccaggcgataaagagtctctattttctggtaattccaccttaccggtgaagccttctgagccttgtccggagcctctaatttctggntattctaccttacccggtgagnccttctaaccttgtccgcactatngcaaaggcaat

SEQ ID NO: 4453 - DNA, 1213 bp, Zea mays
  Clone ID: TF_ZmC39160_1
tttttgtgtctagtcgggctcgctactctttatgaaatggacatggacgtaatatataagtgtcaagtcgagctcgtgaatagagccatttcagtattgacagcaagatctcttcaattaagcattttttatccattacaatgcgccttgctcccagtatgacgaaatacagaaaacaaaaggaaagagaaaaattgaaaggtggaggaacccagtaactctgcatgtgaaaattttcttgataacaacgaaaattttcttgcctgagaattatttaccgagggtatggacctgagccccaccaaggcgcccaatatgctctacggaacctgacattcaaaaaccttcttttttcccgttttggacatgaacggaacaacccaaaattgctagtgaatcgagcttgcgtgtgacctatcaatgctctcttattctgatggtaaagaaacccaccctcgccgcagcttctctacagagaccacagcttattcacattggagaggcctatcagaactgtgtcaagtgatagaaaatttatgatgagaggatcactcccaccagctcaataaaatcagcgcccaccaccagggctcgaactgccggcacttgtaggagtctgagtttgcataatggtatcatgatggaataccccttttggcaagattgctccaacaggcgcgggtcctgccactggtgatactacatgatttatagatggatctttagttgagatatattctggggaagacgaagatggagccaatgtggcaacagagaagccaataggatagggagcaattggcatgtcagatagtggcaaagcagatgaactgtagcctagtgtacccattgagtgatcatatttgcatgcaactccatatctgcaatatccattttgggcatagtacgcacaaggctgagcacccggacgaagtggaaggcatagatggctgaacatgtaattggtcttaggagtgctccaatctcgaggatggttatatttacacgtagttccaaatttgcaatcgccagtcctcatataatattgacactcaggctgccctggtcgctcaggaaatccatgttcttgatgattattgcttgattgtccagctgaggaagaatatggcaagtatgtaccgccataagcaattgcggagtctacatgatcagcacaatttttcttcacatgtaaaaaagaaacataacataa

SEQ ID NO: 4454 - DNA, 443 bp, Zea mays
  Clone ID: TF_LIB3076-015-Q1-K1-B7
cccacgcgtccgagctattcttcatatatctacattgagtgggcgattggagtctgataggagctagaaccttcatatgtgacaccagaatgaatgggtgattggagtcgaatgtacagacttgtaggatattccggaaatgttttagcatgccttttgatttaagcatgtacctgttaaaagtcttctgtgttttccaggttaatggagttggaaagaccgcagttacagtggagtacccagagcgtcctggacagcctctctgtgagtactatgcaaagaatggcacctgtaaatttggttccaattgcaagtttgatcatcccagggagggtggttttgtacctgtcacattgaacagcggtggattccccctgcgtctgggtgaaaaggaatgttcctattacatgaaaactggacattgcaagtttggagctacatgt

SEQ ID NO: 4455 - DNA, 730 bp, Zea mays
  Clone ID: TF_21209753
gcacgagaactttcgcaagcgcaggtatctccccacagggcagcgcgtgcggaaaccctagtcgccgccgatgtcggaccctttctacccgtactaccgcggagccttcccgggcggcgacggtgcgcagccgccgccacgttactcggattttgaggtcgacctcatcgcggcccgttacgccggcaccctattgccttatccatcctctgccgacgtcggcgccttcgactcgtatgtcggcgcgagacgatccgcggaagttctctatcaccaatcttttatgggaagtcatagtactgttggccagaatgaggctttatattcatcgaatactatggctaaacgccctaggcttgaaagcagccttcctatatatccacaacgaccggggcaaaaggactgtgccttctatatgagcactggaacctgtaagtatggagagacttgcaaatttgaccatccacaatgggttccagagggtggggttccaaactggaaagaggtcctgaatgatgaggattcttatcctgagcgaccaggggaaccagattgtccttatttattgagtagtagatgtaagtttaaatctaaatgcaagttcaaccatccaaaggaaatggtgaacgcattaggaacaagaacagacaatgaatcactaatcgctgataccgctatcttaccagtgaggccttctgaacccgtttgttcgttctatgcaaaaacaggc

SEQ ID NO: 4456 - DNA, 2362 bp, Zea mays
  Clone ID: TF_ZmC5498_3
tctcctccacccgccgcccccgcgggaccgaaaccctagctagggttctgcccgccgccgccgccgccttcgatccagacgcggccaggcttcccgcaacaccgccatggacacgggccgcaagcggaccgcaccggagggcgccaacggcgcgggcggccccaagcgcgcgagagaatcggagacaactggtgtaggaagcaaatccaagccgtgcaccaaatttttcaggttctaatctagcttaaaatgaacagtcatccggtaacatctactatcgttattatgctcttcttttttttaaattaaaatttgttatgttactaaatgctgtgcttgatgctaacaaatgggtcggtctagattctgctacaggatggttttatctaatcattgcttaagaacactcaacggagtaaaaaattggaatctactgctgtttatcactgtgaaaattggtgcaacaagggaacgtactgctgtttatcactgtgaaaaccgatgcaacaagggaacctactgctgtatatcactgaaaatctgaaccatgcaacaatgttttcaaggaagcaaaacttcctctcaaaaggaacaatcagtcaataacaccatggaacaggttcacttgaagaaatcaagaagattagattgaacatggggactgtaattcaattccttgtgaattgtaccagttatttgttcaattgcatttccttatcaatatgttgcagtagtagttctgaacaccttgaagcttgattatgaatggcatttctatataaagcatgatttctaaaagattagtttgtatcatttacttcagcttttattctttgcatatatatttttagcagtcatctagtgaggttgcattatccagctgcatgtaacttaatctcttccatcaacattgtttgcatttgtgtatcaactaaaatcatctgtaggttgtcagatatattagcatgttctgttgcttatattatgttttcaatgtgcagcactgcgggttgcccctttggtgcaagttgccattttctccataacttcccgggtggctaccaggccgtttcaaagatgaccaacttgggtggaccgcctgttccggctccaccaggaagaatgcctatgggacctggtggtcctgatgggccaccttcacctgctgtgaagactcgcatgtgtaacaagtacaacactgccgaaggatgtaaatgggggagcaagtgccactttgctcatggagagagggagcttggaaagcccctgcagatggacaacccgatgggacctcctccaatggggccagggcccaacgggcacttcatgccaccgccaatgcctttcccagacatggttcctccctccacattcggtgcttccgccacagccaagatcagcgtcgatgcatcccttgctggtgccatcattgggaagggtggtaccaacacaaagcatatatcccgagtgactggggccaagttagccatccgggacaacgaggctgatcccaaccataaaaacatcgagctcgagggaacatttgaccagatcaagcacgctagcgcaatggtcacagagttgattgtccgcatcagtggtaagccgcctccacaagccaagaacaacccaggtagggggcctggttctcatgccgggggtcctggaagcaacttcaaaaccaaattgtgcgagaacttcaacaaaggctcctgcacctttggagacaggtgccacttcgcccatggcgaaggtgagctgcgcaaacctgctgctgcttgacaggcatgcttattgtggcctgtggtgattaatctgcctgtatggctgaataacaccatgaccaaggacagtggcgccagcgccatggtgaagtgtgctgagccacatgctgcctgagagagagcatttccctgtggctcgtatttgatcttaatgctgtaacaaactctcctcgatggagattaagcaatggccgtttatttaggatttgtaggattgccgtattggtcacccttttatctatcctgtttttggcctgtggtgattaatctgcctgtatggctgaataacaccatgaccaaggacagtggcgccagcgccatggtgaagtgtgctgagccacatgctgcctgagagagagcatttccctgtggctcgtatttgatcttaatgctgtaacaaactctcctcgatggagattaagcaatggccgtttatttaggatttgtaggaaaaaaaaaaaaaaaggggcggaaaatttcttgtgtcgagatacggatttattttgctatatatttttcgtctatctggttgttgtcgtagtattgttgacacagcatgattgtgttaaagaattatt

SEQ ID NO: 4457 - DNA, 909 bp, Zea mays
  Clone ID: TF_ZmC1553_7
cacgactctcggcaacggatatctcggctctcgcatcgatgaagaacgtagcgaaatgcgatacctggtgtgaattgcagaatcccgcgaaccatcgagtctttgaacgcaagttgcgcccgaggccactcggccgagggcacgcctgcctgggcgtcacgccctcttcctccctccgctgcgccccactccgcctccgccaaaccgcaagctagggtttccgcctcgacgcggagggctcgccatggatgccgccgcccgcaagagatcccggccggagtccgccaacggaggcgccgcaggcgggaagcgctcgagagaatcggagtcacaacaaactggtctatcaagcaaatcgaagccttgcaccaagtttttcagcactgttgggtgcccctttggtgagggctgtcacttcgcgcactttgtccctggtggataccaggcagtatcaaaatcacacagcctaggccatgctgctgtgtctgcaccgtcaagagctccagcggaccatgctgcttctggtgtcaaaacacgcatgtgcaccaagtacaacactgcagaaggctgcaagtttggtgacaagtgccatttcgcccacggcgagagggagcttggcaggccaccatcctcctacatgtcccaagaaagttcctatgctcctcctatgggtggtcgatatggaggtcgacacgaaccacctctgccagcttcgatgggtcctcctgctggaaactttggcgcctcgtctacctgcaaggtcagtgttgacgccgctctcgccggaggcataatcgggaagggcggggtcaacacgaagcagatctgccgcatcacaggggtcaagctctcgatacgtgaccacgaatcaaacccagacctgaagaacattgagctggaaggcagctt

SEQ ID NO: 4458 - DNA, 743 bp, Zea mays
  Clone ID: TF_ZmC1784_7
atccacacaaaacaatctgccgtgctccaccttctgctccccctccggctacggcggcgctgatctccgagatctctagcttttctgcgggggcgcgaatccggggggcggcgccatggccgagcacctcgcgtcgatcttcggcacggagaaggaccgcgtgaactgcccgttctacttcaagatcggcgcgtgccggcacggcgaccgctgctcccgcctgcacaacaagccgtccgtctcgcccacgctgctgctctgcaacatgtaccagcgccccgacatgatcaccccgggcgtggacgcgcagggcaaccccatcgaccccgtcaagatccagggcgacttcgaggacttctacgaggacatcttcgacgagctcagcaagcacggcgaggtcgagaacctgcacgtctgcgacaacctcgccgaccacctcatcggcaacgtctacgtgcagttcagggaggaggaccaggccgccaaggcgctccaggcgctgcaggggaggttctactcgggccgccccatcattgctgagttctcgcccgtcaccgacttccgggaggccacctgccggcagttcgaggagcacaactgcaaccgtggagggtactgcaacttcatgcatgtcaaggagattggcagggacctcaggaagaggctgtatgggcacctgcataggtccaggaggagccacagcaggagcagccggagcccgagcccctaccgtcaccacgcca

SEQ ID NO: 4459 - DNA, 1221 bp, Zea mays
  Clone ID: TF_ZmC493_11
cccgtcctccgccgacaagtcctccctcgaccccgacgcgctttatgaagaatgaagggagaatatcctgagagagtgggacagccagagtgtcagtattatctgaagaccggaacatgcaagtttggtcctacatgcaaatttcaccatcccagggaaaaggccggaattgcagggagggtgcagctaaacacattaggatatccacttcgcccgaatgaaaaggagtgtgcgtattatttaaaaacaggacaatgtaaatatgcaaatacttgtaaattccaccacccagaacttttcaatgcggtgccttcgtcacgtggttcacctatttatacttctgtacattcctctgcaagcgctggtccacagtcatatactggaactatgtcaagctggacttttccacgagcttcttttataccaagccctaggtggcaaagtccttcaaattatgcaccaatgattgtacctcatggccttgtccaagtgccgagctggaattcatatcctggtcagctgcagtcacctggggctcaacaaacttatggaagttcacaacaaggcgaagctagtgcaggaaatcagggaatgctatcaccctatagatccagttcgtttcctgtgcctcaatatgcgctgcagagggataatgtatttcctgagagacccgatgaaccagaatgccaatattacatgaagacaggagattgtaaatttggtgcagtgtgcaagtttcatcatccccgtgtgagatcacagccccctccggattgtgtcttaagtccaatgggccttccaatacgtccaggtgaagaactgtgcaaattctattctcgttatggcatctgcaagttcggcgccaactgtaaatttgatcatcctacaatggctgctccaatgggagtttatgcatatggtttctctgggtctgcttctgtcgcacccgcttcaactaatgcacctatgacgcgacgccttctgggatctccatcaggttctggatatatgtcttaggtgtcttttttttcagttgacctactttgatgtataaaatccacggcatcgcctcaggcgctgtgaatgtttctcctaacttcccgccgggatgaagttctgtaaattgagttgctgctggagatgtacagccccccccccccctccccaattaatccagaactttgggaataactgttggaacctaataaacttcagatacag

SEQ ID NO: 4460 - DNA, 1872 bp, Zea mays
  Clone ID: TF_ZmC292_1
cgcgaaagtgcctggtcggcccgtgggacgagtggacattcgcccgcttcccgtccatttattaaactttcgcaagcgcaggtatctccccacagggcagcgcgtgcggaaaccctagtcgccgccgatgtcggaccctttctacccgtactaccgcggagccttcccgggcggcgacggtgcgcagccgccgccacgttactcggattttgaggtcgacctcatcgcggcccgttacgccggcaccctattgccttatccatcctctgccgacgtcggcgccttcgactcgtatgtcggcgcgagacgatccgcggaagttctctatcaccaatcttttatgggaagtcatagtactgttggccagaatgaggctttatattcatcgaatactatggctaaacgccctaggcttgaaagcagccttcctatatatccacaacgaccggggcaaaaggactgtgccttctatatgagcactggaacctgtaagtatggagagacctgcaaatttgaccatccacaacgggttccagagggtggggttccaaactggaaagaggccccgactgttgaagattcttatcctgagcgaccaggggaaccagattgtccttatttattgaatagtagatgtaagtttaaatctaaatgcaagttcaaccatccgaaggatatggtgaatgcattaggaacaggaacaaacaatgaatctctaattgctgatagcgctgtcttaccagtgaggccttctgaacccatttgtgtgttctatgcaaaaacaggcaaatgcaaatttggtgccatttgcaagttcaatcatccaaaagatattaagacatcacctttgattgcaaaggaaaccatatatacagcaacaactgatgcagcagatgccccgaccgaggcgtgtaacgcaaaggggcttcctataagacaaggtgaagtggattgctcgttttatatgaagacaggcagctgcaaatatggttctatttgtcgcttcaaccatcctgatcggccagggccagctgcggatataacttttatggttccactggttcaagctactcttccttcatcagcacccattgtccctgcagtggttgaacctttgccaatgatctatcctcaaaggccaggagaaactgtttgtgatttttacatgaagacaggatcttgcaagtattctcagaaatgcaagtttcaccaccccatcagtcgttttgcaccgcattccaaagaaaacggggatcctcaacagcctgcgacacttgctagcctgccaaggagagaggacgctgaggcttgtgccttctacatgaggtctggcatgtgcaggttcggtgcgcactgcaagttcgaccaccctcctcgcgaggaggctatttccgagctgcaggcagccggaaaggaaggaatagaagggccgagcctcgtccagcgcgaccatgatgtctaatactgtatcctgcttcagtatgtaataccatgtgaatcgcactgttagttaatgcttggtgctgtcagtcttgttgggagtctgactcgtaaagctcattatcatcggaagtgtttgtcggaggagtgctggcactaactatttatcttcagttggttgtcgtgttgccaacttgcgatgtcaaggtgcatatttcagtttttttagagtaaaaatgcactttacatcctgccgccaaacttaactatgggcctgtttatggccctgtttggtttaccttcggcggatgaatggtgtcaaaaataaaaatacacaaataattcgaaaaaaatgaaaaaaagatgcccctaagaatgtgagaaccaagttaccgtaaatctaaaaaaaaaaaaactcgagagtcttctaga

SEQ ID NO: 4461 - DNA, 2566 bp, Zea mays
  Clone ID: TF_ZmC263_1
tttttggggaaggcaacagcccttccctgacaagcattcaatgataggactgttatattacaaaaaaggaggccaagagactaatggagtgtgtggtctgctcaagaagtacttgacaaagttgctcaagagactccgaattttggaacagaacaggataaggcccattgtccgtttcatctcaagacaggggcttgtcgctttggattgcgctgcagcagagttcacttttaccctgataaatcaatcacattgctaatgaaaaacatgtataacggtccaggccttgctttggagcaagatgaagggcttgaggtttgttagaggaaattctctaatgcataactttgtatccttaaactactgtttatttacgtttaaggatgctcaattttggtttcatgggcagtgccattttaagttgtgatagtttaatactaaagcaagctcatgtcaaaataacaagtattccactttaagcttgtaagcctttataagaagacatgagtataaataactgactacttggaaccatttgaatttttttaatctactgctcaagataactcttaccccaagttttccttggctactatcagactcgcgacagattgcatgttctttcgtgttatcttcagaacttcgacttgaggcatacagtgatcagaccagttgatttcacttgattgaggacgtcttgaactttgatctgctcatttcacagatgaagagattgaacaaagctatgaagaattttatgaagatgtacatacagaatttctgaaatttggtgaacttgtgaatttcaaggtatgtagaaatgggtctttccatcttcgagggaatgtttatgtgcactataaatcgttggattcagctcttcttgcctacagcagcatgaatggacgctattttgctggaaaacagataacatgtgaatttgttgctgtgacaagatggaaggcggccatatgcggtgagtacatgaggtcaagatacaagacatgttcacatggagttgcttgtaattttattcactgcttccgcaatcctggaggagattatgagtgggctgattgggacaatcatcctcctagatactggattaggaagatggttgctctttttggtccctcagttgatgagatgaatgaaaaggcgagtcataccccagattttagaagttcagtgggctctgataggaagaaacttaaaatttccagcaacagatatgtttcaagaggatctaggaacgaagatgtgcatacacgacactctcctcaagattattcacattctaagcaagaacgaagtagccacaacatgaattatgagtacagacgacataaaagagattcttcagcagcagataagcaccgaagacaagatgttggagatacaaatgacagacaattttcaacaatgggaaatgacagcaagtcccataggcataagcatgaagaacggcatagaagtgatcatggtaatggagaaaaagaagatgacagcaaaactaggcctaggaagcactgttctgttaggcgtggaagtttggaggttggatattctgactggtctccagacttcactggtacagacatcagcaagggcccttcaggtgagaagtccactagcaggtatgatgatgccaaagggagcaggaggggatcatcagagtattacaatcttgaaagacaccactctacagctcaaaaacaatcaagaaatgagcacagcactacaagacgcaggagacatgacattgaagattatcatgatgaaaaaaatgacggaagaggggaatcccgaaagcataaccgccatgaatcaaacgaccggtgggtagccacaaatagtgatgttgattcggatgtagatagatatcagagttcaagctgtaaaggcactaggttgggaaggaaggatgatgatccaggcattgaagttcggcatcagaggtcaggtagaagtacgaaggatgacaagagaaggaaacatcacagtggaaacaggtggcacagcggcactgaagagggtacctcagattcaagcggtggagatttgagctctgattcgtggagtggtagatcgagaaacagtgagaacttttcagcacacaggtcaaagaggaagcgaagtcggagcaaggagtctggttagttgtaaatagttagcctctttttggagcacatgaattcgtaggaatcgtgcagaaattttacaggaatcggtttaacttcgcacgaaaaatttcccgcactccaaacatgcggtagtggcttcttgatattctactgtatgctttcaccgtttcgcttacaagttctgttactgtacactgcggtagtgcggttcatagcattgctcaattccggacccgttctcaagcgtctggctatgttaatacaggtattatttccgtgctcttctcactcctcacttttttgtttggtttgtggaatggagtgagttaatccatcaccacctcattcctcatagttagttgtttagtactaatatgtggaatgaagtcatcccaccaaatttgaggaatggacccatgatg

SEQ ID NO: 4462 - DNA, 1282 bp, Zea mays
  Clone ID: TF_ZmC5498_4
cattgggtacctcgaggccggccggggctcgtgccgttgggacgaggcaaagcctcccccccacacctctctcctccatccgccgcccccgcgggaccgaaaccctagctagggttctgcccgccgccgccgccgccttcgatcctgacgcggccaggcttcccgcaacaccgccatggacacgggccgcaagcggaccgcaccggagggcgccaacggcgcgggcggccccaagcgcgcgagagaatcggagacaactggtgtaggaagcaaatccaagccgtgcaccaaatttttcagcactgcgggttgcccctttggtgcaagttgccattttctccataacttcccgggtggctaccaggccgtttcaaagatgaccaacttgggtggaccacctgttccggctccaccaggaagaatgcctatgggacctggtggtcctgatgggccaccttcacctgctgtgaagactcgcatgtgtaacaagtacaacactgccgaaggatgtaaatgggggagcaagtgccactttgctcatggagagagggagcttggaaagcccctgcagatggacaacccgatgggacctcctccaatggggccagggcccaacgggcacttcatgccaccgccaatgcctttcccagacatggttcctccctccacattcggtgcttccgccacagccaagatcagcgtcgatgcatcccttgctggtgccatcattgggaagggtggtaccaacacaaagcatatatcccgagtgactggggccaagttagccatccgggacaacgaggctgatcccaaccataaaaacatcgagctcgagggaacatttgaccagatcaagcacgctagcgcaatggtcacagagttgattgtccgcatcagtggtaagccgcctccacaagccaagaacaacccaggtagggggcctggttctcatgccgggggtcctggaagcaacttcaaaaccaaattgtgcgagaacttcaacaaaggctcctgcacctttggagacaggtgccacttcgcccatggcgaaggtgagctgcgcaaacctgctgctgcttgacaggcatgcttattgtggcctgtggtgattaatctgcctgtatggctgaataacaccatgaccaaggacagtggcgccagcgccatggtgaagtgtgctgagccacatgctgcctgagagagagcatttccctgtggctcgtatttgatcttaatgctgtaacaaactctcctcgatggagattaagcaatggacgtttat

SEQ ID NO: 4463 - DNA, 778 bp, Zea mays
  unsure (1)..(778): unsure at all n locations
  Clone ID: TF_ZmC1784_5
ccggccggtnatccaccaaatccagcgggtccgtactcatctgcttcacctccgggttccggctacggcggcactcttctctggcaaccggtcggaagatgttggatcttccgcttcaaatcgacgcataaaggacgcagattagttttattcgcgtcaaatttattttgctcggtgtagttctgttcattaattaataattttgtactggatttaaggtgcttttattttgaaggtttcttctcccggaaattttcacatcccgaaacgactggaaattgaagtagccatttgatgctgttacctgggttcataagttgttagacttgttatttgtttgttaatcctagctattgcatattgtgtgcctgaccaggaccacagaaacatctaggcaacgagtcgagcaggtagaggagtaatcaggcatccatggctgagcatcttgcgtccatctttggcacggagaaggaccgcgtgaactgccccttctacttcaagatcggcgcatgccgccacggcgaccggtgctcccgcctgcacaacaagccgtccatctccccgacgctgctgctctgcaacatgtaccagcggccggacatgatcaccccgggcgtggacgcgcagggcaaccccatcgacccggagcggatccaggaggacttcgaggacttctacgaggacatcttcgtggagctgagcaagcacgccgagatcgagagcctccacgtctgcgacaacctcgcggaccacatgatcgggaacgtgtacgtggagt

SEQ ID NO: 4464 - DNA, 858 bp, Zea mays
  Clone ID: TF_ZmC1784_6
attgggacctcgagccggccgggaaaatctccaaatccagcgggtccgtactcatctgcttcacctccgggttccggctacggcggcactcttctctggcaaccggtaaacctcctctccctttcttttctgtggtgcggtgcgttcaagatgtccggatgtacgtgcgcatcgggttttgggatcggattgcgcctcctgcgacatagggagtataccgtgctcttttgtttctccatggattgatactttctctgtcgattcttatcaggtcggaagatgttggatcttccgcttcaaatcgacgcataaaggacgcagattagttttattcgcgtcaaatttattttgctcggtgtagttctgttcattaattaataattttgtactggatttaaggtgcttttattttgaaggtttcttctcccggaaattttcacatcccgaaacgactggaaattgaagtagccatttgatgctgttacctgggttcataagttgttagacttgttatttgtttgttaatcctagctattgcatattgtgtgcctgaccaggaccacagaaacatctaggcaacgagtcgagcaggtagaggagtaatcaggcatccatggctgagcatcttgcgtccatctttggcacggagaaggaccgcgtgaactgccccttctacttcaagatcggcgcatgccgccacggcgaccggtgctcccgcctgcacaacaagccgtccatctccccgacgctgctgctctgcaacatgtaccagcggccggacatgatcaccccgggcgtggacgcgcagggcaaccccatcgacccggagcggatccaggaggacttcgaggacttcta

SEQ ID NO: 4465 - DNA, 1805 bp, Zea mays
  Clone ID: TF_ZmC493_1
tccgcctcttcattgggtacctcgggcccggccgggattctattcctccacaccgatcactcgctgctcccctctctcgccggagctccgggccggatggcggcggcagcagcagctcctcccgcctccgtgatcgcgtgatggacgcacacaccgccgcgctccgccgatggacgacgccggaaggccaccaccacacgctcccgtggcggtgaccgcctccgcctccgcctccgccaccgccgcgcccgcccctccccaaccctcagccactgctgccgtcgacaggtcctcccccgaccccgacgcgctctatgaagaggggatgtggcaacaaatggccatggacagcggtgccactatgcaacctgggtcatatcctgagcgaccaggtgaacccgactgcacttactatctcaggactggattgtgtcgatttggcatgagctgccgattcaatcatcctccggataggaatctggctattgcctctgccagaatgaagggagaatatcctgagagagcgggacagccagagtgtcagtattatctgaagactggaacatgcaagtttggccctacatgcaaatttcaccatcccagggaaaaggctggaattgcagggagggtgcagctaaacacatcaggatatccactccgcccgaatgaaaaggagtgtgcatattatttaaaaacaggacactgtaaatatgcaaatacttgtaaattccaccatccggaacttttcaatgtggtgccttcgtcacgtggttctcctatttatacctctgtacattcctctgcgagtgctggtccgcagtcctatactggaactatgccaagctgggcttttccacgagcttcttttataccaagccctaggtggcaaagtccttcaaattatgcgccgatgattgtacctcagggccttgttcaaatgccgagctggaattcatatactggtcagctgcagtcacctggggctcaacaaacttatggaagttcacaacaaggcgaagctagtacaggaaatcagggaatgctatcaccctacagatccagttcgtttcctgtgcctcaatatgcgctgcagagagagaatgtatttcctgagagacctgatgaaccagaatgccaatattacatgaagacaggagattgtaaattcggtgcagtgtgcaagttccatcatccccgggtgagatcactgccccctccagattgtgtcttaagtccaatgggtcttccactacgtccaggtgaagaactgtgcaaattctattctcgttacggcatctgcaagttcggcgccaactgtaaattcgaccatcctacagtggttgctccaatggtctatgcgtatggtttctccgcgtctgcttcccctgcatccgcttcgactaatgtacctatggcgcgacgccttctgggatccccaccggggtctggatatacatcttaggcgtcgttttttttttcagttgacctacttcgatttataaaatccatggcactgcctcaggcgctgtgaatgtttctcctaacttcctgccgggatcaaagttctgtaaattgagttgctaccggagatgtacagcccctttttttttggttaatccagatctttgggaataactctcgaaaccgaataaactttggatacagagatgccagttttcaggtgcctgcactatttgaaaaaaaaaaaaaaaaaagcggcccaaaaaaaaaaaaaaaaaaaaaaaaaaaaaaaaaaaaaaaaaaaaaaaaaaaaaaaaaagaaaaaaaaaaaaaaaaaagcggcc

SEQ ID NO: 4466 - DNA, 1603 bp, Zea mays
  unsure (1)..(1603): unsure at all n locations
  Clone ID: TF_ZmC493_5
cattgggtacctcgaggccggccgggnnannnntcnnnnaaaaaaaaaacaaaaaaaaaaaaaaaaaaaaaaaaaaaaaaccccccttattctattcctccacaccgatcactcgctgctcccctctctcgccggagctccgggccggatggcggcggcagcagcagctcctcccgcctccgtgatcgcgtgatggacgcacacaccgccgcgctccgccgatggacgacgccggaaggccaccaccacacgctcccgtggcggtgaccgcctccgcctccgcctccgccaccgccgcgcccgcccctccccaaccctcagccactgctgccgtcgacaggtcctcccccgaccccgacgcgctctatgaagaggggatgtggcaacagatggccatggacagcggtgccactatgcaacctgggtcatatcctgagcgaccaggtgaacccgactgcacttactatctcaggactggattgtgtcgatttggcatgagctgccgattcaatcatcctcccgataggaatctggctattgcctctgccagaatgaagggagaatatcctgagagagcaggacagccagagtgtcagtattatctgaagactggaacatgcaagtttggccctacatgcaaatttcaccatcccagggaaaaggctggaattgcagggagggtgcagctaaacacatcaggatatccactccgcccgaatgaaaaggagtgtgcatattatttaaaaacaggacactgtaaatatgcaaatacttgtaaattccaccatccggaacttttcaatgtggtgccttcgtcacgtggttctcctatttatacctctgtacattcctctgcgagtgctggtccgcagtcctatactggaactatgccaagctgggctttcccacgagcttcttttataccaagccctaggtggcaaagtccttcaaattatgcgccgatgattgtacctcagggccttgttcaaatgccgagctggaattcatatactggtcagctgcagtcacctggggctcaacaaacttatggaagttcacaacaaggcgaagctagtacaggaaatcagggaatgctatcaccctacagatctagttcgtttcctgtgcctcaatatgcgctgcagagagagaatgtatttcctgagagacctgatgaaccagaatgccaatattacatgaagacaggagattgtaaattcggtgcagtgtgcaagttccatcatccccgggtgagatcactgccccctccagattgtgtcttaagtccaatgggtcttccactacgtccaggtgaagaactgtgcaaattctattctcgttacggcatctgcaagttcggcgccaactgtaaattcgaccatcctacagtggttgctccaatggtctatgcttgacctacttcgatttataaaatccatggcactgcctcaggcgctgtgaatgtttctcctaacttcctgccgggatcaaagttctgtaaattgagttgctaccggagatgtacagccccgtttttttttggttaatccagatctttgggaataactctcgaaaccgaataaactttggatacagagatgcc

SEQ ID NO: 4467 - DNA, 2797 bp, Zea mays
  unsure (1)..(2797): unsure at all n locations
  Clone ID: TF_ZmC5498_1
attcggctcgagcagcgcccctcctctccggtttgcttgctgggactcgcgatcttcctggtcctcggctgtgccttctggggcggcggccgcggcaactacgtaaggggagggaagggaagggaaagaccccaccacgggatgagattggacctctacttctaataaaaaaaaaaaaaaaaaaaaaaaaaaaggggggaaaaaaaaaaaaaaaaaaaaaaaaaaaaaaaaaaaaaaaaaaaaaaaaaaaaagcgcgcgtccctgtttcgctcgccgttgcgctgcggcaaagcctccccccacacctctctcctccacccgccgcccccgcgggaccgaaaccctagctagggttctgcccgccgccgccgcttcgatccagacgcgggcagccttcccgcgagcccgccatggacacggggcgcaagcggaccgcaccggggggcgccaacggcgcgggcggccccaagcgcgcgagagaatcggagacaactggtgtaggaagcaaatccaagccgtgcaccaaatttttcaggttctaatctagcttaaaatgaacagtcatccggtaacatctactatcgttattatgctcttctttttttaaattaaaatttgttatgttactaaatgctgtgcttgatgctaacaaatgggttggtctagattctgctacaggatggttttatctaatcattgcttaagaacactcaacggagtaaaaaattggaatctactgctgtttatcactgtgaaaattggtgcaacaagggaacgtactgctgtttatcactgtgaaaaccgatgcaacaagggaacctactgctgtatatcactgaaaatctgaaccatgcaacaatgttttcaaggaagcaaaacttcctctcaaaaggaacaatcagtcaataacaccatggaacaggttcacttgaagaaatcaagaagattagattgaacatggggactgtaattcaattccttgtgaattgtaccagttatttgttcaattgcatttccttatcaatatgttgcagtagtagttctgagcaccgtgaagcgtcattatgaacggcatttctatataagcatgatttctaaaagattagtttgtatcatttacttcaacttttagtcgtcaagttagccatctggcacaaagatgctgatcccaaccataaaaacatcgagctcgagggaacatttgaccagatcaagcacgctagcgcaatggtcacagagttgattgtccgcatcagtggtaagccgcctccacaagccaagaacaattcaggtagtggagcactgtgggttgcccctttggcctggattgccattttctccataacttcccgggtggctacccggcggtttcaaagatgatcaacttgggtggaccgcctgttccggctccaccaggaagaatgcctatgggacctggtggtcctgatgggccaccttcacctgctgtgaagactcgcatgtgtaacaagtacaacactgccgaaggatgtaaatgggggagcaagtgccactttgctcatggagagagggagcttggaaagcccctgcagatggacaacccgatgggacctcctccaatggggccagggcccaacgggcacttcatgccaccgccaatgcctttcccagacatggttcctccctccacattcggtgcttccgccacagccaagatcagcgtcgatgcatcccttgctggtgccatcattgggaagggtggtaccaacacaaagcatatatcccgagtgactggggccaagttagccatccgggacaacgaggctgatcccaaccataaaaacatcgagctcgagggaacatttgaccagatcaagcacgctagcgcaatggtcacagagttgattgtccgcatcagtggtaagccgcctccacaagccaagaacaacccaggtagggggcctggttctcatgccgggggtcctggaagcaacttcaaaaccaaattgtgcgagaacttcaacaaaggctcctgcacctttggagacaggtgccacttcgcccatggcgaaggtgagctgcgcaaacctgctgctgcttgacaggcatgcttattgtggcctgtggtgattaatctgcctgtatggctgaataacaccataaccaaggacagtcgcgccatggtgaagtgtgctgagccacatgctgcctgagagagagcatttccctgtggctcgtatttgatcttaatgctgtaacaaactctcctcgatggagattaagcaatggccgtttatttaggatttgtaggattgccgtattggtcacccttttatctatcctgtttttgtaccgtttcttaggcactcttggctggcagatcattgtgagtctgttgaacttgagaatagttgctattgatgttatcggtttgtggattcttactagctcatttgaagtccagacggctaatctgaaaaaaaaaaaaaaaaaaaaaaaaaaaaaaaaaaaaataattaaaaaaaaaggggtggtgtggaaaaaaaaaaaataaaaaaaaaaaaaaaaaaaacaaaaaaaaaaaaaaaaaaaaaaaaaaaaaaaaaaaaccccccccccttttaaaaaacccaacctaacncccccttacacacaacnaaaaaatttttaaaaacnncccccaaaaaaaaanaaactccccccnntttaaaaaccccnnaccttaaaaaaccctnncnnacccaaaaaaaaaccccnnnaaacaaaaccccattcccccacnnanccaaaaaacaaaaanccccacaccaanccccc

SEQ ID NO: 4468 - DNA, 2093 bp, Zea mays
  Clone ID: TF_ZmC493_2
attgggtacctcgaggccggccggggtccatcgtcctcgtcctcgccgatcactcgctgctcccctctctcgccggagcgagccccgggccggatggcggcggcagcagcagctcctcccgccgccgcgatcgcgtgatggacgccgacgccgacgccgccgcgatccgccgatggacgacgccggaagggcaccaccacccgcgccagcggcggtgaccgtctccgccaccgccgcacccgcgcctaccccgccctccgccacggtcgccgccgacaagtcctccctcgaccccgacgcgctttatgaagaggggatgtggcaacagatggccatgaacagcggtgccacaatgcaacctgggtcatatcctgagcgaccaggtgaaccggactgcacttactacctcaggactggattgtgtcgatttggcatgagctgcaggttcaatcatcctccggataggaatctggctattgcctctgccagaatgaagggagaatatcctgagagagtgggacagccagagtgtcagggaaaaggccggaattgcagggagggtgcagctaaacacattaggatatccacttcgcccgaatgaaaaaggagtgtgcgtattatttaaaaacaggacaatgtaaatacgcaaatacttgtaaattccaccacccagaacttttcaatgtggtgccttcgtcacgtggttcacctatttatacttctgtacattcctctgcaagcgctggtccacagtcatatactggaactatgtcaagctggacttttccacgagcttcttttataccaagccctaggtggcaaagtccttcaaattatgcaccaatgattgtacctcatggccttgtccaagtgccgagctggaattcatatcctggtcagctgcagtcacctggggctcaacaaacttatggaagttcacaacaaggcgaagctagtgcaggaaaccagggaatgctatcaccctatagatccagttcgtttcctgtgcctcaatatgcgctgcagagggataatgtatttcctgagagacccgatgaaccagaatgccaatattacatgaagacaggagattgtaaatttggtgcagtgtgcaagtttcatcatccccgtgtgagatcacagccccctccggattgtgtcttaagtccaatgggccttccaatacgtccaggtgaagaactgtgcaaattctattctcgttatggcatctgcaaattcggcgccaactgtaaatttgatcatcctacaatggctgctccaatgggagtttatgcatatggtttctctgggtctgcttctgtcgcacccgcttcaactaatgcacctatgacgcgacatcttcttggatctccatcaggttctggatatatgtcttaggtgtctttttttcagttgacctactttgatgtataaaatccacggcatcgcctcaggcgctgtgaatgtttctcctaacttcccgccgggatgaagttctgtaaattgagttgctgccggagatgtacagcccccccccccccctcccaattaatccagaactttgggaataactgttggaacctaataaacttcagatacagaaacgctggttttcaggtgtttgcactattttgacactgctgcacctatggtccctaacagttgaggtaggaattcctctgaaggagctgaaacctgaaacctgtagctgcaggtgtgcagttgaaattatattattgcgtcaatttatttgtaacctgtattcagctggtgttggggcagatattggcattcctcttatctgtgaatgctggttttctgatatgaacagtgtatcccagcctacggcttctgccaagacaataaactcaggacctgtttgggactgttccactattcaaaaaatgaatttgaatctgggattcattattaaagtttcgccgacgaatctgagatcctttttagatagcagcttattattcacgtaaggatattctgtttgaaatagactaatttgtttttatgatagacctcatttgtcagtgtgtattcttttatctactatataaagcgcggtttttactgtcgtcacc

SEQ ID NO: 4469 - DNA, 1022 bp, Zea mays
  Clone ID: TF_ZmC3518_1
ggcggcaggctcgccgacgagttcagcggtctccgcctcgccgaggagcacaccacgccacctcctctgtcaccgctgcccgccgcgccggtgatgccgaagagcatctccgttcgctcgcccggctatctcaagatgatccagaacggcaagcatcgggcgtccaagccaacgaagggctcgcagcgcgtgttagtgggcatggaaggcggagtgaaggaggaggagaagctcaacggcgggctgcagttcgaggtgtacaaccagggcatgctgaagacagagctctgcaacaagtgggaggagaccggcacgtgcccgtacggtaatcagtgccagttcgcgcacggcatcgccgagctccgccctgttatccgccatccgcgctacaagaccgaggtctgccgcatggttctcgctggcgttgtctgcccctatggccaccgctgccacttccgccactccatcacccctgccgatctcttcctcccgcgcccttgaagatgtcagtccaccacccactgccactctctcgtccgcttccaccctctccagctctacttcattgtgcggttataccatcgtcagtcttcagaacccaaaaaatgtctgattagttgtgattcagaaaatgatagccgtaaataagctatagatagatacacgagatagaaaacaaaaattgttctacgtaattagcacacaggcaagatgtgaatatgtagttctagacacccaaggtattcatatggggttgatcagggcaatcaaactcaaatatgagttatgttgggattattgtattcgtcgtatcgtttatatacacagtttaggttatgatgttctgcctagttacatttttgggcaaattggatgacaaactggtgagttcatgtaagtaaactaaggctgttatctgaatatctctgatgtgttgaacacttggcaaaaacaagcaccttctccgttgtattgtttcggaacaattgaagcaatgaattatggaggtgtttagttgaggg

SEQ ID NO: 4470 - DNA, 666 bp, Zea mays
  Clone ID: TF_ZmC17484_2
ttctcatgaaactaggacatgccaatttggatcagcttgtgagttttatcacccaaaagatcggtgctcaggcagagggggagtgattgatggtactgactatggacatgattttgccacgaagtcacggaagccgggccgggaactggcaatatatcctgaaaggcctgatgaacttgagtgttctcactacatgaagcatggctactgtaaatataagatgaactgcaaatttcatcatccaagagatcgtcttccaaagaaataggaccatttgctacaaccactgttgtaactggctgtcgttgatgagtggaccaagtactgatgatgggatgatgatgggacagaaatgcaggaaggaagccatagtcttcctttttgaagagatcgattctactcatgtctagtgtcgttagagttctcgtaccagatgcgaactgcctggtggcttcccaactaccgttcattcatatactaccaaacattgctgtgatctaggccgatgcggcgctaacctgagattgtgggttactgtagctcagtatgcagctcaggtacctgcacttgctcaagattgcgataacgatcagattaaaatagcagaccacgcatattctgcaacttgcgacttttaaaaaaaaaaaaaaaaaaggcccctaagcc

SEQ ID NO: 4471 - DNA, 1868 bp, Zea mays
  Clone ID: TF_ZmC292_5
aagaagagctacgacgcatgctcccctcctacgtctactagtaattctgctccagccaccgacatcactacgcatgccggcccggggggcttcctccccagtttggcgcgtgctgaaaccctaaccgtcgaggagccgacgatgtcggacccttacaacccgtactaccgtggagccttcccaggcggcgacggtgcgccgccgccgctgccgccttactcggactttgatgtcgacctcgtcgcgacccgttacaccggcaccccacggtctcatccatcctctggtccggtcggcgccttcgaatcgcatctcggcgcgagacgattcgcggaagttctctatcagtaccaccaatcttgtatgggaagtcatagtactgttggccagagtgagactttatattcatcaattactatggctaaacgccctaggcttgaaagcagccttcctatatatccacaacgaccggggcaaaaggactgtgccttctatatgagcactggaacctgtaagtatggagagacttgcaaatttgaccatccacaatgggttccagagggtggggttccaaactggaaagaggtcctgaatgatgaggattcttatcctgagcgaccaggggaaccagattgtccttatttattgagtagtagatgtaagtttaaatctaaatgcaagttcaaccatccaaaggaaatggtgaacgcattaggaacaagaacagacaatgaatcactaatcgctgataccgctatcttaccagtgaggccttctgaacccgtttgttcgttctatgcaaaaacaggcaaatgtaaatttggtgccgtttgcaagttcaatcacccaaagctagaagatattaagacaccatctttgattgcaaaggaaaccatatatagagcaacaactgatgcagcagcgcacattggtgggacagatgattctgttccagcaaagacacatgcaccaattgccccagccgaggcacataatgcaaaggggcttccaataagaccaggtgaagtggattgctcgttttatatgaagacaggcagctgcaaatatggttctatttgtcgcttcaatcatcctgatcggtcagttgtggatatagcttttatggctccagttcaagctactcttccttttccagcacccattgtccctgcagtggcgttaaatccggctgcaaattttctgcaaagctttgatttccatgcaactcacgtgccggttgagcctatgccaatgatctatcctcaaagacctggagaaattgtttgtgatttttacatgaagacaggatcttgcaagtatgctcagaattgcaagtttcaccaccctattgaccggtctgcacctcattccaaagaaaacgaggatacacagcagcctgtggcacttactcttgctggccttccaaggagagaggatgctgacgcctgtgccttctacatgaggtctggcacgtgcgggttcggtgcgcgctgcaagttcgaccaccctcctcgccaggacgatgtcctgcccgaccctgatgtctaatacggtactccctccgtttcgttttagttgtcgctggatagtacaaaattgaactatccagcgacaactaaaaaaacggaggaagtatcctgtatcaggatgtggtaccatgcgaatcgcactgttaatgcttgatgctgtcactgccatggtgggagcctgacttgtaaagttcagtatcaccggaagtgtttgtcggcgcgtgctggtactaacggtgtaccttcggcggttggatggtgtcaagagtaaaaatacaccgcttgttctcaaactttgactggatgctaatctccaaaatgtgagaaccaagttaccgt

SEQ ID NO: 4472 - DNA, 404 bp, Zea mays
  unsure (1)..(404): unsure at all n locations
  Clone ID: TF_LIB3245-496-P1-K1-C3
ccggaccggaatggggcggcccacgcgtccgcccacgcgtccgcggacgcgtgggcagtctaaggcacgggagagcgtggccatgagtgtctcgcccaccgttggggggggnngatacaatgctgcctccgccaacggagtgatggtgcagaagccgtccaactggaagacaaggatctgtaacaagtgggagatgactggatactgcccatttgggagcaaatgccactttgctcatggttctaccgaacttcacaagtacggagggggcctcgtggacatcgacggcagggacatcttgtccactcctgattcgaagcaagccggtggctctgctaaagctcctctagagtctgctgctgcgtccactgcgttgccccctcatgcagacgtgtaccatctcg

SEQ ID NO: 4473 - DNA, 2579 bp, Zea mays
  Clone ID: TF_ZmC3751_1
ctttttagttcttgtttgtgccttttcagttttcaatacatcttcatctggggcttgggttgatttgcaggtaagctcggaattcggctcgagcacgcgtccgcccgtttcgctcgctgtctcccgcggcacgggggctccagcgccgaacggaaaaccccaccccactaccactggctactcccgatccccagtccccatccctctcctcgcaaaaggccaccgcgacgcgaccgcgtactgggggcgagacgccagtgcaggcaggcaggcagaagaggagtcgccaggaagcaaccgcgagggagctgcaagcgagcacagcagcagcgcagaaaaaaaattctggaataatttttcttccctttggctccgtgaggttccggtgctcgctcgctcgcctgagcttcgatcgagcccggtcggcgaggcaggcgcccgatcgccgctctccgggagcttccggggggccgtcggatggagccgtacgcggcggcgaagagcggcggggccgacgccggcaccggcaccggactggaagactcgatgcggaggctggggctcggcgacgacggggaagcaggggaggagaagcttccggagcggccgggcgaggcggactgcgcctactacctccgcacgggcgcctgcggctacggggagcgctgccgctacaaccacccccgcgatcggccggccccggttaatggagttggaaagaccgcagttacagtggagtacccagagcgtcctggacagcctctctgtgagtactatgcaaagaatggcacatgcaaatttggttccaattgcaagtttgatcatcccagggaaagtggttttgtacctgtcgctttaaacaacagtggattccctctacgtctgggtgaaaaggaatgttcctattacatgaaaactggacattgcaaatttggaggtacatgtaaattccatcacccagaacttggttttcttacagagacgcctggcatgtacccaccagttcaaccatcacctatttcctccccacatccatatccacatcattccaactggcaaatggggaggcctgctgttgtgccagggtcatttttaccaggcccgtatccaccaatgatgcttccacctacagttatgccaatgcagggatggaacccttatgtttcacctatgaaccaaactacaccagctgggggccagcaagctgttccagcagggccatcttatggcttgtcgcaccaggagccaacctctgcagtgacttatggcagtcattatgcgcaattgtattcttctgggacttcaagcagcaacatacaagaatatgtgtttccagagcggcctgggcagcctgaatgtgaacattacatgaagacaggaacctgtaaatatggagcagcctgcaaatatcatcatcctcaatacttcagtggaccaaagtctaactgcatactgagccctctgggtctccccctgcgtcctggttctcagcgatgtgcttactatgcacaccatgggtattgcaagtttgggccgacatgcaagtttgatcacccgatgggtactccaaactatagtatttcaacatcttcacttactgatgtgccaatcgctccatatcctcagagtttccctgttactcctatgccttcatatctgccatcttctgatctgcgtccacaatacactcaagtcaaggattcctctgctaatccaccaccatcgcctggaactacttatggtcctgttgggtctatatcaaaggtttatgctccccacacgcttatccgatccccggcttctgcagctgctggcatgcaagcgtcctaatgagacacggttgagagcattagtcctctctgtcatgaagatagttcttgggcaatcttctcaggttttttctaccattggcggaatgaggtctcgattcttttttgctccagttcgacttcccagcaattgtgaataaaggctgcagctgacatagaaaagtctcaataaatgcaaagataggaattggcaagctcattcacttgccatttttctgtccatctcggaaatgagaggagaaaattctgattgtagtaggatccagagctacgttattatcctgtataagatgcaccgatgcaagggattcgtatctgaaagctgatgggttctgtagctcaaaaccttttgtttatctcaccatcatatatatagagagggcagattaccctaggtgatgattatccacgctggaatggtttaacaaatcttcaataattgttaaaccattcgtgctttttgttaaaccatttcaggatgggtgatcatcacctaggtgatgaatagccatatatatgaatatgagcagcagctatgatttcacaacatgtatatctacctatatatatgaactgggaacacggcatgttgtagcgagacgctttggaacccttaattgaatcatctgaaaccattcgctggtcatcccctgattttcgggtgttttagttctgctatatatataaagagggcagattcccctaaaaaaaaaaaaaaaaaaaaaaaaaaaaaaaaaaaaaaaaaaaaaa

SEQ ID NO: 4474 - DNA, 1218 bp, Zea mays
  Clone ID: TF_ZmC1553_4
ttccttcttctccaacacccgtcgctctcttctccaactcgaagatgtcggccgccaccgccctgcttcatcgaggcccaagacccaatctccgtttttgataaagaaaccaaacagcaacctagcagtcttccttcacttctctgctcccgacctcgtagcgaatcagatcggggggctagggttccggtgcgcctctacagccggacgcgaggctaggctgggcatggagggaatcgtcacggcctgaaagaggtcctggccggagacgacgaacggggctgcagccgccgggaagcgctacaaagtttggacgcctctctggccggtggcataatcgacaagggtggggtcaacactaagcagagttacaagcgtcaagctatccatccgcgaccacgagtctaaccacaacctaaagaacatcgagctggaaggcaattttgaccagatcaagcaagccagcgacttgttgcgtgatctcatcgcaaccatcagcgcaagcatgccagcgaaaaatccatcttctgctgtggcgccagcaggaggaggccgaggcagtggtccggggggcacgagcagcaactacaagacgaagctgtgcgagaacttcttgaagctatgcgagaacttccaacacgactatgtatgagatattatctcttattatgactggatgagatgtgtcttatggctatagatgagacttttgtggtgtaattgatgagactatagatttaaatattgttatgtgattgtgtgtgagatgttttatgtgaaaatatgttgtgatatagttgtttatatatttgttatgttgtggaaatgggtgtggacctcatcgcgaccatcagcacgagcatgctggcgaaaaactcatctgctgccgtggctccatctggaggccgaggcggtggtctgggtggcaagagcaactacaagacgaagctatgcgagaacttcgtgaagggtgcttgtactttcggcgaacggtgccactttgcccatggcgagaacgagcagcggagaggtgctgtttgagagttgaggtgccaactctaggcatgacatgtcctgtgctctccatttgcttctctgaatttcctccttgtagcgttagacggttagactgtcgtattgcgatttcaatggattcaactgagttcagctttaagaaaacgttaatctgttgtgccccaaaaaatgaaaaaaaaataa

SEQ ID NO: 4475 - DNA, 1733 bp, Zea mays
  Clone ID: TF_ZmC493_4
ggataatgtatttcctgagagacccgatgaaccagaatgccaatattacatgaagacaggagattgtaaatttggtgcagtgtgcaagtttcatcatccccgtgtgagatcacagccccctccggattgtgtcttaagtccaatgggccttccaatacgtccagtatgttgttaaacccttcactctttctgttttattttgttttagaactacactgtttctgttgtattgatcctttgacattttatccattatatatgaatatgtcgattgttgtactatttggttgttcttatctaaaagaaatttgacctggcctttggcgtgggacaaatgaggtgattttttttaaccctagcctgaaattcgctctccagttctttggggtgggacacatgaggggattttttttaacctcggcctgaaatttgcttccacgaagagtcaatctcaggacttgaggaatgctactcaagccacctaatcaactcacctagaagccctttcgcaagtatgtgctatgcatttgttgtttataaaatggttttcatgtgagacaaaaaatgaaggatgttccatacatgttgtttctcagctagatgcctagatgattgatttcagtggcatgatttctgctaacgataactgatttattctcctagcaataaatgcacaccataccaaagatattaatatgcatatctaaggtaccactattggagcattctttacatgtgttggttgagctctgatctatcataaaaaacttttgagggctgagcctcaaatctcactacgacttacaagcgtcattgttgatgcctggacactgattagagcaatgttaaaagttacaaatttgctaggacatgtattaattttttactttagcatacaagttgttgaagggacgagtgtatagactgatatcagcttacaaataaagcctgtctcacgaataggcactagctagtccttctggtacacctcattgaatggtctgccatcttgattatcctgtccaatggtttttagggtgaagaactgtgcaaattctattctcgttatggcatctgcaaattcggcgccaactgtaaatttgatcatcctacaatggctgctccaatgggagtttatgcatatggtttctctgggtctgcttctgtcgcacccgcttcaactaatgcacctatgacgcgacatcttcttggatctccatcaggttctggatatatgtcttaggtgtctttttttcagttgacctactttgatgtataaaatccacggcatcgcctcaggcgctgtgaatgtttctcctaacttcccgccgggatgaagttctgtaaattgagttgctgccggagatgtacagcccccctcccccaattaatccagaactttgggaataactgttggaacctaataaacttcagatacagagatgccagttttcaggtgcctgcactatttgacattaatggtgcacctatggttccgaacagaggaacagttgaattctctggaggggctgaagcctgcacttgtgcagttgagattatatcatcgcgtcgatttattttggaacctgtattcagctggtgttgaggcatttgtttctgaggtgaaatgaactctccatgcccaacaactgaaactaaagacgacacgataaggtgcctgacctgaaccggcacatttcctgtggtcaggtttaatcatatatatgtagctg

SEQ ID NO: 4476 - DNA, 1061 bp, Zea mays
  Clone ID: TF_ZmC214_2
gctgatttggttgcggatttcttagatgtggggtcttactgaccgaattatccatccacgggtggtctgtttgattaggttccctctcttctccgcgcatgcgtgcggggtcgaaaggtagggttcataccccaaagtttgtcattggggacaacaccagcggcggcgatggactacaccaacgccatccacatcatcccacccatggcctccgacgcacggaccaacgcggcggcgtccccgggcgaggaccccgacatctgggccaccgagaaagactaccgccagtggagtgccgaccagggctacaatgaccggaacccctcctcgcgggcggggagcgagcagccgccgccgggcaagaaggctcacggcgggggcggcagcagcgatagcggcggcggtggcagcacgagcaagtcagcgccattggcaagatgttcttcaagaccaagctctgctgcaagttccgggccgggacctgcccctacgtcaccaactgcaacttcgcccatggcatggaggagctctgcaagccgccgcccaactggcaggagattgtggccacccacgaggatgccaccacgaagcagggagaggagcaccagatccccattatgacatccagaagtgtcatcgctggagacgatggcggcggcggcagggcatacaagggtcgccactgcaagaagttctacactgaagagggctgcccctatggcgacacatgcaccttcctgcacgatgagcagtccaaggcacgggagagcgtcgccatcagtctcttgccgacgattggtggtggcggatacaatgctgcctctgccagcggatcgatggcgcaaaattcttccaattggaagacaaggatctgtaacaagtgggagatgactggatactgtccgtttgggagcaaatgccactttgctcatggatctactgtaatacccaatttgtaaacaatctaaagagagtagatctcattatgtgtttttgccctatactcattgtaacctggtgataaccatatatataaagagaacaaataactaataacacct

SEQ ID NO: 4477 - DNA, 1445 bp, Zea mays
  Clone ID: TF_ZmC5498_2
tgggtaccccctcgtgggcgacccgtccggcccggcaagttgcgggcgcgcgtccctgtttcgctcgtgccgttgcgctgcggcaagcctccccacctctctcctccacccgccgcccccgcgggacgaaaccctagctagggttctgcccgccgccgccttcgatccagacgcggccaggcttcccgcaacaccgccatggacacggggcgcaagcggaccgcaccggagggcgccaacggcgcgggcggccccaagcgcgcgagagaatcggagacaactggtgtaggaagcaaatccaagccgtgcaccaaatttttcagcactgcgggttgcccctttggtgcaagttgccattttctccataacttcccgggtggctaccaggccgtttcaaagatgaccaacttgggtggaccgcctgttccggctccaccaggaagaatgcctatgggacctggtggtcctgatgggccaccttcacctgctgtgaagactcgcatgtgtaacaagtacaacactgccgaaggatgtaaatgggggagcaagtgccactttgctcatggagagagggagcttggaaagcccctgcagatggacaacccgatgggagctcctccaatggggccagggcccaacgggcacttcatgccaccgccaatgcctttcccagacatggttcctccctccacattcggtgcttcggccacagccaagatcagcgtcgatgcatcccttgctggcgccatcattgggaagagtggtatcaacacaaagcatatatcccgagtgactggggccaagttagccatccgggacaatgaggctgatcccaaccataaaaacatcgagctcgagggaacgtttgaccagatcaagcacgctagcgcaatggtcacagagttgattgtccgcatcagtggtaaggtgcctccacaagcaaagaacaacccaggcagggggcctggttctcatgctgggggtcctgcaagcaacttcaagaccaagttgtgcgagaacttcaacaaaggctcctgcacctttggagacaggtgccactttgcccatggcgaaagtgagttgcgcaaacctgctgctgcttgatagatgtgtttagtgtggcttgcggtgattactctgcctgtgtggctgaataacaccacagtcgcctatggtgagatgtactgggccacgtgctgcctgagagagatcatttccatcgcttgcatagagacaatggccgttttttaggatttgtaggattgccgtattgttctgttcgatttatatctaaccctgccagaatcctatttttgtaccgtttcttagctactaattggtgccagatcattgtggttctgttgactcgagaatagttgctatcgatggtatgggtttgtgaattattgatagcatttttgaaaaaaaaaaaaaaaaaagcggcc

SEQ ID NO: 4478 - DNA, 2157 bp, Zea mays
  Clone ID: TF_ZmC1969_1
acctcgagccgggcggtgaaaagaagcgggccgcgaggggaggaggaacaaaacgactggctgtccgaacggggacgtctggttcctctcattccccttccacctcgctctctctctctcctcccactgctcgccctctctctcttacgcgcgcgtgacaacctccctccctccactgcgcgcggcgcgggagcagcagcggcagcacccaccgactgatcgccggtgggcggggcgggggcgatctgatgcgggcgcggcggtgatggcagcgccatccggcggtgggggcggcggtgcgggggagggctcctcctcggccgccgcagctgcgacgatcggggtccacggggtggaccaagttgcagaggcgatgtggcagatgaatttggaagaagccatggaactggggccatacccagagcgtgttggtgagccagactgtagctattacatgaggactggcatgtgcaggtttgggatgacctgtaaatttaatcacccagcagaccgaaagctggctgttgctgctgcaagaatgaagggagaatatcctcaaagaattgggcagcctgaatgtcaatactatctgaagactggcacgtgcaagtttggagcaacttgcaagtttcatcatccccgagaaaaggctgcaatggcaactcgagttcagttgaatgaactgggctacccactccgcccgaatgaaaaagagtgtgcttattatttaagaacagggcagtgcaagtttggaagcacatgtaagtttcaccattcacaaccatccaccatgatggttgctgtacgtggctctgtttattcacctggacagtctgcaacttctcctggccagcatgcttaccaaggggctgtaacaagctggcccttgtcgagatctgcttctttcattgcaagtccaaggtggccaggtcattcaagttatgcacaagtgattgttcctcccgggcttgttcaggtcccagggtggagtccttatactgcgcaaattggttcttcatcctcggaggaccaacaacggacacctggagctgctcaatactatactggctcacgccaaagtggtactagtataggcgatcaaggaatgttttcatcctaccaagcaggttctgttcctgttggactttatgcagtacagagggagaatttatttccagagagacctgaccaacctgaatgtcagttctatatgaagaccggagactgtaagtttggtgctgtatgcaagttccatcatcccagggagcgaataattcctactcccaattgtgcactgagtccattaggcctacctttgcgcccgggagagccaatatgcagtttctacaatcgctacggcatgtgcaagttcggtccaaattgcaaattcgatcacccaatgggaaatgccatgtacggccaggctccatcgccagctagcgaggccccagctcctcggcgcatgctggcacatgtaccgccgtcgcacccagaagcatcgcctgatggtggttccggaaggtctaggaggattgcccactctgattcccagcaaataccctctggtgaaaggagcgctgagagagaggcgtcctaggccatcctcggtgtcttcgttccccattcttgactggagtaaccatctgcaaccaacaacattcgaggatccgaagctgtacaggtcttttgccccacctctgagctttacataccggagcttgcttcaacgtgtattgcattcaggcaggaaaaagttcttgcctgttcgggatgctcatttgctcccccactgaaacgggaacaaacctaccttatttaaaacatatgtatggatggaacctactcacctctggacattcaaacccattcgagtcatgtgcactggtcccggtgctgtagttatagagctgtctttgcatggacaaagctgttgcgaaactgactggggatgcgcaagcataacctcttttgttaattattgtctcgttttttttctcggcatttatctctttttcataagggcagccccgcactctgaaagtgtgcgttttgaagattgggaaaataataggttgccatcgtatgctctgtattacccaccatgctttaaatatttgagagtcgtttttaccgaaaaaaaaaaaaaaaaaagcggcc

SEQ ID NO: 4479 - DNA, 124 bp, Zea mays
  Clone ID: TF_700570940H1
ggatgactttgcctgtaagtacggggacaagtgccagttcgcacacagcatccacgttgtccgcagcctgagccgccaccccaagtattagacggagctgtgccgcaccttccagtcaacatag

SEQ ID NO: 4480 - DNA, 534 bp, Zea mays
  unsure (1)..(534): unsure at all n locations
  Clone ID: TF_LIB3959-023-Q1-N6-F11
atgttactcatatacatgtaccttgcttacgttgttcgtatttctatacattttcgtgtgaaacacatacttgacttgacttcagatgaaacagaaaccaacggttccagcgctgcggaagactgcccttcgccgtgccctgccgcgtgccgggctttgttaagggcggggcaggtggaggcgttcggcgggggtgagcgtatggcggaagtggcagcggtggccgtaggggcagacctcgccggcgaggaccatgcggcagacctgggtcttgtagcgcggatggcggatgacagggcggagctcggcgacgccgtgagcgaactggcactggtcgccgtaggggcacgcccccgtctcctcccacttgttgcacagctccgtctttaacatgccctggttgtacacctccagctccacgccgcccgccgtgcgatgctccttgggttcctcgcttctcttgtcgccgccattgcccttgtacacgcgcgagcttcggttggtggntcgggttcgacgcgcgaggcttgcggt

SEQ ID NO: 4481 - DNA, 700 bp, Zea mays
  unsure (1)..(700): unsure at all n locations
  Clone ID: TF_LIB5116-061-A1-PF1-B7
ctcttcctccctccgctgcgccccactccgcctccgccaaaccgcaagctagggtttccgcctcgacgcggagggctcgccatggatgccgccgcccgcaagagatcccggccggagtccgccaacggaggctccgcaggcgggaagcgctcgagagaatcggagtcacaacaaactggcctatcaagcaaatcgaagccttgcaccaagtttttcagcactgttgggtgcccctttggtgagggctgtcacttcgcgcactttgtccctggtggataccaggcagtatcaaaatcacacagcttaggccatgctgctgtgtctgcagcgtcaagagctcctgcggatcatgctgcttctggtgtcaaagcacgcatgtgcaccaagtacaacactgcagaaggctgcaagtttggtgacaagtgccatttcgcccacggcgagagggagcttggcaggccaccatcctcctacatgtcccaggaaagttcctatgcntcctcctatgggtggtcggatatggaggtcgacacgaaccacctccgccagcttcaatgggccctccagccggaaacttcggcgcctcgtctacctgcaaggtcagtgttgacgccgctctcgccggaggcataatcgggaagggcggggtcaacacgaagcagatctgccgcatcacgggggtcaagctctcgatacgcga

SEQ ID NO: 4482 - DNA, 1666 bp, Zea mays
  Clone ID: TF_ZmC214_1
ctcgaggccggccggggctcgtccggttcagttcagtggcgccgtcgtgcctcgacgacggcgggagacgccgcaagcaggtgagagtgagacgggcggtgactagcgggcgcttaggccgacatcggccccgcagcggcggggtagggtgcgtcgacacgcgggactgcgacttgggggggattgattcccttcgctgttctctcttctccggcgcgtgcgcgcgggatcgaaggtagggtttgggccccaaagttcgtgtctttggggacagcggcggcgatggactacaccaacgccatccacatcatcccggacgccgcgggccccgacgcctgggccaacgcggcgtcggccgcgggcgccgacgccagcatctgggccaccgaggacgactaccgccattggcaagatgttcttcaagaccaagctctgctgcaagttccgggccgggacctgtccctacgtcaccaactgcaacttcgcgcatggcatggaggagctccggaagccaccgcccaactggcaggagatcgtggccgcccacgaggaggccacggagcagcgggaggagcaccagatccccatcatgacatctggaagtgttgtagctggagacggcggcggtggcagtggtggcggctcgcaggggggcagggcattcaagggccgtcactgcaagaagttctacactgaagagggctgcccctatggtgacacatgcaccttcctgcatgatgagcagtctaaggcacgggagagcgtggccatcagtctctcgcccaccgttggtggtgggggatacaatgctgcctccgccaacggagtgatggtgcagaagccgtccaactggaagacaaggatctgtaacaagtgggagatgactggatactgcccatttgggagcaaatgccactttgctcatggttctaccgaacttcacaagtacggagggggcctcgtggacatcgacggcagggacatcttgtccactcctgattcgaagcaagccggtggctctgctaaagctcctctagagtctgctgctgcgtccactgcgttgccccctcatgcagacgtgtaccatctcggcatccagtcgcagcgctcggccatcgccagccagaggtctggacagctgcaaaggcccatccagaaatggaagggccctgacaagatcagcaggatctatggagactggatagatgagaacgaatagaagaaggatcttctacggtgggccgaagggaagctgttacttggtatccgtccgactccacatcagctggtggaagctttacctggcttagaagatctcgttagcgctgcaaaaccagagtcaagatcatctttgcaagacctgtattggggagataaactgctggaacatagtgccgctttcttccgttgaactcagtagcattgctatgcttgtgtaatttgtgtgttggatggaggagcataatagcatatagcgagtcatggtgcaccctgtacagggtggctgagctgcatcctgaaggctggttgttcaggtgcgtccgtgactgtctgttggttcttgttttcgggctattattattgggccggatatttctagccttactctttggcccattgagcagtgcgctgtgtaccaagcagttaagcccaataaacagggtat

SEQ ID NO: 4483 - DNA, 1784 bp, Zea mays
  Clone ID: TF_ZmC214_3
gcgttcgttcatggcgccgtcgtgcctcgtcgacggcgggggacgccgcaagcaggtgagagtgagacgggcggtgactagcgggcgcttaggccgacatcggccccgcagcggcggggtagggtgcgtcgacacgcgggactgcgacttgggggggattgattcccttcgctgttctctcttgtggggggcgggcgcgcgggatcgaaggtagggtttgggccccaaagttcgtgtctttggggacagcggcggcgatggactacaccaacgccatccacatcatcccggacgccgcgggccccgacgcctgggccaacgcggcgtcggccgcgggcgccgacgccagcatctgggccaccgaggacgactaccgccagtggagcgccgaaccaggctacggcgaccggaacccctcgtcgcgggcggggagcgagcagccgccgccgggcaagaaggctcgcggcgggggcggcggcagcgatagcggcggcggtggcagcacgagcaagtcgcgcgccattggcaagatgttcttcaagaccaagctctgctgcaagttccgggccgggacctgtccctacgtcaccaactgcaacttcgcgcatggcatggaggagctccggaagccaccgcccaactggcaggagatcgtggccgcccacgaggaggccacggagcagcgggaggagcaccagatccccatcatgacatctggaagtgttgtagctggagacggcggcggtggcagtggtggcggctcgcaggggggcagggcattcaagggccgtcactgcaagaagttctacactgaagagggctgcccctatggtgacacatgcaccttcctgcatgatgagcagtctaaggcacgggagagcgtggccatcagtctctcgcccaccgttggtggtgggggatacaatgctgcctccgccaacggagtgatggtgcagaagccgtccaactggaagacaaggatctgtaacaagtgggagatgactggatactgcccatttgggagcaaatgccactttgctcatggttctaccgaacttcacaagtacggagggggcctcgtggacatcgacggcagggacatcttgtccactcctgattcgaagcaagccggtggctctgctaaagctcctctagagtctgctgctgcgtccactgcgttgccccctcatgcagacgtgtaccatctcggcatccagtcgcagcgctcggccatcgccagccagaggtctggacagctgcaaaggcccatccagaaatggaagggccctgacaagatcagcaggatctatggagactggatagatgagaacgaatagaagaaggatcttctacggtgggccgaagggaagctgttacttggtatccgtccgactccacatcagctggtggaagctttacctggcttagaagatctcgttagcgctgcaaaaccagagtcaagatcatctttgcaagacctgtattggggagataaactgctggaacatagtgccgctttcttccgttgaactcagtagcattgctatgcttgtgtaatttgtgtgttggatggaggagcataatagcatatagcgagtcatggtgcaccctgtacagggtggctgagctgcatcctgaaggctggttgttcaggtgcgtccgtgactgtctgttggttcttgttttcgggctattattattgggccggatatttctagccttactctttggcccattgagcagtgcgctgtgtaccaagcagttaaggccaataaacagggtat

SEQ ID NO: 4484 - DNA, 1523 bp, Zea mays
  Clone ID: TF_ZmC1969_2
caatactatctgaagactggcacatgcaagtttggagcaacttgcaagtttcatcatccccgagaaaaggctgcaatggcaactcgagttcagctgaatgaactgggctacccactccgcctgaatgaaaaggaatgtgcttattatttaagaacagggcagtgcaagtttggaagcacatgtaagtttcaccatccacaaccatccactatgatggttgccgtacgtggctctgtttattcacctggacagtctgcaacttctcctggccatcatgcttaccagggggctgtaacaagctggcccttgtcgagatctgcttctttcattgcaagtccaaggtggccaggtcattcaagttatgcacaagttattgttcctcctgggcttgttcaggtcccagggtggagtccttatgctgcgcagattggttcttcatcctcggatgaccaacaacggacacctggagctgcccaatactatactggctcacgccagagtggaacacctggcataggcgatcgaggaatgttttcatcctaccaagcaggttctgttcccgttggactttatgcagtacagacggagaatgtatttccagagagacctgaccaacctgaatgtcagttctatatgaagaccggagactgtaagtttggttctgtatgcaagttccatcatcccagggagcgaataattcctactcccaattgtgcactaagtccattaggcctacctttgcgcccgggagaaccaatatgcagtttctataatcgctatggcatgtgcaagtttggtccaaattgcaaatttcatcatccgatgggaaaccctatgtatggccatgcttcatcaccgacaagtgaggcccaaacatctcggcgtatgctggcacatgtaccatcgcatccagaagtatcacctgacagtggctcgggaaggtctaggaggattgttcattcagattcccagcaaataccctctgttgaaaggatcaccgagagagaggcgtcctaagccatcctcggtgtcttcgttcatgctgcctcccctcccctcccctcccattcttgacgagtaattaaatgcaacaacatctgagaatccgaagctgtacaggtcttttgcctcatctttgagctttacataccggagcttgcttcaacatgtattgcatccaggcatgaaaaagttcttgccggttcgggatgctcatttgcccccataaaaacgggaacaaacctaccttatttaaacatatgtatgaaactcactcacctctggacattcaaacccattcgagtaatggtcccggtgttgtagtttatagagctgtgtttcagtggacaaacctttgcgaaactgactggggatgcgcaagcatagcctcctttattaattattatctcgtttttttcctagcatctctcttttcataagggcaacccaaagtgttggaataatagattgccaccataatgctctgtattacccaccatatttaaacctggttacttgtgagt

SEQ ID NO: 4485 - DNA, 601 bp, Zea mays
  Clone ID: TF_ZmC258661_1
aattcggcacgaggggacaatcacagatggtaatgatgtggaagatcaagaggtgcacagagagaaggttggtctctctgaagggtacccacagaagcctggtaaactgaactgtcgtttttacatgtcaacagggaggtgctcatatgggtcatcgtgccacttcaatcatccacggctcaaagcaaaactagaagtttcaagtttcccttctgaacaaagaaatcatgaagctgaatttctggaactgaaccgtgttggcctccccattagagaaggagcaaggaagtgtatctattacatgcgtaatggtacatgcagatatggaaagaaatgttgttttaaccatccagagcaagttcttgatgttcaacaccacactgcaacaggatgggatgatactaacttgcaatcttcaccacactcaaagaagttacctgaacataaaactatggatgacatatcgtctggatctgaggttcttcctccaaacatacttcggatgcttttacctccccagaatgtgccccctagtacaaaagaaaaggaaatcaggataaaaaaggatcctgattgggcttcagcttcagatgattctgat

SEQ ID NO: 4486 - DNA, 804 bp, Zea mays
  Clone ID: TF_ZmC218_39
ggaagtcgccaccacggtcacgggttgtccctcctgtgctgtgggctcgggctgcggctcctcccgtggctcctcctggaacgcccaccatatagcttcctcctgagctccctaccaatctgcttcacgtgcatgaagttgcagtagccaccacggttgcagctgttctcctcaaactgcctgcaggtagcctcacggaagtccgtgacaggggagtactccacgatgatcgggcgaccagagtagaagcggccttggagggcgttgtgagcagccactgcctgctcttcctccctgaactggacatagacattcccgatcatgtggtcagcaaggttgtcacacacgttcagggtctcaacctcaccaaacttgctcagctcctcgtagatatcctcatagaagtcctcaaagtgctcctgcatcttctctggagcaatagccacaccttgggcatcgactccaggggtgatcatatcaggtcgctggtacatgttagcaagcacaatagttggcgatgtggttggcctgttgtgcagacgggagcaacgatccccatgacggcaagctccaatcttgaagtaaaaggggcagttgaccctatccttctccgtgccaaaaattgaagccaagtgctccgccattgttttgggagcacttcagatgatgctgaagctcgggagcgggaggacggcggctatcctctcgatcgatccggcggcttcgctgccgcggccgctggttgacggaggaggcgcacctgacctggctgtggcggcgcggcggaggaggcagagaggggtc

SEQ ID NO: 4487 - DNA, 2000 bp, Zea mays
  Clone ID: TF_ZmC218_81
aacaagaaatccgccatggaacagcataacacacgactgaaagccagatggcaaatctagtgacaaaccacaactgacatcatcataagctaatagcacaccacaaaagatttgacaccaattgtcaaaataacataatagcaaaggatccgacacaacacagatggaaacaaatgatgtctggtttaaccataaaatgaaccgaggaatcctgatcttaaaaggttttacttagccatgcagaatgcaatccacacaagcatacttagaatatagcgatgagagccggagctaagcaacaagtccggcgaacagtagccacggagagctcactgttttccctcccgttcacggttccactgctcaatcttggcccttcgctcctcgctgctttccctgactgggctccttgcacgccttggggggctaccatgcctgcgccttcctccatcatcatacctgtcatgtctgccgcctctgcctgctccatcatcatacctgtcatgcctgccacctctgcctgctccatcatcgtacctgtcatacctgctacctcttccccttccaccaccgccgccaccacggtagtcatcacggtcacggtggtggtagtcatcacggtcacggtggcccctcctttgtggtggcgggcttcggcttcggcttctcccatggtacctcctggaagcagaacgcccatacagcttcctcctgagatccctgccaatttgcttcacatgcatgaaattacagtagccaccacggttgcagctgttctcctcaaactgcctacaggttgcttcacggaagtcggtcacaggagaatactcaacaattatagggcggccagagtaaaagcgcccctgaagagcattgtatgctgcggctgcttgctcttcctccctgaactggacatagacattcccaatcatgtggtcagcaaggttatcacaaacattcagattctcaatctcaccaaacttccccaactcctcatagatgtcctcatagaagtcctcaaaatgctcctgcatcttctcagggtcaataggttggccttgagcatcaactccaggggttatcatatcagggcgctgatacatgttagcaagcacaagagttggtgatatagttggcctgttgtgcagacgagagcagcgatccccatgacgacaggccccaatcttgaagtaaaaagggcagttgaccctgtccttctcagtgccgaagatcgaagccaagtgctccgccatgattcaacccgcagaccggcaacagctgttcgcctgtcgcacaaagggtgttccttctggtgtaggccttgtattatccgcccgacaaatttttttgattttaacctaagctgcacaccattttagattattaatatctgatagaaacgaaacaaacaaccgaaatcgcagttaaagctaccaccaagaaaaggcaacatccattagtagactaatatagctgacaatatacccagtaatctggcaaaatatgtcaccaacctaaagaagtaaatctcaacgaatacaagttaatgtagtgattctagaagttgattcaatcggctaaaagatagctaaaattcctacatatgcccaggcggacccagtagggaagatgagcggccccatgtttttattttgcaagaaaatcaagttagaaagcataatactacacgtatacacctgaaattagatccgatccaaacgcaaatagccaaaacagtgtcagctagggtttgggtcctcagcttcgcacagcgggaagggaagagaaggggtgcgcatacctgttggctgctcttcggcgaagggcccgacgaagacctgggcacctggcgtagagcggcgggggcggggaggtcacccagtcgtcgccacgagagagagagagaggacgccggctgaacgacgcaagataaagaacgggtccaaacagccagttcaccctagtgctggacgctggtttcgaatttccgctggacggag

SEQ ID NO: 4488 - DNA, 2016 bp, Zea mays
  Clone ID: TF_ZmC218_83
gacaccaattgtcaaaataacataatagcaaaggatccgacacaacacagatggaagcaaatgatgtctggtttaaccataaaatgaaccgaggaatcctgatcttaaaaggttttacttagacaggcagaatgtcatccacacaagcatacttagaatatagcgatgagagccgagctaagcaacaagtccggcgaacagtagccaccgagagctcactgttttccctcccgttcacggttccactgctcaatcttggcccttcgctcctcgctgctttccctgactgggctccttgcacgccttgaggggctaccatgcctgcgccttcctccatcatcatacctgtcatgtctgccgcctctgcctgctccatcatcatacctggcatgcctgccacctctgccggctccgtcatcgtacctgtcatacctgctacctcttccccttccaccaccgccgccaccacggtagtcatcacggtcacggtggtggtagtcatcacggtcacggtggcccctcctttgtggtggcgggcttcggcttcggcttctcccatggtacctcctggaagcagaacgcccatacagcttcctcctgagatccctgccaatttgcttcacatgcatgaaattacagtagccaccacggttgcagctgttctcctcaaactgcctacaggttgcttcacggaagtcggtcacaggagaatactcaacaattatagggcggccagagtaaaagcgcccctgaagagcgttgtatgctgcggctgcttgctcttcctccctgaactggacatagacattcccaatcatgtggtcagcaaggttatcacaaacattcagattctcaatctcaccaaacttccccaactcctcatagatgtcctcatagaagtcctcaaaatgctcctgcatcttctcagggtcaataggttggccttgagcatcaactccaggggttatcatatcagggcgctgatacatgttagcaagcacaagagttggtgatatagttggcctgttgtgcagacgagagcagcgatccccatgacgacaggccccaatcttgaagtaaaaagggcagttgaccctgtccttctcagtgccgaagatcgaagccaagtgctccgccatgattcaactcgcagaccggcaacctcaataaaggtcctcagtgtgcaaggctaagtagacaaaaacgaacaaaagcagctaaaacaaatcagggttcacagcatgtgcatcttataggatcaccaagtaatattcattcctgcaagtttaccccctgtacagccacgtgtgtaaatggaaaattctacagctcaggctctggcaataaaatcttaatcgcaatccctttttaagacctaatctgcacacttactcaaaaggttaaatattaggagaagtgaacagaaaaaccaaaataactgtgtcatcagggcatgttcttgctcctagtaactgatactacactttttacctatataataattaataaatctgcaagttaattcccaaaaatcacctaaatttaaacagcgtgaaagtctctctccactattattgttaagagtgtttgctgcagctagctgcagctgccactccaacttctaagctgcaaatactataagaagcctgctgcatctgctgcggctgtgcttctagctgcagtgaacatgccttagttttctcccctgcaactgcatataatgaaccaaataatactgcagagagagatagagacagctgttcgcctgtcgcacaaagggtgttccttctggtgtaggccttgtattatccgcccgacaaatttttttgattttaacctaagctgcacaccattttagattattaatatctgatagaaacgaaacaaacaaccgaaatcgcagttaaagctaccaccaagagaaggcagaatccattagtagactaacatagctgacaatatacccagtaatctggcaaaatatgtcaccaacctaaaaagtaaatcgcaacgaat

SEQ ID NO: 4489 - DNA, 2029 bp, Zea mays
  Clone ID: TF_ZmC218_85
ggccgcttttttttttttttttttaacttaatagctcatcacaaaagatttgataccaattgtcagcataacataatggcaaatgattcaacacaatccacaaggaaataaatagagtttacatgtccgatttaaccacaaaattgaactgagtcctgcactcaagcatatcagccacacaagcatacttagaatatagcagtgaaagacgagctaagcaacaagtccaccgaataacacgtctcagaacagttgccacagagagctcactgttttgactcccgctcacggttccactgctcaatcttggcccttcgctcctcgctgctttccctgaccgggctccttccacgcctcggggggctaccatgcctacgccttcctccatcatcatacctctcatacctgccgcctctacccgctccatcatcgtacctgtcatgcctgccgcctctacctgctccatcatcatacctgtcatgcctgctacctcttccccgtccaccgccgccgccgccgccgccacggtactcgtcacgatcacggtggtgatagtcctcacgatagcccctcctttgcggtggagggcttcggcttctcgcatggtacctcctggaagcagaacgcccatacagcttcctcctgagatccctgccaatttgcttcacatgcatgaaattacagtagccaccacggttgcagctgttctcctcaaactgcctacaggttgcttcacggaagtcggtcacaggagaatactcaacaattatagggcgcccagagtaaaagcgcccctgaagagcattgtatgctgcagctgcctgttcttcctctctgaactgaacatagacattcccaatcatgtggtcagcaaggttatcacaaacattcagattctcaatctcaccaaacttgcccaactcctcatagatgtcctcatagaagtcctcaaaatgctcctgcatcttctcaggatcaataggttggccttgagcatcaactccaggagttatcatatcagggcgctgatacatgttagcaagcacaagagttggcgatatagttggcctgttgtgcagacgagaacagcgatccccatgacgacaagccccaatcttgaagtaaaaagggcagttgaccctgtccttctcggtaccaaagatcgaagccaagtgctccgccatgattcaacttgcagactgacaacctcgataaaggtcctcagtgtgcaagactaagtagacaaaacgaacacaagcagctaaaacaaatcagggttcacagcacattatcttataggatcaccaagtaatattcctgtcaatttaccccctgtacagcccactgtgtaaatggataattctacagctcaggctctggcaataaaatattaatcgcaatccctttttaagacctaatctgcacacttactcaaagggttaaatattaggagaagtgaacagaaaaaccaaaataactgtgtcatcagggcaagttcttgctcctagtaactgatactacactttttacctatataataattaataaatctgcaagttaattcccaagaatcacctaaatttaaacagcgtgaaagtctctctccactattattgttaggagtgtttgctgcagctagctgcagctgccactgcaacttctaagctgcaaatactgtataagaagcctgctgcatctgctgcggctgtgattctagctgcagtgaacaggccttagttttctcccctgcaactgcatataataaaccaaataacgctgcagagagagatagagacagctgttcgcctgtcgcacaaagggtattccttctggtgtaggccttgtattatccgcccggcaattttttttattttaacctaagctgttggctgctcttcggcgaagggcccgacgaagatctgggcacctggcgtagagcggcgggggcggggaggtcgcccagtcgtcgccacgagagagagagaggacgccggacgcaagataaaccccggcccggccggcctcgagg

SEQ ID NO: 4490 - DNA, 1996 bp, Zea mays
  Clone ID: TF_ZmC218_87
cgatggaacctgctccgtgctactgcacatagtacaatgacggcagcccaagcactgtctaggaggcattgagcaaaaatgagaagagggaaaacaagaaatccgccatggaacagcataacacacgactgaaagccagatggcaaatctagtgacaaaccacaactgacatcatcataagctaatagcacaccacaaaagatttgacaccaattgtcaaaataacataatagcaaaggatccgacacaacacagatggaaacaaatgatgtctggtttaaccataaaatgaaccgaggaatcctgaattcctgatcttaaaaggttttacttagccaggcagaatgccatccacacaagcatacttagaatatagcgatgagagccggagctaagcaacaagtccggcgaacagtagccacggagagctcactgttttccctcccgttcacggttccactgctcaatcttggcccttcgctcctcgctgctttccctgactgggctccttgcacgccttgaggggctaccatgcctgcgccttcctccatcatcatacctgtcatgtctgccgcctctgcctgctccatcatcatacctgccatgcctgccacctctgcctgctccgtcatcgtacctgtcatacctgctacctcttccccttccaccaccgccaccaccacggtagtcatcacggtcacggtggtggtagtcatcacggtcacggtggcccctcctttgtggtggcgggcttcggcttcggcttctcccatggtacctcctggaagcagaacgcccatacagcttcctcctgagatccctgccaatttgcttcacatgcatgaaattacagtagccaccacggttgcagctgttctcctcaaactgcctacaggttgcttcacggaagtcggtcacaggagaatactcaacaattatagggcggccagagtaaaagcgcccctgaagagcgttgtatgctgcggctgcttgctcttcctccctgaactggacatagacattcccaatcatgtggtcagcaaggttatcacacacattcagattctcaatctcaccaaacttccccaactcctcatagatgtcctcatagaagtcctcaaaatgctcctgcatcttctcagggtcaataggttggccttgagcatcaactccaggggttatcatatcagggcgctgatacatgttagcaagcacaagagttggtgatatagttggcctgttgtgcagacgagagcagcgatccccatgacgacaggccccaatcttgaagtaaaaagggcagttgaccctgtccttctcagtgccgaagatcgaagccaagtgctccgccatgattcaactcgcagaccggcaacctgttggctgctcttcggcgaagggcccgacgaagacctgggcacctggcgactggcgtagagcggcggggacggggaggtcgcccaatcgtcgccacgagagagagagagagagagagagagagagagagagagagagaggacgccggctgaacgacgcaagataaagaacgggtccaaacagccagttcaccctagtgctggacgctggtttcgaatttccgctggacgctggacggatggacgccggctggttcctagtgctggttcctgggacctgggtgtggccgcgtgggattagggagtagggacgccggctggttcctagtgctggacgctggtttcgaatttccgctggacgctggacggagtggacgccggctggttcctagtgctggttcctgggacctgggtgtggccgcgtgggattagggagtagggacaggggcagggcggcgctggtggtgctgtcgtgctggagcggtggagcctggagctggacagcctgggcgtgggattgccggagccggatcggggtccggggagaaaggcgtcacggcgacaaggatggggaatgggggggcggccgccgcgacgagaacagaccctcgtgccgaatt

SEQ ID NO: 4491 - DNA, 3319 bp, Zea mays
  unsure (1)..(3319): unsure at all n locations
  Clone ID: TF_ZmC218_93
tgaattcggcacgaggctcgtcgtggcggccgccccccattccccatccttgtcgccgtgacgcctgacgccttctccccggaccccgatccggctccggcaatcccacgcccaggctgtccagctccaggctccaccgctccagcacgacagcaccaccagcgccgccctgcccctgtccctactccctaatcccacgcggccacacccaggtcccaggaaccagcactaggaaccagccggcgtccactccgtccagcggaaattcgaaaccagcgtccagcactagggtgaactggctgtttggacccgttctttatcttgcgtcgttcagccggcgtcctctctctctctctcgtggcgacgactgggcgacctccccgcccccgctgctctacgccaggtgcccaggtcttcgtcgggcccttcgccgaagagcagccaacaggttgccggtctgcgagttgaatcatggcggagcacttggcttcgatcttcggcactgagaaggacagggtcaactgccctttttacttcaagattggggcctgtcgtcatggggatcgctgctctcgtctgcacaacaggccaactatatcaccaactcttgtgcttgctaacatgtatcagcgccccgatatgataacccctggagttgatgctcaaggccaacctattgaccctgagaagatgcaggagcattttgaggacttctatgaggacatctatgaggagttggggaagtttggtgagattgagaatctgaatgtttgtgataaccttgctgaccacatgattgggaatgtctatgtccagttcagggaggaagagcaagcagccgcagcatacaatgctcttcaggggcgcttttactctggccgccctataattgttgagtattctcctgtgaccgacttccgtgaagcaacctgtaggcagtttgaggagaacagctgcaaccgtggtggctactgtaatttcatgcatgtgaagcaaattggcagggatctcaggaggaagctgtatgggcgttctgcttccaggaggtaccatgggagaagccgaagccgaagcccgccaccacaaaggaggggccaccgtgaccgtgatgactaccgtggtggcggcggtggtggaaggggaagaggtagcaggtatgacaggtacgatgatggagccggcagaggtggcaggcatgacaggtatgatgatggagcaggcagaggcggcagacatgacaggtatgatgatggaggaaggcgcaggcatggtagccccccaaggcgtgcaaggagcccagtcagggaaagcagcgaggagcgaagggccaagattgagcagtggaaccgtgaacgagagggaaaacagtgagggctactgttcgccggactctctcatccctatattctaagtatgcttgtgtggatgacattctgcctggctaagtaaaacctttttaagatcaggattcctcggttcattttatggttaaaccagacatcatttgtttccatctgtgttgtgtcggatcctttgctattatgttattttgacaattggtgtcaaatcttttgaggtgtgctattagcttatgatgatgtcagttgtggttaaaaaaaaaaaaaaaaaactcgaggtcgacggtatcgataagcttgatatcgaattcggcacgagcttttagtgagcgcaacaaatgcgttcattattccacagtgctcacttgctcctagtgccattattccacagttcctcccaccagttacttcaatgggcttcgaacatccagccgtgcaagcctacaggctacaactagcgcttgcggcgagcgccttacaacaaccaattgcccaattgcaacaacaatccttggcacatctaaccctacaaaccattgcaacgcaacaacaacaacaacaacagtttctgccatcactgagccacctagccgtggtgaaccctgtcacctacttgcaacagcagctgcttgcatccaacccacttgctctggcgaacgtagctgcataccagcaacaacaacagctgcaacagtttatgccagtgctcagtcaactagccatggtgaaccctgccgtctacctacaactactttcatctagcccgctcgcggtgggcaatgcacctacgtacctacaacaacagttgctgcaacaaattgtaccagctctgactcagctagctgtggcaaaccctgctgcctacttacaacagttgcttccattcaaccaactggctgtgtcaaactctgctgcgtacctacaacagcgacaacagttacttaatccattggcagtggctaacccattggtcgctaccttcctgcagcagcaacaacaattgctgccatacaaccagttctctttgatgaaccctgccttgcagcaacccatcgttggaggtgccatcttttagattacatatgagatgtactcgacaatggtgccctcataccgacatgtgtttcctagaaataatcaatatattgattgagatttatctgantaagaggctcagtgctggtaggaactgttgttgttgctgttgcgttgcgatggtttgtattgttagatgtgccaaggattgttgttgcaattgggcaattggttgttgtaagacgctcgccgcaatcgcttgttgtagcctataggcttgcacagctgggtgtcccccactgaagaaactatgtgctgtagtatagccgctggctagctagctagttgagtcatttagcggcgatgattgagtaataatgtgtcacgcatcaccatgggtggcagtgtcagtgtgagcaatgacctgaatgaacaattgaaatgaaaagaaaaaagtattgttccaaaaaaaaaaaaaaaaaactcgagccccggccacggccaccatggccacggcgggtacgggtacgggcgcccggcgatgccgcagtacccgccgccgccggcgtactactacccgatgccgcagcgccacccgcacgacagcatgttcagcgacgagaaccccaacgggtgctcggtgatgtgaggcgaggcgcggcggcggcctgcggggggctccggagaaagtgaaccaggcaaccagccagccagccaaccggaaggagggagctcgggcccgtcaggtcggaggcggccgccgtgagtggaagagtcgtcgtcggtatacatgaagaaaaaaaaactagctatatgctatagcaccagccgtaacctcgccgccccatttcgttttcgtctttcccctagtttgttttcacctttggtactttttgtttcccttctctgaacaaagaaagatcaaa

SEQ ID NO: 4492 - DNA, 709 bp, Zea mays
  Clone ID: TF_ZmC218_25
accataaaatgaaccgaggaatcctgatcttaaaaggttttacttagacaggcagaatgtcatccacacaagcatacttagaatatagcgatgagagccgagctaagcaacaagtccggcgaacagtagccaccgagagctcactgttttccctcccgttcacggttccactgctcaatcttggcccttcgctcctcgctgctttccctgactgggctccttgcacgccttgaggggctaccatgcctgcgccttcctccatcatcatacctgtcatgtctgccgcctctgcctgctccatcatcatacctggcatgcctgccacctctgccggctccgtcatcgtacctgtcatacctgctacctcttccccttccaccaccgccgccaccacggtagtcatcacggtcacggtggtggtagtcatcacggtcacggtggcccctcctttgtggtggcgggcttcggcttcggcttctcagggtcaataggttggccttgagcatcaactccaggggttatatcagggcgctgatacatgttagcaagcacaagagttggtgatatagttggcctgttgtgcagacgagagcagcgatccccatgacgacaggccccaatcttgaagtaaaaagggcagttgaccctgtccttctcagtgccgaagatcgaagccaagtgctccgccatgattcaactcgcagaccgg

SEQ ID NO: 4493 - DNA, 1647 bp, Zea mays
  Clone ID: TF_ZmC1784_1
tttcgaccctccctcgggccggatccccaatcagcgggtccgtactcatctgcttcacctccgggttccggctacggcggcactcttctctggcaaccggaaatccagcgggtccgtactcatctgcttcacctccgggctccggctacggcggcactcttctctggcaaccggtcggaagatgttggatcttccgcttcaaatcgacgcataaaggatgcagattagttttgttcgcgtcaaatttattttgctcggtgtagttctgtccattaattaattatttgtactggatttaaggtgctgctattttgaaggttttttctcccggaaattttcacatcccgaaacgactggaaattgaagtagccatttgatgctgttacctgggttcataagttgttagacttgttgttatttgtttgttaatcctatagctattgcatattgtgtgcctgatcaggaccacagaaacatctaggcgacgagtcgagcaggtagaggagtaatcaggcatccatggctgagcatcttgcgtccatctttggcacggagaaggaccgcgtgaactgccccttctacttcaagatcggcgcatgccgccacggcgaccggtgctcccgcctgcacaacaagccttccatctccccgacgctgctgctctgcaacatgtaccagcggccggacatgatcaccccgggcgtggacgcgcagggcaaccccatcgacccggagcggatccaggaggacttcgaggacttctacgaggacatcttcgtggagctgagcaagcacggcgagatcgagagcctccacgtctgcgacaacctcgcggaccacatgatcgggaacgtgtacgtggagttccgcgaggaggagcaggcggcccgcgccctgcaggcgctgcagggccgctactactcgggccgacccatcatcgccgagttctcgccggtgactgacttccgggaggccacctgccgccagttcgaggagcacagctgcaaccgcggcggatactgcaactttatgcacgtcaagcaggtcggccgggacctgcggcggaagctgtttggccacctgcatcgctccctccggagccacagccggggcagccgcagcccgagcccataccgccgccgcggtagctcgtccaggtccagggaccgcgacgattacccgactactactactactactaccgtagtggcagtggcagccgcaggagcagcgagagacaccgcagccacgacagcgacgggagccgccgtcgacgcgggcggtcgaggagccggagccggagcccggtgagggaaggcagcgaggagcggagggcaaagattgagcagtggaaccgcgagcgggaggcagctcaggtgtaagcaagttccccttccctagttgccatgttggttgctgcagtgttattggccttgctagttgccatgttgctgttgctgaagcctgttatcatgtattgtggtgtggttcaggcagggtaaggccataaattgagcctgaaattggactgtgatctcttttgctgtggacgggttaccattaaacttgatttggatgtgctgatggaaaccacggtttttaatactataataaaaaaaaagaaaaaaaaaaaaaaaaaaagcggcc

SEQ ID NO: 4494 - DNA, 1821 bp, Zea mays
  Clone ID: TF_ZmC1784_2
tacaacacccagtagtaatccagcgggtccgtactcatctgcttcacctccgggctccggctacggcggcactcttctctggcaaccggaccacagaaacctctaggcgacgaatcgagcaggtagaggagtaatcaggcatccatggctgagcatcttgcgtccatctttggcacggagaaggaccgcgtgaactgccccttctacttcaagatcggcgcatgccgccacggcgaccggtgcttccgcctgcacaacaaggcttcctttttcccttcggcgcgtgcccccccccctttccttcagccctctttttttttttccatgccgcctcgcgcagggaagcccatcgtcccggaacggggcccttcggaggcggtgctaatccagcgggtccgtactcatctgcttcacctccgggctccggctacggcggcactcttctctggcaaccggtcggaagatgttggatcttccgcttcaaatcgacgcataaaggatgcagattagttttgttcgcgtcaaatttattttgctcggtgtagttctgtccattaattaattatttgtactggatttaaggtgctgctattttgaaggttttttctcccggaaattttcacatcccgaaacgactggaaattgaagaccacagaaacctctaggcgacgaatcgagcaggtagaggagtaatcaggcatccatggctgagcatcttgcgtccatctttggcacggagaaggaccgcgtgaactgccccttctacttcaagatcggcgcatgccgccacggcgaccggtgctcccgcctgcacaacaagccttccatctccccgacgctgctgctctgcaacatgtaccagcggccggacatgatcaccccgggcgtggacgcgcagggcaaccccatcgacccggagcggatccaggaggacttcgaggacttctacgaggacatcttcgtggagctgagcaagcacggcgagatcgagagcctccacgtctgcgacaacctcgcggaccacatgatcgggaacgtgtacgtggagttccgcgaggaggagcaggcggcccgcgccctgcaggcgctgcagggccgctactactcgggccgacccatcatcgccgagttctcgccggtgacggacttccgggaggccacctgccgccagttcgaggagcacagctgcaaccgcggcggatactgcaactttatgcacgtcaagcaggtcggccgggacctgcggcggaagctgtttggccacctgcatcgctccctccggagccacagccgaggcagccgcagcccgagcccataccgccgccgcggtagctcgtccaggtccagggaccgcgacgattaccacgactactactaccactactaccgtagtggcagtggcagccgcaggagcagcgagagacaccgcagccacgacagcgacgggagccgccgtcgacgcgggcggtcgaggagccggagccggagcccggtgagggaaggcagcgaggagcggagggcaaagattgagcagtggaaccgcgagcgggaggcagctcaggtgtaagcaagttccccttccctagttgccatgttggttgctgcagtgttattggccttgctagttgccatgttgctgttgctgaagcctgttatcatgtattgtggtgtggttcaggcagggtaaggccataaattgagcctgaaattggactgtgatctcttttgctgtggacgggttaccattaaaaaaaaaaaaaaaaaaaaaaaaaaaaaaaaaaaaaaaaaaaaaaaaaaaaaaaaaaagggaaaaacggtacc

SEQ ID NO: 4495 - DNA, 1699 bp, Zea mays
  Clone ID: TF_ZmC1784_3
aatccagcgggtccgtactcatctgcttcacctccgggctccggctacggcggcactcttctctggcaaccggtcggaagatgttggatcttccgcttcaaatcgacgcataaaggatgcagattagttttgttcgcgtcaaatttattttgctcggtgtagttctgtccattaattaattatttgtactggatttaaggtgctgctattttgaaggttttttctcccggaaattttcacatcccgaaacgactggaaattgaagtagccatttgatgctgttacctgggttcataagttgttagacttgttgttatttgtttgttaatcctatagctattgcatattgtgtgcctgatcaggaccacagaaacatctaggcgacgaatcgagcaggtagaggagtaatcaggcatccatggctgagcatcttgcgtccatctttggcacggagaaggaccgcgtgaactgccccttctacttcaagatcggcgcatgccgccacggcgaccggtgctcccgcctgcacaacaagccttccatctccccgacgctgctgctctgcaacatgtaccagcggccggacatgatcaccccgggcgtggacgcgcagggcaaccccatcgacccggagcggatccaggaggacttcgaggacttctacgaggacatcttcgtggagctgagcaagcacggcgagatcgagagcctccacgtctgcgacaacctcgcggaccacatgatcgggaacgtgtacgtggagttccgcgaggaggagcaggcggcccgcgccctgcaggcgctgcagggccgctactactcgggccgccccatcatcgccgagttctcgccggtgacggacttccgggaggccacctgccggcagttcgaggagcacagctgcaaccgcggcggatactgcaactttatgcacgtcaagcaggtcggccgggacctgcggcggaagctgtttggccacctgcatcgctccctccggagccacagccggggcagccgcagcccgagcccataccgccgccgcggtagctcgtccaggtccagggaccgcgacgattaccacgactactactaccactaccgtagtggcagtggcagccgcaggagcagcgagaggcaccgcagccacgacagcgacgggagccgccgtcgacgcgggcggtcgaggagccggagccggagcccggtgagggaaggcagcgaggagcggagggcaaagattgagcagtggaaccgcgagcgggaggcagctcaggtgtaagcagagcaggttccccctcccctgtggccatgatggttgctgcattgttattggccttgctagttgccatgttgctgttgctgaagcctgttatcatgtattgttgtgtggctcaggcagggtaaggccataaattgaacctgaaattggactgtgatctcttttgctgtggacgggttaccattaaacttgatttggatgtgctgatggaatctagttgctgtttgagtaaggcttaccgtggtgagtcggcggccagcgagtacgtccatccattgggcgttgagattgagcagtggaacccagaatgtgtgacggatacgatttcgagagtagtagaaagtattgacttccgtgcagacccgatcaaactgtagatcggaactcatcctctaaggctataacacatttactattttg

SEQ ID NO: 4496 - DNA, 1099 bp, Zea mays
  Clone ID: TF_ZmC1784_4
ccggccgggatagaagcccggccggggaagcaccccggaatccagcgggtccgtactcatctgcttcacctccgggttccggctacggcggcactcttctctggcaaccggaccacagaaacatctaggcaacgagtcgagcaggtagaggagtaatcaggcatccatggctgagcatcttgcgtccatctttggcacggagaaggaccgcgtgaactgccccttctacttcaagatcggcgcatgccgccacggcgaccggtgctcccgcctgcacaacaagccgtccatctccccgacgctgctgctctgcaacatgtaccagcggccggacatgatcaccccgggcgtggacgcgcagggcaaccccatcgacccggagcggatccaggaggacttcgaggacttctacgaggacatcttcgtggagctgagcaagcacggcgagatcgagagcctccacgtctgcgacaacctcgcggaccacatgatcgggaacgtgtacgtggagttccgcgaggaggagcaggcggcccgcgccctgcaggcgctgcagggccgctactactcgggccgacccatcatcgccgagttctcgccggtgactgacttccgggaggccacctgccggcagttcgaggagcacagctgcaaccgcggcggatactgcaactttatgcacgtcaagcaggtcggccgggacctgcggcggaagctgtttggccacctgcatcgctccctccggagccacagccggggcagccgcagcccgagcccataccgccgccgcggtagctcgtccaggtccagggaccgcgacgattactactaccactactaccgtagtggcagtggcagccgcaggagcagcgagagacaccgcagccacgacagcgacgggagccgccgtcgacgcgggcggtcgaggagccggagccggagcccggtgagggaaggcagcgaggagcggagggcaaagattgagcagtggaaccgcgagcgggaggcagctcaggtgtaagcaagttccccttccctagttgccatgttggttgctgcagtgttattggccttgctagttgccatgttgctgttgctg

SEQ ID NO: 4497 - DNA, 1298 bp, Zea mays
  unsure (1)..(1298): unsure at all n locations
  Clone ID: TF_ZmC17484_1
aaaaaggatcctgattgggcttcagcttcagatgattctgatggcggctgctcggcagagactgcagatgggcctttgtgcaagcaggaacatgaggactatcctgagaggcctgaatgccctttccttcttagatttggtaattgtaagtttgcatcatcatgccaatattaccacccaaaagacaaattttcaagtacctaccatccagaagacaaattccaaagtcgataccatcaaaaagaaaaatcaagtcgacaccatccaaaaaaagagccagcactgtcaggagaactgatggtttatcctgacagacctagtgaacctgactgccccttctatgtgaaaactgggtcctgtaaatttggggcaaactgtaagtttcatcacccgaaggatataactccaaacatgcagggtccagcaagtccaaaaaggtcggtcgctgcaaaagagcaccacgcagcagctagagcgacattacaagaccagatgtaccagcaacaaaaattccctgagcggcctggccaaccagattgccggtactacatgcaatttgggaaatgtaaatttcaatcagcttgtatattcaatcattcaaaagacatactttcaagtgggtggcatccagcagaatgcccattctacatgaaaactaggacatgccaatttggatcagcttgtgagttttatcacccaaaagatcggtgctcaggcagagggggagtgattgatggtactgactatggacatgattttgccacgaagtcacggaatgttctgcaggaactggcaatatatcctgaaaggcctgatgaacttgagtgttctcactacatgaagcatggctactgtaaatataagatgaactgcaaatttcatcatccaagagatcgtcttccaaagaaataggaccatttgctacaaccactgttgtaactggctgtcgttgatgagtggagcaagtactgatgatgggacagaaatgcaggaaggaagccatagtcttccttttttgaagagctcgattctactcatgtctatgtcgaatttctgccctagtgtcgttagagttctcgtaccagatgcgaactgcctggtggcttcccaactcccgttcattcatatactaccaaacattgctgtgatctagatctagcccgatgcggtgctaacctgagattgtgggttactgtagctcagtatgcagctcaggtacctgcacttgctcaagattgcgataatgatcagattaaaatagcaggccacgcatattctgcaacttgcgacnnnnncat

SEQ ID NO: 4498 - DNA, 1171 bp, Zea mays
  Clone ID: TF_ZmC493_6
cccacgcgtccgcctcttcatagagcgcgtcggggtcgggggaggacctgtcgatttggcatgagctgccgattcaatcatcctccggataggaatctggctattgcctctgccagaatgaagggagaatatcctgagagagcgggacagccagagtgtcagtattatctgaagactggaacatgcaagtttggccctacatgcaaatttcaccatcccagggaaaaggctggaattgcagggagggtgcagctaaacacatcaggatatccactccgcccgaatgaaaaggagtgtgcatattatttaaaaacaggacactgtaaatatgcaaatacttgtaaattccaccatccggaacttttcaatgtggtgccttcgtcacgtggttctcctatttatacctctgtacattcctctgcgagtgctggtccgcagtcctatactggaactatgccaagctgggcttttccacgagcttcttttataccaagccctaggtggcaaagtccttcaaattatgcgccgatgattgtacctcagggccttgttcaaatgcagagctggaattcatatactggtcagctgcagtcacctggggctcaacaaacttatggaagttcacaacaaggagaagctagtacaggaaatcagggaatgctgtcaccatacagacccagttcgtttcccgtgcctcaatatgcgctgcagagagagaatgtatttcctgagagacctgatgaaccagaatgccaatattacatgaagacaggagattgtaaattcggtgcagtgtgcaagttccatcatccccggggtgaagaactgtgcaaattctattctcgttacggcatctgcaagttcggcgccaactgtaaattcgaccatcctacagtggttgctccaatggtctatgcgtatggtttctccgcgtctgcttcccctgcatccgcttcgactaatgtacctatggcgcgacgccttctgggatccccaccggggtctggatatacatcttaggcgtcgtttttttttcagttgacctacttcgatttataaaatccatggcactgcctcaggcgctgtgattgtttctcctaacttcctgccgggatcaaagttctgtaaattgagttgctaccggagatgtacagccccgttttttttttgg

SEQ ID NO: 4499 - DNA, 955 bp, Zea mays
  unsure (1)..(955): unsure at all n locations
  Clone ID: TF_ZmC491307_1
ataccgagctctccttccggagggtcgccctcgtcatcggatccaccgggatcggcggcacatcgctcgtcgacatactcccgcgcgacgacacccccggtgggccctggaccgttcgctcgtccccccaccctcccgctctctctctcgtcggtgcgagcgcagctgtcgacgaccctcctccgactcgtcgcttcacaggcttgtggtcagcttgactgatatcaaacaatggcggaacacttggcttcgatatttggtacagagaaagacagggtcaactgtccattttacttcaagattggagcttgtcgtcatggcgatcgctgctctcgcatccataacaggccaaccatatcacctactattgtgctcatgaacatgtatcagcgccctgatatgattacccctggggttgatgctcaaggccagccgatagatccccgcaagatgcaggagcattttgaagatttttatgaggatatctttgaggaactgagcaagtttggtgagattgagaccctcaacgtctgtgacaacctttctgatcacatgataggcaatgtgtatgtccagttcagagaggaagatcaggcagcagcagctcataccgcccttcagggacgcttttactctggtcgcctaataattgttgacttctctcctgtgacggacttccgtgaagcgacctgcaggcagtatgaggagaacacctgcactcgtggtgggcactgcaatttcatgcatgtgaagcagataggtaaggatctcaggaagaaactctttgggcgctataggagatcgcaacgaggaaggagccgcagcccaagcccacaccatanggagagagcgtcatgaccgtgatgactatcgtggccgtgatgatttccgtcgtggtggtggcggcggcggcggtggacgggaggggtgggagcagtaggcatgaaaggcatga

SEQ ID NO: 4500 - DNA, 844 bp, Zea mays
  Clone ID: TF_ZmC11235_3
aaaacccacgtggtggaaggaaaggaaacgggagggagagaaaaacggaggccccccgatctcctcctcccactccgatcgcccgaccgatcgccgagcttccccgttccctccccgccccccgcgacgccgcgacgccatggagccgccgcacgccgagcaggccgtcgccgctgtagcagcaggaggagagggcggcaccgcaagcccgggcaccggcctcgaagggccggtgcttaggcgggggctggacggcggtggggaaggggaggacggggagctgggggcggggcaggaggcggacgcacggctaccggagcggcctggcgaggcggactgtggctactacctccgcacgggcgcctgcggcttcggggagcgttgccgctacaaccatccccgcgatcgtggtggcactgagtttggtggaggtaccaagaatggtgcagcacaagactttccagaacgacagggccaacctgtatgcgagtattatctgaagactggaacttgtaaatttggctccaattgcaaatatcaccatcctaagcaagatggatctgtgcagtctgttatattaaacaacaatggattccctctacgcctgggtgagaaagaatgctcctactatatgaagactgggcaatgcaagtttggttctacatgtaaatttcatcatccagaatttggtggtattccggtgacccctggaatatatccaccattacaatcaccttctgtgccctcccctcatacatatgctccaaattggcaaatgggaagatcacctgcagttcctggatcatatataccaggttcatacactccaatgatgatctcatct

SEQ ID NO: 4501 - DNA, 1647 bp, Zea mays
  Clone ID: TF_ZmC4916_435
atggatacccataggccaccacacttcgacggcactaacttcccatattatagtgctagaatggcttgttacctagaggccattgatctaggtgtttggagagtcactcgtgacgggatgaaacccctcaagaatcccgagaaacccaccacgagtgaggaaaaagaaattcatttaaatgctagagccaaaaattgcttgtatgagtctcttagcatggatatttttaaccaagtatttaccttgaaaactgctaatgagatttggctaaaattgcatgagctccatgacggcacatccaatgtccgtgagcaaaaacattgcctagtcttaaatgagtataattcttttgctatgaaagacgatgagcttgttagatacatgtattctcgtttgaatctaataatcaatgagctcaactctattggcattaataagctaggcgatgcggacattgtgaggaagattatctccttgctaccacaacaaagatatgggagcatcatcaccatccttcacaacatggaggacttgagcaacatgaccccgaccattgtcgaggatcttctctttaacattgacaggaaaaagcaaaggaagagaggatgcttcgcatgtggggagaagggccacttcagggacaactgtccaaatatggtgaaacccaaaaaggagaggagcaaaggcaaggcgctaacaagtgttagaacttggaatgattcttcaagtgaagatgaacctccaaggacgcgcagccaccgatcctcatcacgctcatcacggtcatcacacaaatgccttatggcaagaggtaacaaaagcattccatcatctagtgatgaaagtagtagtgatgatgaaggtgagggaaagccctctgtagatgagcttgcggaagccgtagaatttttccaggatgtttgcactaagcaaaaagctcaacttaaaactttgaaaaataagttggttagctctcaaaatgattacaaaggtttgcttgaaaaatttgaaacttttgcaaacttaaatagtgagctatcaactaaaattgagctattagaatgtagtgctccatccactgctaccgatgatagccttattaaaaagaatgaaaaattgaaagctaagttagctagctcccaagaagctattgaaaatttgctagagaaaatggaaattcttagcattcacaataatgagctaactactaagctagaaaacattggtagcaccccagcagcatctttagttgaaatacctgaaataattaagaaagatgcttctacttcctgctttgatttaattgatgattctaacccctgcaaccaagtcgttgttgagaatattgttgtagagacatgttcggatgaggttgcaaaggaaaatgaacaattaaagcaagaagtggctcgccttggcaaggctttgtatgacaagaaaggcaaagccaaacaaatccgacctccacaggataacaccattgcgggagtgaacaagcctgtagagggagaaactgtgatttgtaggctatgcaacatggaaggccacaagtctttccaatgcaaggcgatgaccggggataaacaaaggcaaaagctcaagcaaaagccatcaagcaaaatctccacacctacatcaaaaaggtga

SEQ ID NO: 4502 - DNA, 325 bp, Zea mays
  Clone ID: TF_LIB3245-047-P1-N1-A3
ggatttttagttttaaactgcccaatgggaaagcggaagaagccttgcttggtttgtgggttgtttgggcacaatgcaaagcagtgcaagcaggttggtcccccctatctccgagggattatcacttggtgacttggggtcaagactgtttcatctgcaaaaaaggagggcatatggcgaaggattgtcctgataagcacaagaggaatgatcatcaatccacattatgtataagatgtggagaaacaggtcatgatatgtttggatgtgccaatgattacccaccagatgatatcgagcaaataagatgctacgcgtgtaatca

SEQ ID NO: 4503 - DNA, 3621 bp, Zea mays
  Clone ID: TF_ZmC11229_1
cttgggcaagcctcagaccagttcttctttctccagtttccgcagtgcagccatattaacatgaccaaacctctcatgccaccgccaggctacttcatcttcgcgcccacgcactgctaggcacacagactgttgtatcttcaaatgaaggaggtacaacctgttttcagctcgcactattcttgccagtaatcttccatcaggttccctaatatgcatcaccccatcatcaacatgaatcttgtactttgcttcatcaagttgcccaatactgatgatatttgttgtcaggcgaggaataaaataaggcccaacaaacgaccgggtctcgccattcttgcacataaacttgatggttcctcgtccctcaatctgagccaccgagttgtcaccgaacctgacagtacccaacactctggtatccagatcggtgaaaacagccctggatccggacatatgatttgtggctccagtgtccaggatccaggttccctcctctaatttctcctcctcttcatgctgtaagaacaccttctcctccctgatctctagatgagaactagacatcttgcagcatggtttaagtgttgaggtttttaccgggaacgtctttgccacaagaagtgtagcctcctcttcttcttggacagcatgtgcttgctccttcttgtgccttgacggacactctcgcgcccaatgtcccatcttgccacaccttctgcactcatcaccagtgacctttccagccggtggtccacctgatgagcgccctcctctgccacgactgcgaccacggccccgaccacgcccacggtatcctccatcatggcgccctgatcttccacccgagctgctgccaggatggtgctcgacttccttcttgcgccgggcattccactcttcttccgtgaggtagagtcgaccactgtgctgcagtgatcctggggcctcctcaaaggcgtcctccgctgctctcaacctccccaccatgtcagacacagtgagggttgacaggtcgaggagagtcatgatggagaggacgatttgcttgaagcgtggtggaacgctgcgagcaattttctccacgatcttctcttcttccacgccagctccaagagtggagagttccgctgccatgccatttaggcgcagcgcgaaatcttcaacggactcaccgtcattaaacgttgccaagtcgaacttcctccgaagcagcacagcagcagtcttcatgcgatcatcgccaacccgtaggtctgcaatggtcttccacgcctcctttgccgtggacttgtctgcgatcgaagacaccatctctggtggcagtgcgctgcagagagcgtcgagtgccatcatttcttcatggatgtctgctcctccgtgctcgatgatgtcccacaacatcctcgccctcagcttcaccttcatcaggagcgcccagtccgagtaattggtcttggtgagtgtgggatatccactccctgcactcacctcacgaattactcgctggaccactgctccatctttggaggtgtcgtcgctggacttcctgaatgtcgcactgctatcaacagttttcgacatcttgctcctccttggctctgataccacttgttggaaactgcgccggagagacaaccctgcaggttgccggcgagttcctacctcccaggtaagttcttcaggtatgagaaaacctcccagggactcacacgcacacgatttggagaggaacacagcagatttggtggcgtcctattgactgccttttcttagcctctaaggccatatatttatagactttcataaggaaacaaactagctattacaaggtaataatccggactgctatcagtcctgatcttgctgattggatccgtccatataagactgatccactaccatactagctatttcctaaaacagaataagtaaactagcaccaatcaaggattactttcctaacagcctctacatgttgatagtttaattttcattcagcaagaagcagaaacttggaagtgcttgggcggcgcaatgttcctgtagaccttgtgtataaatttgctccagatttgatcatgttagatgcttatgagactgttgaatcatggatgatggcgagaaacaggttgaatccagggaaactcataccagcaatgatgcgttatgtgagcgaaccacatgcaaagaatgaaacacatgaagttatcaaatacttggaattttgtgtgaaagatttgaacaatgtggaccctggagtgcataatctgttgctatctctatatgccaagaaggaggatgaatcccagcttttgcaatttctcgacacaaaatttggtaaaggacaaacaaatggccctgacttcttttacgatccaaagtatgctctccgcctatgtcttcaagagaagagaatgcgtgcttgtgttcgtatttatagcatgatgtccatgcatgcggaagctgtggcacttgctttgaaggtggatttggaacttgcaaaggcagaagctgacaaagtagaagacgatgaagagcttaggaagaagctgtggcttaaggttgctaaacatgtcatcgagcaagagaaaggtgtcaagagagagaatataaagaaagcaatagaattcctttcggagaccaataacttgttaaagattgaggatatcttaccattcttcccagacttcgtattgattgacgatttcaaagaggaaatatgcaaatctctgaaggactacaacagccagattgagcagctcaagcaggagatggatgatgccacacgtggggcagataatatcagaagtgatattggtgccctcgctcagagatatacagtaattgaccgtgagcaggattgtggggtttgccggcgcaaaatattgactgttggagggttgcaccaggtagggagaagctatacatctgttggacacatggcccccttttatgtgtttccctgtggacatgccttccatgcaaattgcttgattggacatgtgactcgttgcagtaaccaggtgcaagctgagagaatattggaccttcagaaacggcttagcttgatggacaggaaagcagcaaaagacaatggggcaagtgttaatggcgaacctattacgagcacaaccccagttgataagctgagatcacagttggatgatgctgtagcaagcgagtgccccttctgcggtgatttgatgatcaaggagatttcacagccgttcattctcccccaagagtcggatgaaaaggcatcatgggaaatcaaacctcaaccaacgcctcaaaagattctcccgatgaccatgtctatttgatgctacggacagtacagcctaagatggatttggttttaaatttttatattgtttttgacttttgacactccttttgaccatgttttaatcctttttatgttgtggtatatggtattcaatatcctactgctgttgggttatcttgttttatatttacctaacttgtaaccctagaacaatgtagtcatcaatcgcttaccttgtggttgtggttcttgtattggatgcatcgtgttggaacatctcggtacacttgttatttgggattgtttttttttctgaagtcttgctccgg

SEQ ID NO: 4504 - DNA, 3879 bp, Zea mays
  Clone ID: TF_ZM3615.C3.o3.fg
atgtctactcaacgggaccatgtggatcctatcctcgaggatattcccgtcacatcctccggtgaggaagtggaccccaaggtcctcgacctcgccatgaagattgccgagaggatgttcctcaagatgaaagaggaagatgctaagaaaaaggccgaagaagaagaatcaagaagaaaggccgaagaagacaaatgtaaaggaaaatttgattacaatgacgacctagtggatcttttggtgtcgaaggtgttgagcaaggtatgtataagcccgcccaaggagaagagtccagaaatgatgcaagaggttcatcgcaatgctcaagcagtgagcataattaaaggaagtctttgttcggaagaataccggaaagttcaaggaagagaagatgcccgtgacatttggaacattcttaaaatgtcacatgaaggagatcccaaagctaagagacatagagttgaagcttttgagagtgagcttgctagatatgattggatcaagggtgagtcgcttcaatcactctttgatcgattgatggtgttagtaaacaagataagagtacttggaagtgaagattggagtgactccaaggtcacaagactattcatgagagcatacaaagaaaaggataagagtctagcaaggatgataagggatcgtgatgactatgaggatatgacgcctcatcaattatttgcaaagattcaacaacacgagtccgaagaagcccccatcaagacaagagactctcatgccttgatcacaaatgaacaagacacccccaagaagaacaaagaccacaaggcaaagaaagtggtcgagacgtcaagtgatgaagatagctcaagtgatgaagacacaactatgttcatcaaaacattcaagaaatttgtaaggaaaaatgacaagtttcaaaggaaaggaaagaagagggcatgctatgaatgtggccaaaccggtcatttcatagcggattgtcctaacaaaaaggaacaagaagccaagaaggaatacaagaaggacaagttcaaaaagggaggcaagaccaagggacatttcaagaagaagaaatatggtcaagcccaaattggtgaagaatggaactccgatgaagagagttctagctccgaagaagaggaagtggtggcaaacgttgccatccaatctacttcaagctcgcaactcttcaccaacctacaagacgactactacactccaacttgcctcatggcaaaaggagataaggatgcacttgaatcaagcatattaagcttgaatgtccaaaatcaagagcttcaattgcaacttgaaaattgcaagaacatcaatgcttcatctttattgattgaatctaagtctagctcctcaaataataccttttgcaaacattgtgccaaatgtcatgcttcttgttgtctaactaaccatgcaaggaagaagagcccacaggtgaaagtcaaagaaatattgaaaagatgctctagcaatgatgggttaaagaaaattgaacccaagtacaagtccctaaagcccaacaatggaagaagggggcttgggttcaactcatccaaggaaaaccctagcacagtgcataaggggtggagatcccccaagttcatagagggaaccaccctatatgatgccttggggaggattcactcctcaaatgacaagtcaactcaagtaaaggtctactcctctggtgggtcaagttgggtgcttgacagtggatgcacaaatcacatgaccggggaggaagacatgttccattccttgcaactaactcaagaagcacaagaaattgtgtttggagatagtggcaagagtaagatccttagaagggaggattcctctgttgcctttacaggtcgcttgaagggcaaactctatcttgttgatttcacaacaagtagagtgacgcctgagacttgtttagtggcaaaatctgacaggggttggctttggcgtcgccggctagctcatgttggcatgaggaacttggccaaacttcaaaaggatggtcacattattggactaacaaatgttgtgtttgagaaagatagggtttgtggcgcatgccaagtagggaagcaacatggagtcccacatcaatcaaagaatgtggttacaacaaaaaagccattggagcttcttcacatggacctcttcggacctatggcttacatcagcattggtggtagtaagtatggtttagtcattgttgatgatttttctcgtttcacctgggttttctttttaagtgataaaggtgaaactcaagaaacattgaagaaattcatgagaagagctcaaaatgagtttgaggtcaaaatcaagaaagtgaggagtgataatgggacggaattcaagaacacaggtgttgaagaattcttaggtgaagaaggaatcaaacatgagttctcggttccttacactctacaacaaaatggtgtcgtggaaagaaagaaccgaactctaattgaagcagctagaactatgttagatgagtacaagacacctgacaacttttgggcagaggcggtcaacaccacctgtcatgcaatcaaccgtctctatcttcataagatctacaagaagactgcttatgaacttctcactggtaacaaacctaaaattgattattttagagtatttgattgtaagtgttttattcttaacaagaaagtcaagagctcaaagtttgctcctagagtggacgagggtttcttgcttggttatgcatcaaatgcgcatgaatatcgtgttttcaacaataccaccggtcttgttgaaatagcgatagacgtgacatttgatgagtctaatggctcgcaagggcacgtttctaatggcactgcaggaaatgaagaaccaccttgtgaggccataaagagacttgcaataggtgaggtgagacctcaagagaaggatgatgatgaaggaactttatggatgaccaatgaggtttttgatgtgggtgcaaaggtggtgggtgacaaatcctccacccaagcaaacccatcaacctcaagtcatccaaatcttgaagaaaatcatcaaccccaaaggatgccaacggtggtagaagatgaacatgaaagtattgatggtgtagtggctcttgatcaagtagatgatgaggaggaacaaattcaaagacaaccatcagtgcctcatcctcgagttcatcacactattcaaagagatcatccggtggacaacatcctgggtagcatcaggagaggggtaacaactcgatctcgtttagcaaatttttgtgaattttactcgtttgtttcctctcttgagccacttaaggttgaagaagcgctgggtgatccggattggataattgccatgcaagaggaattgaacaacttcactcggaatgaagtctggtccttggttccaagacccaagcaaaatgtgattgggacaaaatgggtcttttggaacaaacaagatgagcatggcgtggttacaagaaataaagcacggttggttgcccaaggctacgctcaagtggaaggacttgattttggtgaaacatatgcaccggtagcaaggttagagtcaattagaatattaattgcctatgctactaaccatgatttcaagttatatcaaatggacgtcaagagtgcgtttctaaatggtccactacaagagagggtctatgtggagcaaccaccgggctttgaagacccaaggaagccaaatcatgtctatctacttcacaaggcactctacgggcttaaacaagcccctagagcttggtatgattgccttaaagattttttaattaagaatgggtttacaatagtgtcggggaccataattaggggtaccctcaagactcctaatctcagctggtaa

SEQ ID NO: 4505 - DNA, 3831 bp, Zea mays
  Clone ID: TF_ZM3973.C7.o2.fg
atgtctacacaacgggaccatgtggatcctctcctcgaggaaatccccgtcacatcttctggtgaggaagtggaccccaaggtcctcgacctcgccatgaagattgccgagaaaatgttcctcaaaatgaaagaggaagatgctaggaaaaaggccgaagaagaggaatcaagaagaaaggccgaagaagataaatgtaagggaacatttgattataatgacgatctagtggatcttttggtgtctaaggtattgagcaaggtaagtctcaacaccaaaggatcatctaccaaaagcagaggtaatgactttagcaaagttcaattcgattactctagaaattatattcccaacttctcttccgccccacttgggaagttaccaactcttagtgagttgaactatgaagagtgggccgacaagatgaagtcgcatttaatcggtgtgcatcctagtctttgggagattgttcatgtaggtatgtataagcccgcccaaggagaagagatgaccccgaaaatgatgcaagaggttcatcgaaatgctcaagcagtgagcataattaaaggaagtctttgtccagaagaataccggaaagttcaaggaagagaagatgctcgtgacatttggaatattcttagaatgtcacatgaaggagatcccaaagctaaaagacatagagttgaagctttggaaagtgagcttgcaagatatgattggacaaagggtgagtcgctccaatcactctttgatcgattgatggtattggtcaacaaaataagagttcttgggagtgaagattggagtgactccaaggtcacaagattgttcatgagagcttataaagagaaggataaaagtcttgcaaggatgataagggatcgtgatgattatgaggacatgacgcctcatcaattatttgcaaaaattcaacaacacgagtccgaagaagcccccatcaagacaagagactctcatgccttgatcacaaatgaacaagacaatctcaagaagagcaaagaccacaacgcaaagaaagtggtcgagacctcaagtgatgaagatagctcaagtgatgaagacacagctatgttcatcaaaactttcaagaaatttgtaaggaagaatgacaagttccaaaggaaaggaaagaagagggcatgctatgaatgtggccaaaccggtcatttcatagcggattgtcctaacaagaaggaacaagaagccaagaaggaatacaagaaggataagttcaaaaggggaggcaagaccaagggatacttcaagaagaagaagtatggacaagctcatattggtgaagaatggaactccgatgatgagagttctagctccgaggaagaggaagtggtggcaaatgtggccatccaatctacatcaagcgcgcaactcttcaccaaccttcaagatgactcctacactccaacttgcctcatggcaaagggagataaggtaactttatttagtaatgatttttcaaatgatgatgatgatgatcaaattgccatgaaaaataaaatgattaaagaatttggcttaaatggatacaatgttatcacaaaattaatggaaaagctagataaaagaaaagcaactcttgatgctcaagaagacttgcttgtccttgaaaaggaaagaaacctagagcttcaagagttgattcacaataaagataaagaagtaattaacatgaaaacctctattgataatcttgcaaatgaaaagaatgcacttgaatcaagcatgttaagcttgaatattcaaaatcaagaacttcaagtgcaacttgaaaactgcaagaatatcaatgcctcatgtttagttcttgaatctaagtctagattaaatgataattcttgcaaacattgtgccaagtatcatgcttcttgttgtctaactaaccatgcaaggaagaatagcccacaggtgaaggtcaaagagatttttaaaagatgctctagcaatgatgggttaaagaaagttgaacccaagtacaagtcccttaagcccaacaatggaagaagggggcttgggttcaactcatccaaggaaaaccctagcacagtgcataaggggtggagatcccccaagttcatagagggaaccaccctatatgatgccttggggaggattcactcctcaaatgacaagtcacctcaggtctactcctctggtgggtcaagttgggtgcttgacagtggatgtacaaatcacatgaccggggagaaagacatgtttcatacattgcaactaactcaagaagcacaagaaattgtgtttggagatagtggcaagagtaaggtgattggtattggtaaaattcctatctctgaccaacaatcactttcaaatgttttattagtagattccttaagctataatttgttgtccgtttcacaactttgtggaatgggttataattgcttattttcggatgtggatgtgaagatccttagaagggaggactcctcagttgcctttaccggtcgcttgaagggcaagctttatcttgttgatttcacaacaagtaaagtgacgcctgagacttgtttagtggcaaaatccgacaagggttggctatggcatcgccggctagcccatgtcggtatgaggaatttggccaaacttcaaaaggataatcacatcattggactaacaaatgttgtatttgagaaagatagggtttgtggcgcatgccaagcaggaaagcaacatggagtcccacatcaatcaaagaatgtggtcacaacaaagaggccattggagcttcttcacatggacctcttcggacatgtggcctacattagcattggtggtagtaagtatggtttagttattgttgatgatttttctcgattcacttgggttttctttttgagtgacaaaggtgaaactcaagaaattttaaagaaattcatgaggagagctcaaaatgaatttgagctcaaaatcaagaaagtgagaagcgataatgggacggaattcaagaacacaggtgtcgaagaattcttaggagaagagggaatcaaacatgagttctcggtgccttacactccacaacaaaatggtgttgtggaaagaaagaaccgaactctaattgaagctgcaagaaccatgttggatgaatacaagacacctgacaacttctgggcagaggcggtcaacaccgcctgtcatgcaatcaaccgtctctatcttcataagatctacaaaaagactgcttatgagcttctcactggtaacaaacctaaagttgattattttagagtattcggttgtaaatgttttattcttaacaagaaagtcaagagctcaaagtttgcttctagagtggacgagggcttcttgcttggttatgcatcaaatgctcatggatatcgtgttttcaacaattccaccggtcttgttgaaatagcgatagacgtgacatttgatgagtctaatggctcgcaagggcatgtttctaatgacactgcaggaaatgaagaactaccttgtgacgccataaagaaacttgccataggagaagtgagacctcaagaaagggatgatgaagaaggaaccttgtggatgaccaatgaggtagttgatgtgggtgcaagggtggtgagtgacaatgtctccacccaagcaaacccatcaacctcaagtcatccaagcctcgaacaaaatcatcaaaggatgccaacagtggtagaagatgaacaagaaaatattgatggtgaagtgcctcttgatcaaataactgatgaggaagagcaaatacaaagacatccatcagtgcctcatccaagagtccatcatacaatttaa

SEQ ID NO: 4506 - DNA, 4512 bp, Zea mays
  Clone ID: TF_ZM4272.C4.o2.fg
atgtctactcaacgggaccatgtggatcctctcctcgaggaaatccccatcacatcttccggtgaggaagtggaccccaagtttctcgacctcgccatgaagattgccgagaagatgttcctcaaaatgaaagaggaagatgctaataaaaaggtgttgagcaaggtaagtctcaacaccgaaggatcatctaccaaaagcaaaggtaacgaatttagtaaagttcaattcgattactctagaaattttattcccaacttctcttctgccccacttggaaagttaccaactcttagtgagttgaactatgacgagtgggccgacaagatgaagtcacatttaatcgatgtgcatcctagtctttgggagattgttaatgtaggtatgtataagcccgcccaaggagaagagatgactccggaaatgatgcaagaggttcatcgcaatgctcaagcagtgagcataattaaaggaagtctttgtccggaagaataccggaaagtacaaggaagagaagatgcccgtgacatttggaatattcttaaaatgtcacatgaaggagatcccaaagctaagagacatagagttgaagctttggagagtgagcttgctagatatgattggactaagggtgagccgcttcaatcactctttgatcggttgatggtgttagtaaacaaaataagagtgcttggaagtgaagattggagtgactccaaggtcacaagactattcatgagagcatataaagaaaaggataagagtctagcatggatgataagggatcgtgatgactatgaggatatgacgtctcatcaattatttgcaaagattcaacaacacgagttcaaagaagcccccatcaagacaagagactctcataccttgatcactaatgaacaagacacccccaagaagaacaaagaccacaaggcaaagaaagtgaaatttgtaaggaaaaatgataagtttcaaaggaaaggaaagaagagggcatgctatgaatgtggccaaaccggtcatttcatagcggattgtcctaacaagaaggaacaagaagccaagaaggaatacaagaaggacaagttcaaaaagggaggcaagaccaagggatatttcaagaagaagaaatatggtcaagcccatattggtgaagaatggaactccgatgaagagagttctagctctgaggaagaggaagtggtggcaaatgttgccatccaatctacttcaagctcgcaactgttcaccaacctacaagacgactcctacactccaacttgcctcatggcaaaaggagataaggtaaccttatttagtaatgattttccaaatgatgatgatgatgaacaaattgccatgaaaaataaaatgattaaagaatttggcttgaatggatacaatgttatcaccaaattaatggagaagctagataaaagaaaagcaactcttgatgctcaagaagacttgcttatccttgaaaaggaaagaaacctagagcttcaagaattgctactcaataaagatgaaatgctagatgtcttgactaaggaagatgcacttgaatcaagcatgttaagcttgaatgttcaaaataaagaacttcaagtgcaacttgaaaattgcaagaacatcaatgcctcatctttagtgattgaatctaagtctagctcctcaaacaataccttttgcaaacattgtgccaaatatcatgcttcttgttgtctaactaaccatgcaaggaagaatagcccacaggtgaaggtcaaagaaatattgaaaagatgctttagcaatgatgggttaaagaaagttgaacccaagtacaagtccctaaagcccaacaatggaagaagggggcttgggttcaactcatccaaggaaaaccctagcacagtgcataaggggtggagatcccccaagttcatagagggaaccactctatatgatgccttggggaggattcactcctcaaatgacaagtcaactcaagtaaaggtctactcctctggtgggtcaagttgggtgcttgacagtggatgtacaaatcacatgaccggggaggaagacatgtttcattccttgcaactaactcaagaagcacaagaaattgtgtttggagatagtggcaagagtaagatgattggtattggtaaaattcctatctctgaccaacaatcactttcaaatattttattggtagattctttaagctacaatttgatgtccgtttcacaactttgtggaatgggttataattgcttattttttgatgtggatgtgaagatccttagaagggaggactcctcagttgcctttacgggtcgcttgaagggcaagctttatcttgttgatttcacaacaagtaaagtgacgcctgagacttgtttagtggcaaagtccgacaagggttggctatggcatcgccggctagctcatgtcggtatgaggattttggccaaacttcaaaaggataatcacatcattggactaacaaatgttgtatttgagaaagatagggtttgtggcgcatgccaagcaggaaagcaacatggagtcccacatcaatcaaagaatgtggtcacaacaaagaggccattggagcttcttcacatggacctcttcggacctgtggcttacatcagcattggtggtagtgaaactcaagaaatattgaagaaattcatgagaagagctcaaaatgaatttgagctcaaaatcaagcaagtaagaagtgataatgggacggaattcaagaacacaggtgtcgaagaattcttaggcgaagaaggaatcaaacatgagttctcggttccttacactccacaacaaaatggtgttgtggaaagaaagaaccgaactttaattgaagcagctagaaccatgttggatgagtacaagacacctgacaacttttgggctgaggcggtcaacaccgcctgtcatgcaatcaaccgcctctatcttcacaagatctacaagaagactgcttatgagcttctcactggtaacaaacctaaagttgattattttagagtatttggttgtaagtgctttattcttaacaagaaagtcaaaagctcaaagtttgctcctagagtggacgagggtttcttgcttggttatgcatcaaatgcgcatggatatcgtgttttcaacaataccactggtcttgttgaaatagcgatagacgtgacatttgatgagtctaatggctcgcaagggcatgtttctaatggcactgcaggaaatgaagaactaccttgtgaggccataaagaaacttgcaataggtgaagtgagacctcaagaaaaagatgatgaggaaggaactttgtggatgaccaatgaggttgttgatgtgggtgcaaaggtggtgggtgacaaatcctccacccaagcaaacccatcaacctcaactcatccaagtcttgaagaaaatcatcaatcccaaaggatgccaactgtggtagaagatgaacacgaaagtgttaatggtgaagtgcctcttgatcaagtgaatgatgaggaggagcaaatacaaagacaagcatcagtgcctcatcctagagtccatcataccattcaaagggatcattcggtggacaacatcctgggtagcatcaggagaggggtaacaactcgatcttgtttagctaatttttgtgaattttactcgtttgtttcctctcttgagccacttaaggttgaagaagcattgggtgatccggattggataattgccatgcaagaggagttgaacaacttcacccggaatgaagtttggtccttagtccaaagacccaaacaaaatgtgattgggacaaaatgggtctttaggaacaaacaagatgaacatggcgtggttacaagaaacaaagcacggttggttgcccaaggctacactcaagtggaaggacttgattttggtgaaacatatgcgctggtagcaaggttagagtcaattagaatattaattgcctatgctactaaccatgatttcaagttatatcaaatggatgtcaagagcgcatttctaaatggaccactacaagagagggtctatgtggagcaaccaccgggctttgaagatccaaagaagccaaaccatgtttatctacttcacaaggcactctacgggcttaaacaagcccctagagcttgctcaaatacttcctgggatttcaagtcaaacaactcaaggaaggcacttttctatgccaaaccaaatatactcaagaagtttggcatggaaaaggcaaagcacgcgaagactccaatgtcatcaaatggacatctcgacctaaatgaggaagattatgccggttgcaaagtagatcgaaaaagcactactgggacttgccaattccttgggcggtccttagtgtcatggagttccaagaaacaaaattgtgttgcactttccactgcagaagctgagtacatagcagctggggcatgttgtgcacagttgttatggatgaagcaaaaccttagagattttggttgttag

SEQ ID NO: 4507 - DNA, 4710 bp, Zea mays
  Clone ID: TF_ZM4333.C6.o1.fg
atgtctacacaacgggaccatgtggatcctctcctcgaggaaatccccgtcacatcttccggtgaggaagtggaccccaaggtcctcgacctcgccatgaagattgccgagagaatgttcctcaaaatgaaagaggaagatgctaagaaaaaggccgaagaagaagaatcaagaagaaaggccgaagaagataaaggtaagggaacatttgattacaatgacgatctagtggatcttttggtgtctaaggtattgagcaaggtaagtctcaacaccgaaggatcatctaccaaaagcaaaggtaacgaatttagcaaagttcaattcgattactctagaaattatattcccaacttctcttccgccccacttggaaagttaccaactcttagtgagttgaactatgacgagtgggccgacaagatgaagtcgcatttaatcggtgtgcatcctagtctttgggagattgttaatgtaggtatgtataagcccgcccaaggagaagagatgactccggaaatgatgcaagaggttcatcgcaatgctcaagcagtgagcataattaaaggaagtctttgtccggaagaataccggaaagttcaaggaagagaagatgcccgtgacatttggaatattcttaaaatgtcacatgaaggagatcccaaagctaagagacatagagttgaagctttggaaagtgagcttgcaagatatgattggacaaagggtgagtcgcttcaatcactctttgatcagttgatggtgttggtcaacaaaataagagtacttgggagtgaagattggagtgactccaaggtcacaagattgttcatgagagcttataaagaaaaggataagagtcttgcaaggatgataagggatcgtgatgactatgaggatatgacgcctcatcaattatttgcaaaaattcaacaacacgagtccgaagaagcccccatcaagataagagactctcatgccttgatcacaaatgaacaatacaaccccaagaagaacaaagatcacaaagcaaagaaagtggtcgagacctcaagtgatgaagatagctcaagtgatgaagacacaactatgttcatcaaaacattcaagaaatttgtaaggaagaatgacaagttccaaaggaaaggaaagaagagggcatgttatgaatgtggccaaaccggtcatttcatagcggattgtcctaacaagaaggaacaagaagccaagaaggaatacaagaaggacaagtttaaaaagggaggcaagaccaagggatacttcaagaagaagaaatatggtcaagcccatattggtgaagaatggaactccgatgaagagagttctagctccgaggaagaggaagtggtggcaaatgtggccatccaatctacatcaagcgcgcaactcttcaccaacctacaagacgactcctacactccaacttgcctcatggcaaagggagataagaatgttatcaccaaattaatggagaagctagataaaagaaaagcaactcttgatgctcaagaagacttgcttatccttgaaaaggaaagaaacctagagcttcaagagttgattcacaataaagatgaaatgctagatgtcttgactaaggaagtctctttagtcaagataactatagagaataaagataaagaagtaattaatatgaaaacctctatagctaatcttgcaaatgaaaagaatgcacttgaaacaagcatgttaagcttgaatgttcaaaatcaagaacttcaagtgcaacttgaaaattgcaagaacatcaatgcctcatctttagtaattgaatctaagtctagctcctcaaatgataattcttgcaaacattgtgccaaatatcatgcttcttgttgtctaactaaccatgcaaggaagaatagcccacaggtgaaggtcaaaggaattttgaaaagatgctctagcaatgatgggttaaagaaagttgaacccaagtacaagtccctaaagcccaacaatggaagaagggggcttgggttcaactcatccaaggaaaaccctagcacagtgcataagggatggagatcccccaagttcatagagggaaccaccctatatgatgccttggggaggattcactcctcaaatgacaagtcacctcaagttaaggtctactcctctggtgggtcaagttgggtgcttgacagtggatgtacaaatcacatgaccggggaggaagacatgtttcattcattgcaactaactcaagaagcacaagaaattgtgtttggagatagtggcaagagtaaggtgattggtattggtaaaattcctatctctgaccaacaatcactttcaaatgttttattggtagattctttaagctataatttgttgtccgtttcacaactttgtggaatgggttataattgtttattctctgatgtggatgtaaagatccttagaagggaggactcctcagttgcctttacgggtcgcttgaagggaaaactttatcttgttgatttcacaacaagtaaagtaacgcctgagacttgtttagtggcaaagtccgacaagggttggctatggcatcgccggctagcccatgtcggtatgaggaatttggccaaacttcaaaaggataatcacatcattggactaacaaatgttgtatttgagaaagatagggtttgtggcgcatgccaagcaggaaagcaacatggagtcccacatcaatcaaagaatgtggtcacaacaaagaggccattggagctccttcacatggacctcttcggacctgtggcttacattagcattggtggtagtaagtatggtttagtcattgttgatgatttttctcgattcacctgggttttctttttgagtgataaaggtgaaactcaaggaatattgaagaaattcatgagaagagctcaaaatgagtttgagctcaaaatcaagaaagtgagaagtgataatgggacagaattcaagaacacaggtgtcgaagaattcttaggcgaagaaggaatcaaacatgagttctcggttccttacactccacaacaaaatggtgttgtggaaagaaagaaccgaactttaattgaagcagctagaaccatgttggatgagtacaagacacctcacaacttttgggcagaggcggtcaacaccgcctgtcttgcaatcaaccgtctctatcttcacaagatctacaaaaagactgcttatgagcttctcactggtaacaaacctaaagttgattattttagagtatttggttgtaagtgttttattcttaacaagaaagtcaagagctcaaagtttgctcctagagtggacgagggcttcttgcttggttatgcatcaaatgcgcatggatatcgtgttttcaacaataccaccggtcttgttgaaatagcgatagacgtgacatttgatgagtctaatggctcgcaagggcatgtttctaatgacactgcaggaaatgaagaactaccttgtgaggccataaagaaacttgcaataggtgaagtgagacctcaagaaaaggatgatgaggaaggaactttctggatgatcaatgaggttgttgatgtgggtgcaaaggtggtgagtgacaaagtctccacccaagcaaacccatcaacctcaagtcatccaagccatgaagaaaatcatcaaaggatgccaacagtggtagaagatgaacacgaaagtattgatggtgaagtgcctcttgatcaagtgaatgatgaggaagagcaaatacaaagacaaccatcagtgcctcatcctagagtccatcatacaattcaaagggatcatctggtggacaacatcctgggtagcatcaggagaggggtaacaactcgatctcgtttagctaatttttgtgaattttactcgtttgtttcctctcttgagccacttaaggttgaagaagcattgggtgatccgtattggataattgccatgcaagaggagttgaacaacttcacccggaatgaagtctggtccttagtccaaaaacccaaacaaaatgtgattgggactaaatgggtctttaggaacaaacaagatgaacatggcatggttacaagaaacaaagcacggttggttgcccaaggctacactcaagtggaaggacttgattttggtgaaacatatgcgccggtagcaaggttagaatcaattagaatattaattgcctatgctactaaccatgatttcaagctatatcaaatggatgtcaagagcgcatttctaaatggaccactacaagagagggtatacgtggagcaaccaccgggttttgaagatccaaagaagccaaatcatgtttatctacttcacaaggcactctacgggcttaaacaagcccctagagcttggtatgactgtcttaaagattttttaattaagaatgggtttacaataggaaaagctgactctacattatttactcgcaaagttgacaatgaattatttgtgtgccaaatatatgttgatgacattatatttggtagtactaatgaaaatttttgtgaagagtttagcaaagtaatgacgaacaggtttgggatgtctatgatgggcgagcttaaatacttcctgggatttcaagtcaaacagctcaaggaaggtacttttctatgccaaaccaaatatacacaagatatgctcaagaagtttggcatggaaaaagcaaaacacgcctga

SEQ ID NO: 4508 - DNA, 1314 bp, Zea mays
  Clone ID: TF_ZM4642.C3.o3.fg
atgtggatcctctcctcgaggaaatccccgtcacatcttccggagaggaagtggaccccaaggtcctcgaccgacgacctcgccatgaagattgccgagagaatgttcctcaaaatgaaagaggaagatgctaagaaaaaggccgaagaagaagaatcaagaagaaaggccgaagaagataaaggtaagggaacatttgattataatgacgatctagtggatcttttggtgtctaaggtattgagcaaggtaagtctcaacaccaaaggatcatctaccaaaagcaaaggtaatgactttagcaaagttcaattcgattactctagaaattatattcccaacttctcttccgccccacttggaaagttaccaactcttagtgagttgaactatgatgagtgggtcgacaagatgaagtcgcatttaatcggtgtgcatcctagtctttgggagattgttaatgtaggtatgtataagcccgcccaaggagaagagatgactccggaaatgatgcaagaggttcatcgaaatgctcaagcagtgagcataattaaaggaagtctttgtccagaagaataccggaaagttcaaggaagagaagatgcctgtgacatttggaatattcttaaaatgtcacatgaaggagatcccaaagctaaaagacatagagttgaagctttggaaagtgagcttgcaagatatgattggacaaagggtgagtcgctccaatcactctttgatcggttgatggtattggtcaacaaaataagagttcttgggagtgaagattggagtgactccaaggtcacaagattgttcatgagagcttataaagagaaggataaaagtcttgcaaggatgataagggatcgtgatgactatgaggatatgacgcctcatcaattatttgcaaaaattcaacaacacgagtccgaagaagcccccatcaagacaagagactctcatgccttgatcacaaatgaacaagataatctcaagaaaagcaaagaccacaaagcaaagaaagtggtcgagacctcaagtgatgaagatagctcaagtgatgaagacacagctatgttcatcaaaactttcaagaaatttgtaaggaagaatgacaagttccaaaggaaaggaaagaagagggcatgctatgaatgtggccaaaccggtcatttcatagcggattgtcctaacaagaaggaacaagaagccaagaaggaatacaagaatgacaagtttaaaaagggaggcaagaccaagggatacttcaagaagaagaagtatggtcaagctcatattggtgaagaatga

SEQ ID NO: 4509 - DNA, 5790 bp, Zea mays
  Clone ID: TF_ZM4678.C6.o7.fg
atgtctactcaacgggaccatgtggatcctatcctcgaggatattcccgtcacatcctccggtgaggaagtggaccccaaggtcctcgacctcgccatgaagattgccgagaggatgttcctcaagatgaaagaggaagatgctaagaaaaaggccgaagaagaagaatcaagaagaaaggccgaagaagacaaaggtaaaggaaaatttgattacaatgatgacctagtggattttttggtgtcaaaggtgttgagcaaggtaagtctcaacaccgaagaatcatctaccaaaagcaaaggtaacgagtttagtaaagttcaattcgattactctagaaattttattcccaacttctcttccgccccacttggaaagttaccaactcttagtgagttgaactatgacgagtgggccgataagatgaagtcgcatttaatcggtgtacatcctagtctttgggagattgttaatgtaggtatgtataagcccgcccaaggagaagagatgactccggaaatgatgcaagaggttcatcgcaatgctcaagcagtgagcataattaaaggaagtctttgtccggaagaataccggaaagttcaaggaagagatgatgcccgtgacatttggaacattcttaaaatgtcacatgaaggagatcccaaagctaagagacatagagttgaagctttggagagtgagcttgctagatatgattggatcaagggtgagtcgcttcaatcactctttgatcgattgatggtgttagtaaacaagataagagtacttggaagtgaagattggagtgactccaaggtcacaagattgttcatgagagcttataaagaaaaggataagagtcttgcaaggatgatcagggatcgtgatgactatgaggatatgacgcctcatcaattatttgcaaagattcaacaacacgagtccgaagaagcccctatcaagtcaagggactctcatgccttgatcactaatgaacaagacaaccccaagaagaacaaagaccacaaagcaaagaaagtggtcgagacctcaagtgatgaagatagctcaagtgatgaagacacaactatgttcatcaaaacattcaagaaatttgtaagtaaaaatgacaagtttcaaaggaaaggaaagaagagggcatgctatgaatgtggccaaaccggtcatttcatagcggattgtcctaacaagaaggaacaagaagctaagaaggaatacaagaaggacaagttcaaaaaggggggcaagaccaagggacacttcaagaagaagaaatatggtcaagcccatattggtgaagaatggaactccgatgaagagagttctagctccgaggaagaggaagtggaatttggcttgaatggatataatgttatcataaaattgatggagaagctagataaaagaaaagcaactcttgatgctcaagaagacttgcttatccttgaaaaggaaagaaacctagagcttcaaggattgctactcaataaagatgaaatgctagatgccttgactaaggaagtatctttagtcaagataactatagaggataaagaaaaggaagtaatcaatatgaaaacctctatagctagtcttgcaaatgaaaaggatgcacttgaatcaagcatattaagcttgaatgtccacaatcaagaacttcaagtgcaacttgaaaattgcaagaacatcaaagcttcatctttattgattgaatctaagtctatctcctcaaataataccttttgcaaacattgtgccaaatatcatgcttcttgttgtctaactaaccatgcaaggaaaaagagcccacaggtgaaggttaaagaaatattgaaaagatgctctagcaatgatgggttaaagaaaattgaacccaagtacaagtccctaaagcccaacaatggaagaagggggcttgggttcaactcatccaaggaaaaccctagcatagtgcataaggggtggagatcccccaagttcatagagggaaccaccctatatgatgccttggggaggattcactcctcaaatgacaagtcacctcaggtctactcctctggtgggtcaagttgggtgcttgacagtggatgtacaaatcacatgaccggggagaaagacatgtttcatacattgcaactaactcaagaagcacaagaaattgtgtttggagatagtggcaaaagtaaggtgattggtattggtaaaattcctatctcagaccaacaatcactttcaaatgttttattagtagattctttaagctataatttgttgtccgtttcacaactttgtggaatgggttataattgcctattttcggatgtggatgtgaagatccttagaagggaggactcctcagttgcctttaccggtcgcttgaagggcaagctttatcttgttgatttcacaacaagtaaagtgacgcctgagacttgtttagtggcaaagtccgacaatggttggctttggcatcgccggctagcccatgtcggtatgaggaatttggccaaacttcaaaaggataatcacatcattggactaacaaatgttgtatttgagaaagatagggtttgtggcgcatgccaagcaggaaagcaacatggagtcccacatcaatcaaagaatgtggtcacaacaaagaggccattggagcttcttcacatggacctcttcggacctgtggcctacattagcattggtggtagtaagtatggtttagtcattgttgatgatttttctcgattcacctgggttttctttttgagtgacaaaggtgaaaatcaagaaattttgaagaaattcatgaggagagctcaaaatgaatttgagctcaaaatcaagaaagtgagaagcgataatgggacggaattcaaaaacacaggtgtcgaagaattcttaggagaagagggaatcaaacatgagttctcggtgccttacactccacaacaaaatggtgttgtggaaagaaagaaccgaactctaattgaagctgcaagaaccatgttggatgagtacaagacacctgacaacttttgggcagaggcggtcaacaccgcctgtcatgcaatcaaccgtctctatcttcataagatctacaaaaagactgcttatgagcttctcactggtaacaaaccaaaagttgattattttagagtatttggttgtaagtgttttattcttaacaagaaagtcaagagctcaaagtttgctcctagagtggacgagggcttcttgcttgggtatgcatcaaatgcgcatggatatcgtgttttcaacaataccaccggtcttgttgaaatagcgatagacgtgacatttgatgagtctaatggctcgcaagggcatgtttctaatgacactgcaggaaatgaagaaccaccttgtgaggccataaagaaacttgcaataggtgaggtgagacctcaagaaagggattttgaagaaggaaccttatggatgaccaatgagatagttgatgtgggtgcaagggtggtgagtgacaaagtctccacccaagcaaacccatcaacctcaagtcatccaagccacgaagaaaatcatcaaaggatgccaacagtggtagaagatgaacaagaaagtactgatggtgaagtgcctcttgatcaagtaattgatgaggaggagcaaatacaaagacatccatcaatgccgcatcctagagtccatcaatcaatacaaagggatcatccagtggacaacatcctgggtagcatcaggagagggccacttaaggttgaagaagcattgggtgatccggattggataattgccatgcaagaggagttgaacaacttcactaggaatgaagtctggtccttagtccaaagacccaaacaaaatgtgattgggactaaatgggtctttaggaacaagcaagatgaacatggcgtggttacaagaaacaaggcacggttggttgcccaaggctatactcaagtggaaggactcgattttggtgaaacatatgcgccggtagcaaggttagaatcaattagaatattaattgcatatgctactaaccatgatttcaagctatatcaaatggatgtcaagagcgcatttctaaatggaccactacaagagagagtatatgtggagcaaccaccgggttttgaagatcaaaagaagccaaatcatgtttatcttcttcacaaggcactctacgggcttaaacaagcccctagagcttggtatgactgtcttaaagaatttttaattaagaatgggtttacaataggaaaagctgactctaccttatttactagaaaagttgacaatgaattatttgtgtgccaagtatatgttgatgacattatatttggtagtactaatgaaaaattttgtgaagagtttagcaaagtaatgacgaacaggtttgagatgtctatgatgggcgagcttaaatacttcctgggatttcaagtcaaacagctcaaggaaggtacttttctatgccaaaccaaatatacacaagatatgctcaagaaatttggcatggaaaaggcaaaacacgccaagactccaatgtcatcaaatggacatctcgacctaaatgaggaagaagctgagtacatagcagctggggcatgttgtgcacagttgttatggatgaagcaaacacttcgagattttggttgtctgtcacctgcaattttttcagtcgcgcaacacctttttgaccggtcgcagcagctgtgcatgcagaaactttttcctttgtcccggatgaccgttctcccgaagggcggaaatcaaatgaacgtccttggggagagtcgcgtcttcttcctcctccttgctccaaacagtcttgcccgcatcaatgtgtttgacatgatctgggaagagatcgtccgtgcttcctggtctcctctcaaagggtgtgttcatgcaccctttatcatgaagatgatcgaagtggtcacccagacccacttcgaaaaacctgtcaaacactcccgctacgtaccctactgggttgattcctccaacccagctgctcgtacgaagcgggctccctcacggtctggaggccctgcctcctccactgagccacctcgccagcctccccatcatccatcctcctctccccccgctgctgcctcgcgtccctctcctggccgcggatctcccatgccacgtgctcgtggtcgtggtcgaggtcgtggccgcgggatgggtgctcgcttggtccatggggttgcgacatttttctccatgtgccgcaacatttctgctgatgtccatgaagtggcacggcgtcagcgggagactgacgacaatcttcgttgtcaagcttcctccatgggcatgccttttgtccctcgttcgcctgatgtgcctctccatcctcctcccccggagatcaatgagtggcaccagcaggcctacggggtgccttttatgtctgcagacgatgaagatgaagaagtctatgttgatgatcgcgaggagtttgccccgcctccctaccatggggatccgggtcaatcatcctcccaccctccgcctccttacccgggtccgggacccattcctggtgaccctaggccatccggctctggttaccaccaccaccctccaccttctcctgatcatcgtacatcttcggcatctgttttttctgcggctgatgagccacctcgggactccacttttgaggaggacgcgatgaggacttttttccctgactacacttcatatcctccatcatatcctccgtcatatcctcctcctggaggatactga

SEQ ID NO: 4510 - DNA, 2259 bp, Zea mays
  Clone ID: TF_ZM4938.C1.o1.fg
atggatacccataggccaccacacttcgacggcactaacttcccatattatagtgctagaatggcttgttacctagaggccgttgatctaggtgtttggagagtcactcgtgacgggatgaaacccctcaagaatcccgagaaacccaccacgagtgaggaaaaagaaattcatttaaatgctagagccaaaaattgcttgtatgaatctcttagcatggatatttttaaccaagtatttaccctgaaaactgctaatgagatttggctaaaattgcatgagctccatgacggcacatccaatgtccgtgagcaaaaacattgcctagtcttaaatgagtataattcttttgctatgaaagatgatgagcttgttagagacatgtattctcgattgaatctaattatcaatgagctcaattctattggcattaataagctaggtgatgcggacattgtgaggaagattatctccctgctaccacaacaaagatatgggagcatcatcaccatccttcacaacatggaggatttgagcaacatgaccccgaccattgtgattgggaaaatcgcggcctttgagatgtcgcgaaaaatgagtcagggagaggagccaacttcctcaaagccatatgcttttgcatgtgatgaaaggaagggcaaaaagaaggctcccactccaagttcctcaagtgaagaagaggaagaagaagaaagtgacgatgatgaagataatcaaccatgcacatcatcctccgaggacgaagaaacaattcgatgcgtcggaaaggtaatgaggatgatccgcaagattaatctaatgggtgtgcccctgcaggtcgaggatcttctctttaatattgacaggaaaaggcaaaggaagagaggatgcttcacatgtggggagaagggccacttcagggacaactgtccaaatatggccaaacccaaaaaggtgaggagcaaaggcaaggcgctaacaagtgttacaacttgggatgattcttcaagtgaagatgaacctccaaggacgcgcagccaccggtcctcatcacgctcatcacggtcatcacacaaatgccttatggcaagaggtaacaaaagcattccatcctctagtgatgaaagtagtagtgatgatgaaggtgagggaaagccctctgtagatgagcttgcggaagccatagaatttttccaggatgtttgcactaagaaaaaagctcaacttaaaactttgaaaaataagttggttagctctcaaaatgattacaaaagtttgctagaaaaatttgaaacttttgcaaacttaaatagtgagctatcaactaaaattgagctattagaatctagtgcttcatccactgctaccgatgatagccttattaaaaagaatgaaaaacttaaggctaagttagctagctcccaagaagctattgaaaatttgctagagaaaatggaaattcttagcatacacaacaatgagctaactactaagctagaaaacattggtagcaccccagcagcatctttagttgaaatacctgaaataattaagaaagatgcttctacttcctgctttgatttaattgatgattctaacccctgcaaccaagtcgttgttgagaatattgttgtagagacatgtacggatgaggttgcaaaggaaaatgaacaattaaagcaagaagtggctcgccttggcaaggctttgtatgacaagaaaggcaaagccaaacaaatccaacctccacaggataacaccactgcgggagtgaacaagcctgtagagggagaaactgtgatttgtaggctatgccacatggaaggccacaagtctttccaatgcaaggcgatgaccggggataaacaaaggcaaaagctcaagccatcaagcaaaatctccaacacctacatcaaaaaggtgaacaaaaaggatgctacaccatatttgatcaagaagaaaaagaacggaaaggtgatagcaatccaggccaacaagcaagccaacaaaggaaagggggccaaacgcatctgggtgccaaaggagataatttcaaccatgaaaagcaccaagaaggtttggatcccgaaagggaagcgagtggaccgaaggtcctcgggaaatttggagacttggcaaagttgggatgtatatcatggggtacatcatattggattaagtttattgccaagtgggttagtgaaaactttggacccaaatttcccacccatgactaagatatacgtatctattatctag

SEQ ID NO: 4511 - DNA, 1242 bp, Zea mays
  Clone ID: TF_ZmC119_1158
ctattcttgttgttcattgacctcttcaccgactatttcctcttccactggctcttcttcttgaatttccagttcacctggttcagtttctacttctgcatgataggcttgtcctcggttgacagatatgggttgactctttcctgccgaggcctggccttgtttcattggagctggtgtagtgtaggcagccctgttgggacagtagttggcgtagtgtcccggttgtccacatttgaagcatgccctattggtggatgtgttggaagcaacaggtcctgcggaggtgcttgcttttggaggagcagttggtgcctgttgagtttgttgtccagaactgccactagctggtgtacttggagtggtagtatagcgaggacgggaactacttccagcctgcccttggttagcagcctttcttttctctccaaatatactcctcttgttttctacaacaatagctttgtcaagtagcctttggaaggatgggaatgtgtgcgataccagttgatattgcaagggtccaatcaaaccgtccagaaaaagctcctgcttttgctcatcatcctcaacatctctaggagcatatcgagataactggatgaatttgtccctatattcactcacggacatacttccttgcttgagggagagaaactcctttctcttaatcttcatgagtccagcaggaatatggtaattcctgaattgtgtggagaattctgcccaggtaattgtatcgacagcagcatgagcagcgcagtacgcatcccaccaatctgcagcaggaccagcgagacgacctgatgcgtagagtactttctctcggtccgagcactgagctatgttgagcatcttctctatagactttagccagtcatcagcttgtagtggatccgtggagttggagaaggttggtggtttgtggctcatgaattcccgatgcttatctcggggtggaactggtggtggaggtggaggcaatggcacctgttgctgttgctgctgttgttgaagttgttgttgcagctgctgttgttgcacccttctctcctggcgtatctcttcccgctcttggtgcatctcccgacgtgcatcctctctttcctggcgcatttcctggcgttcttgctgcatttgggcgcgcatatctgccatagtgtcagccatttgctgcatcatcctcatttgagctgcaatcagtgggtcaactccgcctggtggaggattaggaggattcat

SEQ ID NO: 4512 - DNA, 593 bp, Zea mays
  Clone ID: TF_ZmC483969_1
cgttgctctagattctttctcttcttggtttccccacatcaccattatattcatggttaatcttgatttgcttttggggattcttcttttgctcaactcgtgactttggttgaggcttcacttgtggattcactagtttcttggttgggcacattgaggtgaggtgaccccaagtgtggcacttgaagcactggtcatgctttagcctccattcttccttcttcaacttgagcttccttttattggggcatgcctttgcaagatgacccatctcatggcatttatagcacatgaagtgaaatatcttatttccttttaatttgaattgcccgcctttgatattgctcttgttgaaaccaaggccactcttgtcatcatatcttctttgatttttcattataagatcatgagtgacttctgatttatgccacctctcaaacatgttgcttaaattcttcactttgtttttgagcttattattttccttcaaaaggttagtctcacaagacaaggaagaataataataatctatagttgaagaacatggcatagctaataaatcatcacaataggtgggttacctgcccgggcgg

SEQ ID NO: 4513 - DNA, 3951 bp, Zea mays
  Clone ID: TF_ZmC4916_441
atggatcctaagggaaaggggatggtggtcgacaacaatgagaaggagtctatcttcaacgagccgaagaatgacaagtctaccgacttgggctcaagccacaagcgcaaagatgggaagaagaagaagacaaggcgcatcaaggagatcgtctactacgacagcgacgaatcctcttcttcccaaaaggatgatgacaacgactacaggaagacggtcaattcaaacttttcatttgattattctcgtattccacatagttcgaattcgcatttgctttccattcctcttggtaaacctccacactttgatggggaggactacggattttggagtcacaaaatgcgtagtcatttattctctctccatccaagcatatgggagattgtagagaatggaatgaaatttgatagctcggatagccctatgtttattaatgaacagattcataaaaatgcacaagccactactgtgttgctagcctctttgtgcagggacgagtacaacaaggtgagcggcttggataatgccaagcagatatgggacaccctcaagatttctcacgaggggaacgacatcaccatgctcactaaaatggagttggtggagggcgaacttggaaggtttgcaatgataaggggcgaggagccaacccaaacatacaaccggctcaagacccttatcaacaaaataaggagctatggaagcacgcgatggacggaccatgatgtcgtccgactattactaaggtcctttaccattcttgatcctcatttggtgaataatattcgtgagaatcccaggtacatcaaaatgtcgcccgaagaagtcctaggaaaattcgtcagcgggcgaatgatgattaaggaagcaaggtacgtggacgacgccttgaatggaccgaccaacgagccgcaacctcttgctctcaaagcaacaagaagcaaggaggcgctacctagcaaggtggcacaaattgaggcgactggacttaatgatgaagagatggctctcatcatcaaacgcttcaagtcggtgctaaagggtcacaaggggcagccaagcaagaccaagacaaaggggaagcgctcatgcttcaaatgcggtaagattggtcattttattgctaactgtcccgaaaatgaaagtgaccaggaacacgggagcaagagggaaaagaagaaaaattacaagaaggctaagggcgaggcacatctaggaaaggagtgggactcggattgctcctcctccgactctgacaatgaaggactcgccgccaccgccttcaacaagtcatccctcttcccaaacgagcgtcacacatgcctcatggcaaaggagaagaaggtatgtactcgagacggtactacttatgattcctctagtgatgatgaatctagtgatgaggaaatagactactctagcttgttcaagggattggatagaaataaaattgataaaatcaatgaattgattgatgcattgaatgagaaggataaactcctagagaaacaagaagatttattgtatgaagagcatgataaatttgtagaagctcaaagatctcatgctctagaagttaaaagaaatgaaatgctttcttgtgaattatcttcttgccatgagacaatttctaaatttaggagcattaatgatgatatgaatgctaagttagagattgctaataaatccaattcttgtgaagaacatgttgcaatttgtactaggtgtaaagattttgacattaatgcttgtagtgaacacctagtttcaatttccaagcttaatgatgaattggctagtcttaatgctcaacttaagactagcaagaatgaatttgacaagctaaaatttgcaagggatgcctacactattggtagacacccctcaattaaggatggacttggcaacaagagggaagccaagaacttgacaagccataaggctcccatctccgccaaggaaaaagggaaggcccctatggctagtagtgtgcaaaagaaccatgcctttatgtaccatgatagaagacaacctagaaatgcttataggagttgtaatgcatataatgtctttgattctcatgacatggttgcttctagttcttcttatatgcatgatagaaatgttggtaggagaaatgttattcataatatgcctaggaaaaatgttgttaatgttcctaggaaagtaaatggaccttctacaatttattgtgctttaaatgcttcctttgctatttgtagaaaggataggaaaatagttgctaggaagttaggggcaaaatgcaagggagacaaaacttgcatttgggtccctaaggatatttgcactaaccttgtaggacccaacaagagttgggtttatgcatccggaggttcaagctggattattgatagcggatgcacaaaccatatgacgggggaaaagaagatgttcacctcctacgtcaagaataaggattcccaagattcaattatattcggtgatgggaatcaaggcaaggataagtctgaaacccaagggaccctcaagcgcttcctcaggagagctcaaaatgagtttgagctcaacgtgaagaagataaggagcgacaacgggtccgagttcaagaaccttcaagtggaggagttccttgaggaggaagggatcaagcacgagttctccgctccctacacaccacagcaaaatggagtggtagagaggaaaaacaggacgagcacggggtggttgtaccaaatggatgtgaagagcgcgttcctcaacgggccgatcaaggaggaggtgtacgtagagcaaccccctggcttcgaggatgaacggtaccccgaccacgtgtgtaagctctctaaggcgctctatggacttaagcaagccccaagagcatggtatgaatgccttagagactttttaattgctaacactttcaaggttgggaaagccgatccaactctttttactaagacatgtgatggtgatttgtttgtgtgccaaatttatgtcgatgacataatatttggttctactaaccaaaagtcttgtgaagagtttagcagggtgatgacgcagaaattcgagatgtcgatgatgggcgagttgaactactttcttgggttccaagcgaagcaactcaaggatggcaccttcatctcccaaacgaagtacacgcaagatctgctaaagcggtttgggatgaaggacgccaagcccgcaaagactccgatgggaaccgacggacacaccgacctcaacaaaggaggtaagtccattgatcaaaaagcataccggtcaatgatagggtctttactttatttatgtgctagtagaccggatattatgcttagcgtatgcatgtgtgctagatttcaatccgatcctaaggagtgtcacttagtggcggtgaagcgaattctaagatatttggttgctacgccttgcttcgggctctggtatccaaaggggtctacctttgacttggttggatactcagattccaactatgctggatgtaaggtcgataggaagagtacatcagggacgtgccaattcttaggaaggtccctggtgtcgtggaactctaagaaacaaatctccgttgccctatccaccgctgaggccgagtatgttgccgcaggacagtgttgcgcgcaactactttggatgaggcaaaccctccgggactttggctacaatctgagcaaagttccactcctatgtgataatgagagtgctatccgcatggcggaaaatcctgttgaacacagccgcacaaagcacatagacatccggcatcactttttgagagaccaccagcaaaagggagatatcgaagtgtttcatgttagcaccgaaaaccagctagccgatatctttaccaagcctctagatgagaagaccttttgcaggttgcgtagtgagctaaatgtcttagattcgcggaacctggattga

SEQ ID NO: 4514 - DNA, 5442 bp, Zea mays
  Clone ID: TF_ZmC4916_445
atggatcctaagggcaaggggatggtgatcaacgacaaggagaaggagaccttcgtcaacgagctcaataatgacaagcccactgactcaggctcgggccacaaaagaaaagacgggaggaagaagaagacaaggcgcatcaaggaaattgtctactacgacagcgacgaatcttcctcctcccaaaaggacgacgacaacgactacaggaagacggtcaattcgaatttttcatttgattattctcgtattccacctagttcgaattcgcatttgctttcccttcctcttggcaaacctccacactttgatggggaggactacggattttggagtcacaaaatgcgtagtcatctattctctctccatccaagcatatgggagattgtagagaatggaatgaagtttgatagctcggatagccctatgtttattaatgaacagattcataaaaatgcacaagctactactgtgttgctagcctctttgtgcagggacgagtacaacaaggtgagtggcttggacaacaccaagcaaatatgggacatcctcaagatttctcacgagggaatcgacatcaccatgctcactaaaatggagttggtggagggcgaacttgcaaggtttgcaatgataaggggcgaggacccaacccaaccatacaactggctcaagaccctcatcaacaaaataaggagctatggaagcacgcgatggacggcccatgacgtcgtccatctattactaaggtcctttaccattcttgatcctcatttggtgaataatattcgtgagaatctcaggtacaccaaaatgtcgcccgaagaagtcctaggaaaattcgtcagcgggcgaatgatgattaaggaagcaaggtacgtggacgacgccttgaatggaccgatcaatgagccgcaacctcttgctctcaaagcaacaagaagcaaggaggcgctacctagcaaggtggcacaaattgaggcggccggacttaatgatgaagagatggctctcatcatcaaacgcttcaagtcggtgcttaagggtcacaaggggcagccaagcaagaccaagacaaaagggaagcgctcatgcttcaaatgcggtaagattggtcattttattgctaactgtcccgaaaatgaaagtgaccaggaacacgggagcaagagggaaaagaagaaaaattacaagaaggccaagggcgaggcacatctaggaaaggagtgggactcggattgttcctcctccgactctgacaatgaaggactcgccgccatcgccttcaacaagtcatccctcttcccgaacgagcgtcacacatgcctcatggcaaaggaaaagaaggtatgtactcgagacggtactacttatgattcctctagtgatgatgaatctagtgatgatgatgagatagattactcatgcttattcaagggattggatagaaataaaattgataaaatcaatgaattgattgatgcattgaatgagaaggataaactcgtagagaaacaagaggatttattgtatgaagagcatgataaatttgtagaagctcaaagatctcatgctctagaagttaaaagaaatgaaatgctttctcgtgaattatcttcttgccatgagacaatttctaaattaaggagcattaatgatgatatgaacgctaagttagagattgctagtaaatctacctcttgtgtagaaaatgctataacatgcactagatgtaaagatattaaccttgatgcttatagtgaacacctagcgtgcatttctaaactaaatgaagaggtagctagtcttaatgcccaacttaagactagcaaaagtgattttgaaaaactaaaatttgctagggatgcctacacggttggtagacacccctcaattaaggatggacttggcttcaagagagaagccaagaacttaacaagccataagactcccattcccgccaaggagaaagggaaggcccctatggctagtagtgtgcaaaagaaccatgcttttatgtatcatgataggagacaaactagaaatgcttataggaattataatgcttatgatgattttgactctcatgccatgtttgcgtctagttcttcctatatgcatggtagaaatatgtctaggagaaatgctactcatcatgtgcctagaaagaatattattcatgctcctaggaaagtagtgaatgaacattctacaatttattgtgctttaaatgcttcctttgctatttgtagaaaggataggaaaatagttgctaggaagttaggggcaaaatgcaagggggacaaaacttgcatttgggtccctaaggatatttgcactaaccttgtaggacccaacatgagttgggtttatgcatccgggggttcaagctggattatcgacagcggatgcacaaaccatatgacaggagaaaagaagatgttcacctcctacgtcaagaataaggattcccaagattcaataatattcggtgatgggaatcaaggcaaggtaaaagggttagatgtgtctgtctttagaagaagtgatggttcactagcctttaagggtgtattagacggcaagctctacttagttgattttgcaaaagaagaggccggtctagatgcatgcttaattgctaagactagcatgggttggctgtggcatcgccgcttagcacatgtggggatgaagaatcttcacaagcttctaaagggagaacacgtgataggtttgactaacgttcaattcgaaaaagatagaccttgtgcagcttgtcaggcaggtaaacaggtgggaggagcgcatcacagcaagaatgtgatgaccacatcaagacccctggagctgctacatatggacctcttcggacccgtcgcctatctaagcataggaggaagtaagtatggtttagttattgttgatgacttttcccgcttcacttgggtgttctttttgcaggataagtctgaaacccaagggaccctcaaacgcttcctcaggagagctcaaaatgagtttgagctcaaggtgaagaagataaggagcgacaacgggtccgaattcaagaaccttcaagtggaggagttccttgaggaagaaggaatcaagcacgagttctccgctccctacacaccacaacaaaatggtgtggtagaaaggaagaacatgacgctaatcgacatggcgaggacgatgcttggagaattcaagacccccgagcgtttttggtcggaagccgtgaacacggcttgccacgccatcaacagggtctaccttcatcgccttctcaagaagacttcgtatgagctactaaccagtaacaaacccaatgtatcttactttcgtgtatttgggagcaagtgctacattctagtgaagaagggtagaaattctaaatttgctcccaaagctgtagaagggtttttgttaggttatgactcaaatacaaaggcgtatagagtcttcaacaaatcatcgggtttggttgaaatctctagcgacgttgtatttgatgagactaatagctctccaagagagcaagttgttgattgtgatgatgtagatgaagaagatgttccgacggccgctatacgaaccatggcgattggagaagttcggccacaggaacaagatgaacgagatcaaccttcttcctcaactatggtgcatcccccaactcaagacgatgaacaggttcatcaacaggaggcgggtgatcaagggggagcacaagatgatcacgtgatggaggaagaagcgcaaccggcacctccgacccaagttcgagcgatgattcaaagggatcatcccgtcgaccaaattctgggtgacattagcaagggagtaactactcgatctcgattagttaatttttgtgagcattactcctttgtctcttctattgagcctttcagggtagaggaggccttgctagatccggattgggtattggccatgcaagaggagctcaacaacttcaagcgcaatgaagtttggacactggtgcctcgtcctaagcaaaatgttgtgggaaccaagtgggtgtttcgcaacaaacaggacgagcacggggtggtgacgaggaacaaggctcgacttgtggcaaaaggttatgcccaagtcgcaggtttggactttgaggagacatttgctcctgtggctaggctagaatcaattcgtatcttgctagcatatgccgctcaccattctttcaggttgtaccaaatggatgtgaagagcgccttcctcaacgggccaatcaaggaggaggtgtacgtggagcaaccccctggcttcgaggatgaacgataccccgaccacgtgtgtaagctctctaaggcgctctatggacttaagcaagccccaagagcatggtatgaatgccttagagactttctaattgttaatgctttcaaggttgggaaagccgatccaactctttttactaagacatgtgatggtgatttgtttgtgtgccaaatttatgtcgatgacataatatttggttctactaaccaaaagtcttgtgaagagtttagcagggtgatgacacagaaattcgagatgtcgatgatgggcgagttgaactacttccttgggttccaagtgaagcaactcaaggatggcaccttcatctcccaaacgaagtacacgcaagatctgctaaagcggtttgggatgaaggacgccaagcccgcaaagactccgatgggaactgacggacacaccgacctcaataaaggaggtaagtccgttgatcaaaaagcataccggtcaatgatagggtctttactttatttatgtgctagtagaccggatattatgcttagcgtatgcatgtgtgctagatttcaatccgatcctaaggagtgtcacttagtggcggtgaagcgaattcttagatatttggttgctacgccttgcttcgggctctggtatccaaaggggtctacctttgacttggttggatactcagattccgactatgctggatgtaaggtcgataggaagagtacatcggggacgtgccaattcttaggaaggtccctggtgtcgtggaactctaagaaacaaacttccgttgccctatccaccgctgaggccgagtatgttgccgcaggacagtgttgcgcgcaactattttggatgaggcaaaccctccgggactttggctacaatctgagcaaagtcccactcctatgtgataatgagagtgctatccgcatggcggagaatcctgttgagcacagccgcacaaagcacatagacatccggcatcactttttgagagaccaccagcaaaagggagatatcgaagtgtttcatgttagcaccgagaaccagctagccgatatctttaccaagcctctagatgagaagaccttttgcaggctgcgtagtgagctaaatgtcttagattcgcggaacttggattga

SEQ ID NO: 4515 - DNA, 1551 bp, Zea mays
  Clone ID: TF_ZM5003.C1.o14.fg
atggatcctaagggcaaggggatggtgatcaatgataaggagaaggagtccttcatcaatgagcctaaagacgacaagcctagtgactcgggctcaagtcataagaagaaggacggaaagaagaagagatgcatcaagaagatcgtctactacgacgacagcgacgagtcctcttcttcccaaaaggacgaggacgactacgagaaaaagaaaacgatttgggacaccctcaagatctcacatgaagggaacgacgtcaccatgctcaccaagatggagttggtggaaggcgaactaggaaggttcgcgatgatcaggggagaggagccaacccaaacgtacaaccggctcaagaccctcgtcaacaaaataaggagctatggaagcacacgatggacggaccacgacgtcgtccgcctaatgctaaggtcttttactgtccttgatccacatctggtaaacaatattcgtgagaatcctaggtacaccaagatgtcgcccgaagaaatacttggaaagttcgtaagcgggcgaatgatgatcaaggaggcaagatacgttgacgatgcattaaatggcccaatccatgagcctcaagccattgctctcaaggcaacaagtagcagggaggtgctacctagcaaggtggcacaaattgaggcggctgggttaaataaagatgaaatggccctcatcatcaagcgcttcaagacgacgctcaaaggtcgcaaggagcatcccaacaaaagcaagacgaagggaaagcgctcctgcttcaagtgtggtaagattggccattttatcgctaattgtcccgaaaatgatagtgaccaggaacaagagaagaagagggaaaagaagaaggcttacaagaaggctaagggcgaggcacaccttggcaaggagtgggactcggattgttcgtcgtctgaatccgacaacgaaggactcgctgcctcggccttcaacaaattgtccctcttccccaacgagcatcacacgtgcctcatggcaaaggagaagaaggtttatgcatccgggggatcaagctggattatcgacagcggatgcacaaaccacatgacgggggagaagaagatgttcacctcctacgtcaagaacaaagtttcccaagactcaatcatattcagtgacgggaatcaaggcaaggataaatctgaaacccaagggaccctcaagcgcttcctaaggagagctcaaaatgagtttgagctcaaggtgaagaagataaggagcgacaacgggtccgagttcaagaaccttcaagtggaggagtaccttgaggaggaaggaatcaagcacgagttctccgctccctacacaccacaacaaaatggtgtagtagagaggaagaacaggacgctcattgacatggcgaggacgatgcttggagagttcaagacccccgagcggttttggtcggaagccgtgaacacggcttgccacgccataaaccgggtctaccttcatcgcctcctcaagaagacttcgtatgagcttctaaacggtgtcttcggaatcggatcatga

SEQ ID NO: 4516 - DNA, 5683 bp, Zea mays
  Clone ID: TF_ZmC119_1409
ttaagaggatctagggaaaagatgggggaagtctatacgaagctcttcttctctttcccacgttgcctcatcttcaccgtggtgactccattgaactttgcacatctttatcaccttattccttgtaactcgagtcaaagtgtccagaatcttgattgggtactcagcataagtcaggtcatcttgaacactgaggtcttccattggtagttgctcctcaggtaccctgaggcacttctttagctgggacacatggaatacatcatgtacatctgacagatgattgggtaactccaattgatatgcaacttctcccactcgctttaagatcaagaaaggtccaatgaagcgaggggacaactttcctttaactttaaatctcctcatacctcggagtggtgacaccttcaaatagacatgatcaccctccttaaactccagtagtcttctcctattatcagcatagctcttttgcctggattgtgcaattctcgaattctcccttatcatttgaacttgttcttctgcctcttgtataagttcaggaccaaagaattgtctttctccagtttgatcccaatacagtggagtcctgcattttctaccatacagagcctcaaacggagacatcttcaaactggcttgataactattattataggaaaactcagcatagggtagactcttctcccaactgccaccatgcttgagagcacaagctcttaacatatcttccagcacttgatttgttctctctgtctgtccatcagtctggggatggtaggctgaactaaaattcaactttgtatccaagctctcatgcaacttcttccaaaatcgagaagtaaactgtgatcctcgatcagacacgatcttcttaggtactccatgtagacaaactatccgagtcatatacaattctgctagcttggctcccgtgtaattagtcctcacaggtatgaaatgagccacttttgtcaatctgtctacaattacccaaatagagtcatatcctgctggagtgcggggtagtccaacagtaaaatccataccaattttttcccatttccactcaggaatcttaagagggtgcaatagtccagctggtctttgatgttcggccttgactctttgacacacatcacacttagccacatgagcagcaacatctcttttcagtccataccaccaatacttttgcttcaaatcttgatacatcttagtgctaccagggtggatagaataatcagaatcatgggcttccttcaatatagtctcccggaggctatcaatctctagaacacatatccgatctttgaaccatatggtaccttgctcatcctccgtgaattctggaactcgaccttcagtaataagatccttaatctcttgaattttagcatcaccaacctgacctttacgaatctcttgctccaaggtaggttccaattcaatggtaactccttcagtgtgagtaacaattcccaggttgagtctctcaaagtcttttgctaattcatcaggtagcaaatttgccttgcccgggtgatagtgaatctccaaatcataatccttaatgagctccaaccaacggcgttgcctaaggttgagatccttctgagtgaatatatacttcaaactcttatgatccgtgtacacttggcacttagtccccataatgtagtgtctccaaatcttaagtgcatgcacaacggcagccaattccaagtcatgagtggggtagttcaattcatgcttccgcaactgacgagatgcataggcaatcacatgtccttcttgcataagcacacatccaagtccttggccacatgcatcacaataaatgtcaaatcccttctgcagatctggcataatcaatatcggaggtgacatcaatctctccttcaattgatcaaagctctcttgacatttctcatcccacttaaattctcttcctttctccaaaagcgatgtcataggtttggcaattttagagaatccctcaatgaatctccgataatatcctgcgagtcccaagaaactccgaatctcagtaactgtagtgggcactctccactccattatctctttcactttagcaggatccactgctattcctccattagaaataatatgaccaaggaatggcaccttgtcaatccaaaactcgcacttgctgaacttagcgtagagttgattatctcgtaacttctgtagcaccaaccttagatgttgttcatgatcactttcattcttagaatagataagaatatcgtcgataaacaccacgacgaatctgtccaaatactccataaacactttgttcatcaaattcatgaaataagctggtgcattggtcaatccaaacgacataacagtaaactcatataatccatatcgagtcgagaaagccgtcttgggaatatccgatggtctaatcctcatctgatggtatcccgatcggagatcaatcttcgagaataccctagcacctctcatctgatcaaatagatcctcaatacggggcaacggatacttgttcttcacagtaacatcattgagtgatctatagtccacacacatccgttgtgatccatccttcttctgtacgaataacaccggtgctccccaaggtgaggaacttggacgaatgtaaccagcctcttgtaactccgtcaactgcttcttcagttccttcaactcctctacggacattctatatggccgttttgaaataggggcggttccaggtaagagatcaataacaaactcaacttctctatcaggtggcatccctggtaactcctctggaaagacatctggaaaatctctaaccacccggatgttgttaccaacaaactcctcaggcataaagaacattgcacgcatggatgaggaggttactgcaatattaacttgaaatctttctcctttagcagtagtgagttctacggtacctcgaccacatgctataacggcctttgcctttcttagccatgacataccaaggatcagatctatactgcttgactctaatattatagcagtagctccaaattctctacccataatggttaatgtcaatctacgtgtcatttgattcgcctcaacaggccctttaggtgtaattactatcatgggttttctcatatttagcagtggtatttcatttgtgttggcatatctagcagacatgaatgaatgtgtagcaccagaatcaaataatattgttgcaggaattgcattaacataaaacataccaattacgaggtccccaccatcaggagtatcatcaacgctgacttgattcaccctggctatagaatatcccttgctagatcctggagtttgctgcctgttctgaactggagtagtagcaatcctctgtgggcagacatttgcatagtgaccagtcttcccacacttgtaacaagtagtgcctggactctgtcctgaaaacttcgtcggggtgccggtaggggtagcctgtcgaggaggtggagtcctcaaaggtgattgctgaattgggcgctggcctccgccagtgcgagctggtgtaccctggggtgaactgtagcgaggtcgaacactgctgcttccttgtccttgagatatagcctttctcttcaaatctcccagctgaacacgcttgtgttcaatagccagggccttatcaagcagcctctgaaatgatggaaatgtatgtgccactagagcatactgcagtggtccattaagtccttcaataaaatgctcctgcttcctctcatcttcagcaacttcatcaggggcatatctggataactggataaacttgtcgcggtactcgctgactgtcatgcttccttgcttcagcgatagaaattccttcttcttaatcttcatcaatccagctggtatatgataattcctgaactgtgtactgaactctgcccaagtgatagtatcagcagcatcgtgggcggcagtatatgaatcccaccagtcagcagcaggacctgtcagacgtccagaagcatataaaaccttctcccggtcagtacattgtgcaatattcagcatcttctcaacggacttcagccaatcatccgcgtccagtggatcaggtgagctagcgaatgtaggtggcttatgactcatgaactccctatgcttatcacggggtggaactggtggtggtggtggaggcagtggtacttgttgctgttgctgttgcatttgttgttgcagctgctgttgttgcgccctcctttcctgacgtatctcttctcgttcttggcgcagctctcgacgtatatcctcccgctcttggcgcatctcctggcgttcctgctgcatctgagcacgcatatctgtcatagtgtccgccatctgttgcatcatcctcatctgagctgcaaccagtgggtcaactcctgccggtggaggcggtggtggaggatccatctctactggttgtggctggggttgtctaaatatcctccgagtgtgtcgattgggcggtaaatcaattccaccaccccgcctggtattgaccatcagttttacactctgcagaggttgcacatctttacccacaagtcgtgttacccatctgccaaggggtcatgaatcccatacacctctaccaaggaagcgaggcagggtaacactacgaggcctttacaaagttccactagcttcagaaaacccgctacagtttctagggagcgcaatgcaggaatcccccgtctgaccgccattgtagcaaaatcaacccaagaacctccctacacagaccactcccctactgtccttgccccttttagataaggtagtcatccagtagctttcctcattagtcagccaagggcgtcccatatcacccttgtgggagcactattttcccgggtggttctccatgttccaattaacataatgatcttgtcatgaatcagtaaataacaaattgataataaaaagatgatcatgaataatgtgtatcttaatacccaaaaccacataaagcaatagcaggtactacccaaaagttcagtggtaaacaaggtataaagatagtcagactacggtaacctattgggtcccatcaaaattaatctatgcagatcataatgattaaaaagaacattattgggcaaatagaagtgatcaagggcacaacttggcttcaacgagctcctgctcaacagtctccacctgctgaacacctgggtcctcagtggcttgctcgtccacgattgcagtgaaggcgcgcctgtccacggcgtgaagcggccctacagcggtgatggactccggtgaggaattcaccacacaccgagggttcctctcccccaacggcgctgaggatacttccgccgcaccctaaaggagcctcccaaccaatgctattggcccaagcggcgtcggagacgagatccaaccaacggcgccgctatcctcctctccaattctcaccacggggaaggtatggcttcagggcgagggttcatcgcgcttgaggactgagggtgctacttatgagctgaagtgatggcatctgagaagtttgggagccgttcaactggctggctgagccgggcaaatcgcggcggtggttgagtacgcggagaaaaaggaggaagaggaacaggacttgcaaggtgactagctgtgggtctagcgggtgggtgtctgggccccg

SEQ ID NO: 4517 - DNA, 3651 bp, Zea mays
  Clone ID: TF_ZM4410.C4.o3.fg
atggatactaagggaaaggggatggtgatcaacgacaaggagaaggaatccttcatcaatgagccaaaagacgacaagcccactgactcgggctcaagtcaaaagaagaaggatggaaagaagaagaggcgcatcaagaagattgtctactactacagcgacgaatcttcctcttctcaaaaggacgacgaatacgaggagaaaaagaaaacggttaactcgaacttttctttcaattattcttgtattccgcataattccaatgctcatttgctttccattccacttggtaaacctccacactttgatggagaggactacggattttggagtcacaaaatgcgtagccatttgttctctcttcatccaagtatatgggagatagtagaaaatggaatgcaatttgatagtttggataattctatgtttatcaatgaacaaatccataaaaatgcacaagctactactgttcttttagcatccttgtgcagggaagaatacaataaggtgagcggcttggataatgccaagaaaatctgggacaccctcaagatctcgcatgaggggaacgacgccaccatgctcaccaagatggagttggtggaaggtgaactaggaaggttcgcgatgattaggggagaggagctaactcaaacgtacaataggctcaagaccctggtcaacaagataaggagctatgggagcacgagatggacggaccacgacgtcgtccgacttatgctaaggtccttcactgtccttgatcctcgtcttgtaaactctattcgtgagaatcctaggtacatcaagatgacgcccgaggaaatactcggaaagttcgtaagcgggcgaatgatgatcaaggaggcaagatatgttgatgatgcattgaatggcccaatgccgatctacgagcctcaaactgttgctctcaaagcaacaagtagcagggaggcactacctagcaaggtggcgcaagttgaggtggccgggctaaatgaggacgaaatggccctcatcatcaagcgcttcaagacggtgctcaaaggtcgcaaggagcatcccaacaagagcaagacgaagggaaagcgctcctgcttcaagtgtggtaagattggtcactttattgctaactgtcccaacaatgatagtgatcaggaacaaggaaagagcggaaagtgggaaaagaagaagacctacaaaaaggcgaagggcgaggcacaccttggaaaggagtgggattcggattgctcctcgtccgactccgacaacgaaggactcactgcctcatccttcaacaagtcggctctcttccccaacgagcatcacacatgcctcatggcaaaggaaaagaaggtacatactcgaagtactgttacatatgcttcttcaagtgatgatgagtctagtgatgatgaagtagactacacaagcttattcaaaggtttagatagaactaaaattgataagatcaatgaattatatgatgctttgaatgagaagaatagattgttagagaagcaagaggatcttttatatgaagagcatgataaatttgttagtgcgcaaaattctcttgctttagaagttaaaagaaatgaaatgctttcatgtgaattatctacatgccatgaatctatttctagcttaaagagtattaatgttgatttaaatactaagttagaaatagctaataaatcaagctcttgtgtagaacatgttgtgatttgcaataggtgtaaggattttaatgttgatgcttgtagtgaacacttaatttccatctcaaaattaaatggtgaagtggctagtcttaatgcccaacttaagactagcaaaaatgattttgataaactaaaatttgcaagggatgcctacaccattggtagacacccctcaattaaggatgggcttggcttcaagagagaagccaagaacttaacaagccaaagagctcccatttccaacaaggaaaaggggaaggctcctatggctaatagtagtcaaaagaatcatgcatttatttatgatagaaaaatttctagaaatgttcatcattataggagttgtaatgcttatgattcaaatgccatgtttgcttcaagttcttcctttgtgcatggtagagatatgcctaggataaatgttgttcatgtttatgcatccgggggctcaagctggattatggacagtggatgcacaaaccacatgacgggggagaagaagatgttcacctcctacgtcaagaacaaagattcccaagattcaatcatattcggtgacgggaatcaaggcaaggttaaaggactaggaaagattgccatttcattcgagcactccatttcaaatgtgtttttagttgattcgctcggcaagaacgtgatgaccacatcaagacccctggagctgctgcatatggacctcttcggacccatcgcctacctcagcatcgggggaagtaagtatggtcttgttatagttgatgatttttcccgcttcacttgggtattctttttgcaggataaatctgaaacccaagggacccttaaacgctttctaaggagagctcaaaatgaatttgagctcaaggtgaagaagataaggagcgacaatgggtctgagttcaagaaccttcaagtggaggagtaccttgaggaggaaggaatcaagcacgagttctccgctccctacacaccacaacaaaacggtgtggtagagaggaagaacaagacgcttttagacatggcgaggacgatgcttggagagttcaagacgcccgagcgattttggtcggaagccgtgaacacggcttgccacgccataaaccgggtctaccttcatcgcctcctcaagaagacttcgtatgagcttctaaccggtaacaaacccaacgtttcatatttttgtgtatttgggagtaaatgctacattctagtgaagaaaggtaggaattctaaatttgctcccaaagctgtagaagggtttttgttaggttatgattccaatacaaaggcgtatagagtcttcaacaaatcatcgggtttagttgaagtctctagcgacgttgtatttgatgagactaatggctctccaagagagcaagttgatcttaatgatgtagatgaagatgatgttccaacggtcgcaatacgcaacatggcgattgtagatgtgcgaccacaggaacaaacggagcaagatcaaccttcttcctcaacaatggtgcatcccccgactcaatctgatgaacagcaaaacgttgtgggaaccaagtgggtgttctgcaacaaacaagacgagcacggagtggtgacaaggaacaaggctagacttgtggcaaaaggttatgcccaagtcgcaggtttggactttgaggagacttttgctcctgtggctaggctagagtctattcatattttgttagcctatgccgctcaccattctttcaggttgttccaaatggatgtgaagagcgctttcctcaacgatccaatcaagaaggaggtgtacgtagagcaaccccatggctttgaggatgaacggtaccccgaccacgtgtgtaagctctctaaggcgctctatggacttaagcaagccccaagagcatggtatgaatgccttagagactttttaattgctaatgctttcaag

SEQ ID NO: 4518 - DNA, 1164 bp, Zea mays
  Clone ID: TF_ZM4796.C5.o1.fg
atggatcctaagggaaaggggatagtgatcaacgacaaggagaaggagtccttcatcaatgagccaaaagacgacaagcctactgactcgggctcaagtcataagaaaaaggaagggaagaagaagaggcgcatcaagaagatcgtctactacgacgacagcgacgagtcctcttcttcccaaaaggacaacgatgacaacgactacgagaaaaagaagacggttaactcgaacttttcttttgattactctcgtatgccgcatagttcaaatgcacatttactctccattccacttgcatcattgtgcagggatgaataccataaggtgagcggcatggataacgctaagcagatctgggacaccctcaagatctcgcatgaggggaacgatgtcaccatgctcaccaagatggagttggtggaaggcaaacttgggagattcgcaatgatcaggggagaggagccaacccaaatgtacaaccggctcaagaccctcgtcaacaaaataaggagctatggaagcacacaatggacggaccacgacgtcgtccgcctaatgctaagctctttcactgtccttgatccacatcttgtaaacaatattcgtgagaatcctaggtacaccaagatgacgcccgaggaaatacttgggaagtttgtaagcgggcggatgatgatcaaggaggcaagatacgttgatgatgcgttgaatggcccaatccacgagcctcaaaccgttgctctcaaagcaacgaggagcaaggaagtgctacctagcaaggtggcgcaagtgaaggcggccgagcttaataaggaagaaatggccctcatcatcaagcgtttcaagacgacgctaaagggtcgcaaggagcatcccaacaagaacaagacgaaggggaagcgttcatgcttcaaatgtggtaagattggtcactttatcgctaattgtcccaataatgatagtgaccaggaacaagagaacaagagggaaaagaagaaggcttacaagaaggctaagggcgaggcacaccttggcaagaagtgggactcggattgttcgtcgtctgactccgacaacgaaggactcgccgtctcggccttcaacaaattgtccctcttccccaacgagcatcacacctgcctcatggcaaaggagaagaag

SEQ ID NO: 4519 - DNA, 2396 bp, Zea mays
  unsure (1)..(2396): unsure at all n locations
  Clone ID: TF_ZmC10764_2
tcctcagtccctcacacactcactatacactgctctgctgcagcagnaaggaagaactagcgcctccctagctctcgttgtcagcaatggccaccaccgccgcgtccagcctcctcaatcgtccttcgcgggctcccggctccgggatttaggttggtaactgtttattttccccacattgagagagtgtttctacttgtagctcgaggccggggaagccctgctagcggtgtccggtccggcgcccccctatttcctctcgcagcctcttctccccaaaccctaatcttgctcctgcctatctctgctccaatccgttggtggagcggcggcgatggaggggaaggaggaaggtcggatcttcgtgggcggcctgtcgtggcaaacggacgagcgcaagcttcaggacgcctttggtcgcttcggcaaggtcgtcgatgttcagatcatgctggagaggcacacaaaccgccacaggggctttggcttcgtgacattcgaagatcgaagggcagttgacagcgctatcaaagagatgcgtggccaagagttagatggtcgtaccatctcagtgaacaaggctgagcctaagatgaatacagatgacacaaggttcgacaatggcggtggacgagactatcgaggtggtagaggtgatggtccaccccctggcaattgctatgagtgtggccgtcctggtcattgggtccgtgactgccctagtgctgctggtggtcgttctggcagattcccgtccaagttcagtggtggtggcaggggagaccgcttttctggatcagataggtttagtgatcgttacatggatgatcgttatgatggtggtcgttatgggtaccgtgatcaagttgatgcaagggacaagtatgctgggggccgagatcgttatgccaatgatcgctactccgctggtggcgatcactttgacggagacaggtatggaggtggcccggatcggtacgcgccaaatggttatgggagggaacgagaaagaagctacgagagagatggagttcgtggcggcggtggctatgataggaatgactcaagaggtggtggaagctatgacagggatggccctagaggcggcaagggtggtggctatgtcagggatggcccacgcggtggtgttgctgatcgttatggtggtggaggacctgcacgctatgatgggggaagttacagggacaggcctgggccatatgatcgccctagcaggggaggaggtcgttttgatgatcgccactgatgaactgcttctagacccgagcccctggtcttgtagtttagctttttgcagttttgcatagcttaatgcttaatgggctatggaagatgcctaatttacccccctctttggcacttcaatgtctgctctgtatttcaaccagtacttgggcaccggtgttgccttctcgataagtttatcaagctgactgtttttgcatgagacgggtcatcctttgggctactactctgcctgttggtccggatgtttcagttgtgcatgtcgtgcgtcctgcagttatagtggagtcgaggttctcagtgattgtttgtcattgttgatctgaatatctggtatgcatggactgactatgttttcagtgattgcctgtcaccgttggtctgaatatctggtgaacatatatgctcagtgacggtgcttgtcattgttgttggtctggatatttgggttcgcaaggatatatttgcagtgctgagatgcaagtgcttaaccgaactgtagccaaagtaaccctatgctagaagtaactggcaaccatgttgaattgttaatctcgttagttttttgtctggggtcttgaaaatgccctccagatctctcacgagaacgtgaacttcacctatcttctctatcgagctgcatcgccctctcttttggcgagcaggtctttggattcaccgtttgcttgtgtgatatctgcttagttgtgtggggatgatcaagtggttggaaagctttgctgtgactgttcgttgatcttctttctgccgctcattggatcggaggaccgtcttgtttttgtgtgaatgttcgaggaacgacactgttaacaactgacctttttatgttgacaaattacagagttgttcaccttggcattagatgttcgtttgactttaatccaaaatgtcttctattgtttgttgaaaaaaataaaaaaaaaaaaaaaaaaaaaaaaaaaaaaataaataaaaaataaaaaaaaaaaaaaaaaaaaataaaaaaagggcgggcaccaagtggggagcctgtttacccagaaaattaattccaaacagaaaccgtgagacggtaccatctatagcttaataaaattaattcgaaaaataaaaattaggattaaaaattt

SEQ ID NO: 4520 - DNA, 1577 bp, Zea mays
  Clone ID: TF_ZmC7043_1
cattgggtacctcgaggccggccgggaccgggatctcgccctcgctcacctacagctccgtccgccagcgtcagccaggctgccccgggaggccgggaggaagcagatcggagaaggtgatctgttgtaatggctcgattgtacatcggcaacctggatccccgggtgaccgctcgggagctggaggacgagttccgcacgttcggggttcttcgcagtgtctgggttgctcggaaaccacctggctttgcgtttattgattttgatgataagagggacgcagaggatgcaatccgtgacctagatggcaagaatggatggagagttgagttatctcgtaatgccagcggtggtcgtggaggtcgtgaccggcatggtgggtctgagtccaagtgttacgagtgtggtgagactggtcactttgctcgtgagtgccgtttgaggattggttctggaggtctaggcagcggaaggcgccgaagccgtagccgtagccgcagtcgcagtcccagatatcgccggagtccaagttacggtagaaggagttacagtcctgcagcacgctctccaaggcgtcgtagcgtctcaccagctcgtggacgcagctatagcaggtcaccacagcacaagggtgcacgtgaagaatctccctatgataatggataccgccgcagcaggagctagagccagatcgttgtatccgacgacgagcgttatgtgacagatattgggaaagctatggtcaataacctgcttgacagatccttcgtcgactgcttgactttggttagctcataactttctatatacctatcctttagcaaggcatcgtcctgcactgcttaaacgactcggccgactacggctttcagttctgtcttcatggttttgttctgcgctctacattcttcgcacaccctcgcatgcttcattcagtctgccgtgtgttaatctgcctgcgtatcttctcgaagatgctgcgcatcgcaaaagcagtaatgaccttccttctcataccatttggtaaggtttgatttgctgacaaatgcagcatctggtaagtttctccccgtaggtttggtctccgtgctgcgtgcgctgctcctggttcaggaactgcagtatgttagatggatgaggatgactgaatgactcacctactcacgttatcatgccttcagaggacccaagttagtgagcgccaggaagtgaattgaccaggccaaatgctacgttgagccgactttggctttgctctgcgatctccacttgccaacatgtgttgccttcgacgaagtcttcttcgccttccgcttccttctctgcagcatcctgattgatattcttcattcttcgagtgacatgcagtcaccctaattgatcgtcatagagcctgcgttgaagtcgaatcccccctaatggacaatgtagttaaattgttattagcttgtttcttgttggatagactaatgtcagatgctgtttggtataaaatggtaaccatctggttgatgattggcggcgaaaaaaaaaaaaagcacgtggttgctatatgacaagtcccaaggtattattac

SEQ ID NO: 4521 - DNA, 1546 bp, Zea mays
  unsure (1)..(1546): unsure at all n locations
  Clone ID: TF_ZmC7043_2
gtacctcgaggccggccnnnnnnnnnnnnnnnnaaaaaaaaaaaaaaaaaaaaaaaaaaaaaaaaaactctttctcgccctcgctcacctacagctccgtccgccagcgtcagccaggctgccccgggaggccgggaggaagcagatcggagaaggtgatctgttgtaatggctcgattgtacatcggcaacctggatccccgggtgaccgctcgggagctggaggacgagttccgcacgttcggggttcttcgcagtgtctgggttgcccggaaaccacctggctttgcgtttattgattttgatgataagagggacgcagaggatgcaatccgtgacctagatggcaagaatggatggagagttgagttatctcgtaatgccagcggtggtcgtggaggtcgtgaccggcatggtgggtctgagtccaagtgttacgagtgtggtgagactggtcactttgctcgtgagtgccgtttgaggattggttctggaggtctaggcagcggaaggcgccgaagccgtagccgtagccgcagtcgcagtcccagatatcgccggagtccaagttacggtagaaggagttacagtcctgcagcacgctctccaaggcgtcgtagcgtctcaccagctcgtggacgcagctatagcaggtcaccacagcacaagggtgcacgtgaagaatctccctatgataatggataccgtcgcagcaggagctagagccagatccttgtatctgacgacgagcgttatgtgacagatattgggaaagctatggtcaataacctgcttgacagatccttcgtcgactgcttgactttggttaaggcatcgtcctgcactgcttaaacgactcggccgactacggctttcagttctgtcttcatggttttgttctgcgctctacattcttcgcacgccctcgcatgcttcattcagtctgccgtgtgttaacctgcctgcgtatcttctcgaagatgctgcgcatcgcaaaagcagtaatgaccttccttctcataccatttggtaaggtttgatttgctgacaaatgcagcatctggtaagtttctccccgtaggtttggtgtccgtgctgcgtgcgctgctcctggttcaggaactgcagtatgttagatggatgaggatgactcacctactcatgttatcatgccttcagaggacccaagttagtgagcgccaggaagtgaattgaccaggccaaatgctacgttgagccgactttggctttgctcagcgatctccacttgctaccatgtgttgccttcgacgaagtcttcttctccttccgcttccttctctgcagcatcctgattgattcattcttcgagtgacatgcagtcaccctaattgatcgtcattgagcctgcgttgaagtcgaatcctgcatccttattattcaaccgttcccccccccctaatggacaatgtagttacattgttattagcttgtttcttgttcgatagactaatgtcagatgctgtttgatatataatggtaaccatctggttgatgattggcggcg

SEQ ID NO: 4522 - DNA, 1564 bp, Zea mays
  Clone ID: TF_ZmC7043_3
cgttcacctacagctccgtccgccagcgtcagccaggctgccccgggaggccgggaggaagcagatcggagaaggtgattcgttttgatggctcgattgtacatcggcaacctggatccccgggtgaccgctcgggagctggaggacgagttccgcacgttcggggttcttcgcagtgtctgggttgctcggaaaccacctggctttgcgtttattgattttgatgataagagggacgcagaggatgcaatccgtgacctagatgatttttatggttctgtaggcaagaatggatggagagttgagttatctcgtaatgccagcggtggtcgtggaggtcgtgaccggcatggtgggtctgagtccaagtgttacgagtgtggtgagactggtcactttgctcgtgagtgccgtttgaggattggttctggaggtctaggcagcggaaggcgccgaagccgtagccgtagccgcagtcgcagtcccagatatcgccggagtccaagttacggtagaaggagttacagtcctgcagcacgctctccaaggcgtcgtagcgtctcaccagctcgtggacgcagctatagcaggtcaccacagcacaagggtgcacgtgaagaatctccctatgataatggataccgccgcagcaggagctagagccagatcgttgtatccgacgacgagcgttatgtgacagatattgggaaagctatggtcaataacctgcttgacagatccttcgtcgactgcttgactttggttaaggttctcataactttctatatacctattatcttgtgtctactttataagtagcagtaaaaccttttgatgagtgtatttgttgaactaagacctactgtcttttcttgtgtggtaaaaaggcatcgtcctgcactgcttaaacgaataaaaaaaaaaaaaaaaaagcggccgactacggctttcagttctgttttcatggttttgttttgcgctttacatttttcgcacgccctggcatgtttcattcagtctgccgtgtgttaacctgcctgcgtattttctcgaagatgctgcgcatcgcaaaagcatttctccccgtaggtttggtgtccgtgctgcgtgcgctgctcctggttcaggaactgcagtatgttagatggatgaggatgactcacctactcatgttatcatgccttcagaggacccaagttagtgagcgccaggaagtgaattgaccaggccaaatgctacgttgagccgactttggctttgctcagcgatctccacttgctaccatgtgttgccttcgacgaagtttttttctccttccgcttccttttttgcagcatcctgattgattcattcttcgagtgacatgcagtcaccctaattgatcgtcattgagcctgcgttgaagtcgaatcctgcatccttattattcaaccgttccccccccccctaatggacaatgtagttacattgttattagcttgtttcttgttcgatagcctaaaaaaaaaaaaaaaaaaaaaaaaaaaaaaaaaaaaaaagaaaaaaaaagaaaaaaagcggccct

SEQ ID NO: 4523 - DNA, 935 bp, Zea mays
  Clone ID: TF_ZmC7043_4
tctcgccctcgctcacctacagctccgtccgccagcgtcagccaggctgccccgggaggccgggaggaagcagatcggagaaggtgatctgttgtgatggctcgattgtacatcggcaacctggatccccgggtgaccgctcgggagctggaggacgagttccgcacgttcggggttcttcgcagtgtctgggttgctcggaaaccacctggctttgcgtttattgattttgatgataagagggacgcagaggatgcaatccgtgacctagatggcaagaatggatggagagttgagttatctcgtaatgccagcggtggtcgtggaggtcgtgaccggcatggtgggtctgagtccaagtgttacgagtgtggtgagactggtcactttgctcgtgagtgccgtttgaggattggttctggaggtctaggcagcggaaggcgccgaagccgtagccgtagccgcagtcgcagtcccagatatcgccggagtccaagttacggtagaaggagttacagtcctgcagcacgctctccaaggcgtcgtagcgtctcaccagctcgtggacgcagctatagcaggtcaccacagcacaagggtgcacgtgaagaatctccctatgataatggataccgccgcagcaggagctagagccagatcgttgtatccgacgacgagcgttatgtgacagatattgggaaagctatggtcaataacctgcttgacagatccttcgtcgactgcttgactttggttaaggttctcataactttctatatacctattatcttgtgtctactttataagtagcagtaaaaccttttgatgagtgtatttgttgaactaagacctactgtcttttcttgtgtggtaaaaaggcatcgtcctgcactgcttaaacgactcggccgactacggctttcagttcccaacac

SEQ ID NO: 4524 - DNA, 915 bp, Zea mays
  Clone ID: TF_ZmC7043_5
cattgggtacctcgaggccggccgggcggcatctcgccctcgctcacctacatctccgtccgcaagcgtcagccaggctgcccccgggaggccgggaggaagcagatcggagaaggcaagccacggatttccttctcgccttctggaccccatgtgatctgttgtaatggctcgattgtacatcggcaacctggatccccgggtgaccgctcgggagctggaggacgagttccgcacgttcggggttcttcgcagtgtctgggttgctcggaaaccacctggctttgcgtttattgattttgatgataagagggacgcagaggatgcaatccgtgacctagatggcaagaatggatggagagttgagttatctcgtaatgccagcggtggtcgtggaggtcgtgaccggcatggtgggtctgagtccaagtgttacgagtgtggtgagactggccactttgctcgtgagtgccgtttgaggattggttctggaggtctaggcagcggaaggcgccgaagccgtagccgtagccgcagtcgcagtcccagatatcgccggagtccaagttacggtagaaggagttacagtcctgcagcacgctctccaaggcgtcgtagcgtctcaccagctcgtggacgcagctatagcaggtcaccacagcacaagggtgcacgtgaagaatctccctatgataatggataccgccgcagcaggagctagagccagatcgttgtatccgacgacgagcgttatgtgacagatattgggaaagctatggtcaataacctgcttgacagatccttcgtcgactgcttgactttggttaaggttctcataactttctatatacctattatcttgtgtctactttataagtagcagtaaaaccttttgatgagtgtatttgttgaact

SEQ ID NO: 4525 - DNA, 594 bp, Zea mays
  Clone ID: TF_ZM4454.C1.o3.fg
atggactatcacctgcacacagtttcagccccgtcgtcgcatcagttccaagaaacaaaagggaaacatggaaaaagtcaagaaataacttcaagaaaagcttgttatctatgtggacgtgaaggtcattacttccgtaactatcttgagaagagttcactaccggatacctctgagataaagctatcccagtctctagacatggaatatgaacaaaaatgcgtagaaacttttatcaacatagtgaagaacaacaaaaggtatagaaaaacatttggatatatgagtagtccacctcaaccacaagcaaaagccccgaaaaacatggatacccaaacagaagaatcaagccagactcagctatatgagatacagacccccaatcatccctcattcccgattggtcaagcaaagttgactcgcaaagaactcaatgcaagaggtgcttgcttctactgcaagaatgaagaacatattattcatgaatgccccaagaagcgtctagaccgactaaagaagaagacggtgaagcaagacccaaacaataatccagaagaccaaccagttataagtacgatgatgaagattggttga

SEQ ID NO: 4526 - DNA, 3651 bp, Zea mays
  Clone ID: TF_ZM4992.C2.o1.fg
atgtcgggagatcacgccaagagggagatcgaaaccggcgacaagcccgcaagccttgggaaggctccatcaagggagtccggcaacaaagccaaggagggatcccctccctccatcaagttgcatcggagtggcgacaagaaaaagaagatgaagaaggtggtctactacgagaccgactcatcgtcaccctccacatcaagctccgaggcatccatcgcttctaagcgccatgagcgcaagaagtatagtaagatgccactttgctatccccgtatttctaagcgcactcctctactttccgttcccttaggcaaaccaccatattttgatggtgaggattattgtatgtggagtgataaaatgaggcatcacctaacctcactccacgcaagcatttgggacattgttgagtttggagcgcaggagtataataaggtgcaagagttaaagagtgccaaagagatttgggacgttctcaagacagcgcacgaaggggacgaggtgaccaagatcaccaagcatgaaacgattgagggagaactcggtcgattcgtccttaacaagggagaggagccacaagcaatgtacaaccggctcaagaccttggtgaaccaagtgcgcaacctcgggagcacaaaatgggatgaccatgaaatggtcaaggttattctacgatcccttgtatttcgtaatcccactcaagttcaattaatacgtggggatcctagatacatgctaatgtctctcgaggagcaacggaggggggaggactacaagccccgctctaagagggtgtgctacaaatgtggtaagcccggtcattttattgctaaatgtacaaattcaagtgatagtgataggggcgacgataagaagggaaataagagggaaaagaagaggtattacaagaagaagggcggtgatgcccatgtgtgtcgggaatgggactccgacgagagctctaccgactcctcctccgatgaggatgacaccaacatcgtcgtcaataagggactcctcttctccaacgtcggccacaagtgtttcatggctaaggacgacaaaaagaaggaagtagaaaagtgtgaaaacttgactaaggaacttaacatttgcaatgattcaattataagtcttagaaatgaaaatgctagtctaaatgctaagattgatgaattaaatgtttgcaatgatacaatttctagtcttagaactgaaaatgataatttaatttctaagattaaagaattgagtgtttgcaaagattctatttcctgtcttagaaatgataatgccatattacatgctaagatagaagaattaaatgtttgcaaaccctctacatctactgtcgagcatgtttccatttgcactagatgtagagatattaatgttgaggctattgatgatcaccttgccataattaaacaacaaaatgatcacatagctaaattaactgctaaaattaatgaacatgaacttgaaaatgaaaagtttaaatttgctagaagcatgctctataatgggagacgccatggtattaaagatggcattggtttccaacagggaagcaatgttaagcttaatgcccctaaaagattgtctaattttgttaagggaaaagctcccatggttcaagataatgagggctatattttatatcctgctaattatcctgagcacaagattaggagaattcatgctaggaaacctcataatgtttctcatcatgcttttatgtataaaaatgaggcttctagctctaggcattctactcgtgttaaaatgcctaaaaagaaaactcctgctgtatcaaatgagtctaacatttcatttaaaacttttgatgcatcatatgtgtttactaacaaatcagacaaagtagttgccaaatatgttgggggcaaacacaagggttcaaagacttgtgtttgggtacccaaggaaaaaccacaaacccaagagaccttaaagggattcttaagacgagctcaaaatgagttcggattaaggatcaaaaagataagaagcgataatgggacagagttcaagaactcacaaattgaaggctttcttgaggaggagggcatcaagcatgagttctcttctccctacacaccacaacaaaatggtgtagtggagaggaagaatagaactctattggacatggcaagaaccatgcttgatgagtacaagactctggaccggttttgggcggaagcaatcaacactgcttgctactccatcaaccggctctaccttcaccaaatcctcaagaagacatcatatgaactcctcaccggtagaaaatctaaatttgctcctaaggctgtagaaggctttttactcggttatgactcaaacacaagggcatatagagtcttcaacaaatccactagactagttgaggtttcttatgacattgtgtttgatgagactaatggctcccaagtggagcaaagcccatacaagcacaagatcaaccgtcatcttccaatcaagcatctccaccaactcaagatgaggaataggctcaagataataaggatgaagatcaagaagatgagccacctcaagaggaggacaatgatcaagggggagatgaggaaaatgaagacaaggaagatgatcaagaaatttagggtcaaagaccgccacacccaagagtccaccaagcaattcaatgagatcaccccgtcaactgcatccttggtgacattcataaggggggtagaggatgcactaagagactcggattgggtactggctatgcaagaggagctcaacaacttcacaaggaatgaggtatggtattcagttccacgtctcaatccaaatgttgtaggtaccaagtgggtattccgcaacaagcaagacgagcatggtgtggtgacaagaaacaaagcccaacttgtagccaaagctaggcttgagttaattcgtatattacttgcctatgctacttaccatggctttaagctctatcaaatggacgtgaaaagtgccttcctcaatggacctatcaaggaagaggtctatattgagcaacctcctcgctttgaatatggtgagtaccctaaccatgtgtataaactctcaaaggcgctttatggactcaagcaagccccaagaggatggtatgaatgcctgcgagatttccttatcactaatggcttcaaagtcggtaaagccgatcctattctctttactaaaattgttgcaaaagatttatttaaaatcgagatgtctatgatgggggagttgaagtatttcctaggatttcaaatcaagcaactccaagagggcaccttcatctgccaaacaaagtacattcaagacatacttaagaagtttgggatgaaggatggcaaacccatcaagacacccatgggaaccaatgggcatctcgacctcgacacgggaggtaagcccgtagatcaaaaggtataccggtcgatgataggatctttactctatttatgtgcatctcaaccggatattatgctttctgtatgcatgtgtgcaaggttccaagccaatcctaaggaagttcaccttagggccgtgaagagaatcatgagatacttagtttacactcctaagtttgggctttggtaccccaagggatccacctttgatttaatatga

SEQ ID NO: 4527 - DNA, 1555 bp, Zea mays
  unsure (1)..(1555): unsure at all n locations
  Clone ID: TF_ZmC210941_1
ngaccaacactaacatagtgtttattccagatggcaggaagagcgcgccgtggacagaatgagtgcattcctccaccaccaccgccgcctcctaccatgcaagaactgatggctcagcagaatgagattctgcgacagttggctcaacgtcagccaccacctcagcactatggtggtggtgatcaccatcagcgtcccccagcagcggccacttatcaggagttcctcagcactcagccgcctttgttcactcgggcagaggatccacttgatgctgatgtgtggcttagggtagtggaatccaaattcccactgcttactggagtttgttcagatgtggctaaggtctgtttcgccacccagcagcttcgcggacccgcgcgaacatggtggatccactttctcgctatgcagccagttgatcacgcagtggaatggggagaattcaaggcagcattcagaggacatcacataccggcaggcatcatggaccgcaagctcaatgagtttctggcacttactcaggggaatcgtactgtgttgcattacactcaggccttcaatgacctgtgtcagtacgtaggctatcttgctgacacagatgagaagaagagggataggttcaggagggcctcagtactaagctccgcgactgtctcaatacagtcagggccaatagctataatgagttagtcaacatggccatttctcaggaagactgcatcacagcctgccaggcagtccgccacacgtccgcccctatggaaggaccttcagctcagcctcagcgtttcaggattgtgtccgacactcagggtaggggacctcagcagtaaggccggtgggtgatccgactacaacagcagcagcaggcacccaaccgctctcagcccccagttcagaaggaacaacacctagccacaacagcagcagtatcgtcagaccaatgacaacagatgtttcacttgtggcagcactggacactacgccaagaattgccccaagaaccagcagaggcaggggcagaattccaatcagaaccaaggcaagaggcagaaagtacaagtgaggcaaggcagactgaacttcaccaccctagctaatagcaatgtctttggcttcatcaccatccgctaagattcagatcatccaccaagcttcggttcactgctcttcggctttgtcatccagtacataacaaagcgttataaggtaaattcaagtttcaaggaaaaggtaagcaaatgtatgagtttattaccggtttgaggtgacttcgagcttcgtcactagccaatcttcgtccaccctttgcccaaatttgagttatgaatctgttcccaatgcttcgggccaggctaaggatggcattcaagtccgctggtgataagctgaagttcggcctgtttacaatattcccgtgcatgcaaccagccttcataaaagcaacagctgtgccacgagaagctagcagagcacagaaatcaccatgcccagctatgacttcatcaagagcatcaacttcgcctttaatatgatcgaagatgcctggcag

SEQ ID NO: 4528 - DNA, 1049 bp, Zea mays
  Clone ID: TF_ZmC4527_1
agctgaaataattcgtgactacaagactggagatagtttatgctatgcttttattgaattcgatacaaaggaggcttgtgagcgtgcatatttcaagatggacaattgtctgattgacgatagaaggatccatgttgattttagtcagagtgtttcgaagctgtggggtcaattcagacaaagcaaaagaaatgcaaagaaagatgggtgttttaagtgtggcgcccctgatcacctagccagagactgcgatcaagacggtgagcagaaaaacaaaggcccaagttatgttctaaaagatgaaaatacacaacgtggtggaaatcaccgtagaagctatgatctagtatttgacgaagacgaagctgattgttctgaagagagagatcatgaaaatggccacagaagaaagaatcgaagaatagatgatcgaaaatcagagctaccacctcgtggtggtcgtgatagaaatagccatgagagaacacacagtgatgagaaaggaagcaagcatgggaaagatgataggaaccgaggggatcggaaacatgatgactaccacagttacagtagatccggtgacagaagctctggtagaaacgatgatcgtgattatagcaagcgccacgacagaagcagaagtggggaggaagagaagggctacagacgaagggataagtctgatggtgagcggcaccatagagacgatggctacgatcgccgcaggagagatgaagacagccacaggaaaaggagcccagatagtaaacatagaagagaagacggagggcaccatgtgagaaaccagcagtctgatgataggtcctacaaggagagaaggcacagagatggtagataagaaagtttctgcacgactcggttttcttgcctgctttccactgatgtctctataagctggtattcttagctcaacttttttttttttgtaagtcaatgtaactgcctggaatatgttgaattgttgtagtgtccagatctgaatctttttttgtgtgtttacagtttttgctggataatttattgcaatc

SEQ ID NO: 4529 - DNA, 2025 bp, Zea mays
  Clone ID: TF_ZmC10872_11
atgtcgggaaaatccgctaagagggagatggaaaccggcaagaaggccacaagccacgggaaggctccatcaagggagtccagcaccaaagccaaggagggatcccctccctgcgtcaagtcgcatcggagaggcgacaagaagaagaagatgaagagagtggtctactacgagatcgactcttcgttaccctttagatctgactctaacgcgacgtccatcacttctaagcgccaagagcgcaagaagtatagtaagatgccacttcgttatccccgtatttctaagcgcactccattactttccgttccattaggcaagccaccatgttttgatggtgaagactattctatgtggagtgataaaatgaggcatcatctaacctcactccacgaaagcatatggaacattgttgagtttggagtgcaggtacctaaggtaggggacgacggctacgactcggatgaggtcgcccaaatccgacactttaactcccaagcaactactatactccttgcctccttatgtcgagaggagtctaataaggtgcaagggttaaaaagtgccaagaagatttgggacgtcctaaagaccgcgcacgaaggagatgaggtgaccaagatcactaagcgggagacgatcgagggggagctcggtcgattcatcctcaaccaaggagaggagccacaaacgatgtacaactggctcaagaccttggtcaatcaagtgcgcaacctcgggagcacaaaatgggatgaccatgaaatgctcaaggttattcatagatccctcacattttgtaatcccactcaagttcaattaatatgtggtgatcctagatataagctaatgtctctcgaggaggtaattggaaaatttgtgagctttgaattaatgatcaaaaactccaaacacatcgtcaacttggagcaaggcgccacctcaacgcccaaggtgcaacccgtcgcattcaaagcgacagaagagaagaaagaagagtctacatcaagtaggctccccatcgacgcctctaagctcgacaatgaggagatggcgctcatcatcaagagcttccgtcaaatcctcaagcaaaggagggggaaggattacaaaccccgctccaagagggtgtgctacaaatgtggtaaacccggtcattttattgctaaatgtcctatgtctggtgatagtgacaggggcgacgacaagagggggaagaagaaggagaagaagagatactacaagaagaagggcagcgatgcccacgtatgtcgggaatgggactccgatgagagctccattgactcctccgacgaggatgccgccaacattgttgtcaacaagggacttctcttccccaacgtcggccacaaatgcttcatggcaaaggatggcaaaaagaagaaggtacaaactagaaccacccccaagtatactacatctagtgatgagggtagttctagtgaagatgaagatgacttgcttactctttttgctaaccttaacatgcaacaaaaagaaaagttaaatgaattgataggagctattcatgataaggatgaacttttggatagccaagaggaattccttattaaagaaaacaaaaggcatgttaaatttaaaaatgcttatgctcaggaagtagagaaatgtgaaaaattatctaaggagcttagcatttgccatgaatcaatttctaaccttagaactgagaatgctaatttaattgctaatgttgaaaagttaaatgtttgtaatgattcaatttccaatcttagaaaagaaaatgctagtctaattgctaagattgacgaattgaatgtttgcaaaaaatctatttcctgtcttaaaaatgagaatgccacattacatgctaagatagaagaactaaatgtttgcaaaccatctacatctactattgatcattgttggggacttgttctcaaatgctgtgaattaagaataaggcaacacaaaatgttaaagtttaaagcccttcgtcctttgaagcattatttcccttag

SEQ ID NO: 4530 - DNA, 2989 bp, Zea mays
  Clone ID: TF_ZmC951_370
cgttgctgtcgaagaggtgtatgcaaaatggttgaacactcaaaccttacatacttaaccgttttcatcgttttacccaatttggcatgtttgaggtcgatgttggactctaaaccattaagtcaacttgacttgatctagattgacatatgtgagctccaactcccttgttcatttctcgagcttgatcttgagccttattacttacaccacataactgtagatgttaacttattagttgtaagtcatgtccttatgtagtgatccttgatgcaccataactcttcttaactcgatcaaccttgactttgcaagtcttcttcttcacccctggctttgggttcctagtctccttgaccttctcccgtgcactcggtacctcgaagctcttcttgcctccatcattggcttgatcagttgtcttctcgtcgatgcttatgtaagcaatggggccgaataaatccatgtggagtagctctagcggcctgtcgatcgtcatgatgttcttgtgaggatgatgggagccaacttgcttccctgcttgacatgcgctacaaaccctgtctttctcaaaatgaacatttgttagtcccaaaatgtgttctccctttagaagcttgtgaagattcttcattccaacatgggctagtcggcgttgacagagccaacccatattagtcttaacaatcaagcaagtatcgagttcagcaatattgaaatcaactaagtatagctgaccctctaatactcccttaaatgctactgaatcatcacatcttctaaagacagtaacacctacatcttgatttccatccccgaatgtaatggctctttgggggtctttgtttttctcgtaggaggagaacattcttttctcccctgtcatgtggtttgtgcatccactattaattatccaacttgagcccccggattcataaaccttgggtacccaaacacaagtcttggagcccttgtgtttgcccccaacatatttggcaactactttgcctgatttgttagttagcacataagatgcatcaaaagtcttaaatgaaacattagattcatttgatgcagtaggagatttctttttaggcattttaatatgagtggaatgcctagagctagatgtctcattcttatacatataagcatggtgagaaacataatgagacttcttagcatgaattctcctgattttgtgctcgggataaccaacaggatataaaatgtaacccttgttatcgtgagccacgggagccttgccatctagtgcaaatagaaacatgatcaacagtagatgtagatgtttgcaagcatttaattcatcaatcttagcatgtaaaatagcattctcatttctaagactggaaatagcatcattgcaaacatttaaatctttagccttagaaattaatctagcattttcatccttaaggctagaaattgattcattcaatttatcaatcttagcaataaaactagcattttcatttctaagattggtaattgaatcatgacaaacatctgatttttcaaccttagcaattaaactaacattctcagttctaaggttggagatagtgtcatggcaaatgataagctctctagtcaagttttcacatttttctatctcttgagcataagcatttttcaccttaacatgctttttgttttccttaataaggaattcctcttggctatccaagagtccatccttctcatgaatggcacctatcaattcattcaatttttctttctgttgcatgttaaggttggcaaaaagggtaagcaaattatcttcatcttcactagagctaccctcatcactagatgttgtatatttggtggaggctctagattttaccttcttccttttgtcgtcctttgccatgaagcacttgtggccgacgttggggaagagaagacccttgttgacggcgatgttggcggcatcctcgtcgaaggaggagttggtggagctctcatcggagtcccattcctgacaaacgtgggcatcaccacccttcttcttgtagcacctcttcttctccttctttcccctcttgtcgtcgcacctgtcactatcactagacataggacattttgcaataaaatgaccgggcttaccacacttgtagcacacccttttggagtggggtttgtaatctttccccctcctttgcttgaggatttggcggaagctcttgatgatgagcgccatctcctcgttgtcgagcttggaggcatcgatggggagcctacttgatgtagactcttctttcttctcctccgtcgctttgaatgcgacggattgcacctcgggtgtagaggtgctgccttgctccaagttgacaatttgtttggagcctttgatcatcaattcaaagctcacaaactttcctataacctcctcgggagacattagcttatatctaggatcaccacgtattaattgaacttgagtgggattacaaaatatgagtgatctaagaataaccttgaccatttcatggtcatcccattttgtgctctcgaggttgcgcacttgattcaccaaggtcttgagccggttgtacatggcttgtggctcctctccttggttgaggacgaaacgaccgagctccccctcgatcgtctctcgtttagtgatcttggtcacctcatctccctcgtgcgcggtcttgagcacgtcccaaatctccttggcgctcttcaacccttgcaccttattatactcctctcgacatagagaggcgaggagtatagtagtggcttgggagttgtagcatcccaaaaattcaaatcttgaaattttctcaaacttgcttacaaatgtttcaccattatccccctcaaattctttccagaaatactgcccagatatttcccgagtaatccccttcaagttctttccagaaatactgcccaaatattccaccgatatatctctagatattttcctcctgagaaataccttcagaatcat

SEQ ID NO: 4531 - DNA, 2030 bp, Zea mays
  unsure (1)..(2030): unsure at all n locations
  Clone ID: TF_ZmC10764_3
gtagttacagctagatgcatccggtgangactagattggttctcgactgcttgagccttgaggacagtaaatgattctgccatccggtaatggaagctgaattttgtttagggttaagatttgcatattggtatgttatacaatatattcagtgatcatttatggacacttgaaggaccaatgctgggtgctggagcagaaaattgatgctagcctcaccagtgtggaccctttcagccagctccatgcgatgcattgcagttttgggaagacaaactgggtaactaggagcccagcttaccagcagctcagacttccactgttgttaccatggaaatgcaagtcgtttggctttaggtttgtgcattggtttaaatgatctggtatgcaaactagagaatatggcagtggacatacctgctacattgtcctgtcaccagaatatgctgacatttttgagaagttagttcatgtcggtaacggtaaaattggttccttgttggaaatagcccagttctccaaaacatggttcccagaggctctatagctttgctccttgtccgtgttaacgagctttgctgtcttgggactagactttttcatgaaggtagttacagctagatgcatctgtgtcaggattatgatttgttcttgaattaccgagatccaggaataacctaatctcagtgcttctcttctgagatcatggtggagagacacactaaccgccacaggggctttggcttcgtgacatttgaagatcggagggcagttgacagcgctattaaagagatgcatggccaagaaatagatggccgtaccatctcagtgaacaaggctgagcctaagatgaatacagatgacacaaggtatgccggtggtggtggacgaggagagtatcgtggtggtagaggtgatggtccaccccctggcaattgctttgagtgtggtcgtcctggtcattgggtccgtgactgccctagtgctgctggcggtcgttctggcaggttcccatccaagttcagtggtggcagtggcgttggcaggggagaccgcttttctggttcagataggtttggtgatcgttacatggatgatcgttatgatggtggtcgctatgggtaccgtgatcaagctgatgcaagggacaggtatgctggtggccgagatcgctatgccaatgaccgttacccatctggtggcgatcactttggtggagacaggtatggaggtggtccggattgttatgtgccaagtggttatggtagggagcgagaaagaagctacgagagagatggagttcgtggtggtggtggcggcggcggcggctatgataggagtggcccaaggggtggtggtgggtatgacagggatggtccacgcggcggtggaggaagtgcacgctatgatggaggaaattacagggagaggcctgggccatatgatcgccctagcaggggaggacgttttgatgatcgctactgatgaactgcctgtagactcaagctccttgtcttggtagtttaatgtttgcagttttgcatggccgaatgcttaatgggctatggaagatgcttaatttatccctcttcggcactttaatgtctgctctttatttcaaccagtactggggcactggtttgccttgataagtttatccagctgacagtttttgcatgagatgagtcatgctctgggctattaccctgcctgttggatatttcagtagctgaggtttgcagtgatcgattgtcattgttgatctgaatatctggtatgcgtggactatgtttaaagtgattgcctgtcatcattggtctatatagttggtgagcatatatatgttcagtgtcggtgcttgtcattgttgttggtctggatatctaggcttgcaaggatatatttgcagggctgagttgcaagggcttaacagaacaatagccaaagtaccttatattttagtagctggagaccatgttaattatgctataattagctggagaccatgtaaatttagcttagtttttgtc

SEQ ID NO: 4532 - DNA, 1735 bp, Zea mays
  unsure (1)..(1735): unsure at all n locations
  Clone ID: TF_ZmC10764_5
aggaattcggcacgaggctcttctgaggtaatgtccttttgttgtctgtcagttatctctaaacttattagaagtgattctgcttactgtaacctatttcacgtagtggatactattaattgatatggcgtgtttcgatggttctctcatgtatcactgtgcctcaaggtatcagtgatacaagtgacaacttttttgtgtattactatgctttgtatcaaataatataaagatacaatgcaattttaataaaataggaacaaataatgtttgcacaaccttatttgtaatggatggcgaattattttgctaaattaaataatttcttgacctttagttcatcttaaaattcaagtacttggatggtgcaaataattattcctttgtgtttctgtactattgtaacaattatttctaggccacttgttactgatatttatattcccatcacttangttggtaactgtttattttccccacattgattacgatcatgagtgtttctacttgtagggtacctcgaggccggccggggttccctctcgcagtcgcagacttctcttctcgccaaaccctaatcctgctcctgcctttctcgtctccaaccgttggccgagcagtagcggtggcgatggagggcaaggaagaaggtcggatcttcgtgggcggcctgtcgtggcaaacggacgagcgcaagcttgaggacgcctttggccgcttcggcaaggtcgtcgacgcccagatcatggtggagagacacactaaccgccacaggggctttggcttcgtgacatttgaagatcggagggcagttgacagcgctattaaagagatgcatggccaagaaatagatggccgtaccatctcagtgaacaaggctgagcctaagatgaatacagatgacacaaggtatgccggtggtggtggacgaggagagtatcgtggtggtagaggtgatggtccaccccctggcaattgctttgagtgtggtcgtcctggtcattgggtccgtgactgccctagtgctgctggcggtcgttctggcaggttcccatccaagttcagtggtggcagtggcgttggcaggggagaccgcttttctggttcagataggtttggtgatcgttacatggatgatcgttatgatggtggtcgctatgggtaccgtgatcaagctgatgcaagggacaggtatgctggtggccgagatcgctatgccaatgaccgttacccatctggtggcgatcactttggtggagacaggtatggaggtggtccggattgttatgtgccaagtggttatggtagggagcgagaaagaagctacgagagagatggagttcgtggtggtggtggcggcggcggcggctatgataggagtggcccaaggggtggtggtgggtatgacagggatggtccacgcggcggtggaggaagtgcacgctatgatggaggaaattacagggagaggcctgggccatatgatcgccctagcaggggaggacgttttgatgatcgctactgatgaactgcctgtagactcaagctccttgtcttggtagtttaatgtttgcagttttgcatggccgaatgcttaatgggctatggaagatgcttaatttatccctcttcggcactttaatgtctgctctttatttcaaccactactggggcactggtttgccttgataagtttatccagctgacagtttttgcatgagatgagtcatgctct

SEQ ID NO: 4533 - DNA, 1109 bp, Zea mays
  Clone ID: TF_ZmC10764_7
ttctgagcctaaaatgaatacagatgacacaaggtatgccggtggtggtggacgaggagagtatcgtggtggtagaggtgatggtccaccccctggcaattgctttgagtgtggtcgtcctggtcattgggtccgtgactgccctagtgctgctgccggtcgttctggcaggttcccatccaagttcagtggtggcaggggagaccgcttttctggttcagataggtttggtgatcgttacatggatgatcgttatgatggtggtcgctatgggtaccgtgatcaagctgatgcatgggacaggtatgctggtggccgtgatcgctatgccaatgaccgttacccatctggtggcgctcactttggtggaggcaggtatgcatttggtcctcattgtggtttagtgatcgttacatggatgatcgttatgatggtggtcgttatgggtgtcgtgatcaagttgatgcaagggacaagtatgctgggggccgagatcgttatgccaatgatcgctactccactggtggcgatcactttgacggagacaggtatggaggtggcccggatcggtacgcgccaaatggttatgggagggaacgagaaagaagctacgagagagatggagttcgtggtggcggtggctatgataggaatggctcaagaggtggtggaagctatgacagggatggccctagaggcggcaagggtggtggctatgtcagggatggcccacgcggtggtgttgctgatcgttatggtggtggaggacctgcacgctatgatgggggaagttacagggacaggcctgggccatatgatcgccctagcaggggaggaggtcgttttgatgatcgccactgatgaactgcttctagactcgagcccctggtcttgtagtttagctttttgcagttttgcatagcttaatgcttaatgggctatggaagatgcctaatttacccccctctttggcacttcaatgtctgctctgtatttcaaccagtacttgggcaccggtgttgccttctcgataagtttatcaagctgactgtttttgcaaaaaaaaaaaaaaccaaaaaaaaagaaaaaaaaaaaactcgagggggggg

SEQ ID NO: 4534 - DNA, 3851 bp, Zea mays
  Clone ID: TF_ZmC119_1388
ctaagtgttcactacaagcattaacatcaaaatccttacaccttttaaagaagaaatggtttcattacaagtagaaagttcacaagaaagtattccatttcttttaacttctagagcaagtgaattttgtgtactaacaaatttatcatgttcttcatataaaaggtcttcttgtttctctaagattctatccttttcatttaaggcatcaatcaattcattaatcttagctatcttagttctatccaatcccttgaataaactagagtaatcaatttcatcctcactggattcatcatcactagaagaatcataagtattagcattacgagtgatcaccttcttttcccttgccatgaggcaagtgtgatgctcgttggggaagagagccgatttgttgaaggcagtggcagcgagtccttcgtcgtcggagtcggacgaagagcaatccgaatcccactcctttccaaggtgtgcttcgcctttggccttcttgtaaaccttcttgttctctctcttcccatttttcccttgctcctggtcactatcattttcgggacagttagcaataaaatgaccaagcttaccgcatttgaagcatgatcgctttcccttggtcttggccttgcttggctgtccctttcgaccttttagcgccgtcttgaatctcttgatgatgagagccatctcttcatcattaagaccggcagcctcaatttgtgccaccttgctgggtagcgcctccttgctccttgttgcttttagagcaatgggttgaggctcgtggagtggaccgttcaacgcgtcgtcgacgtatcttgcctccttgatcatcatccgcccgctcacgaattttccaagtacttccttgggcgtcatcatcgtgtacctgggattctcacgaatattgttcacgagatgaggatcaagaacggtaaaggacctgagcattaggcggacgacgtcgtgatccgtccaacgcgtgcttccgtagctccttattttgttgataagggtattgagccggttgtaagtttgagttggctcctctccccttatcatggcgaatcgtccaagctcgccctccaccaactccatcttggtgagcatggtgatgtcgttcccctcgtgagagatcttgagggtgtcccatatctgcttggcattgtccaagccgctcaccttattgtactcttccctgcacaaagacgctaagagaacagtagtagcttgtgcatttctatgaatttgttcatttataagcaaagggctatccgagctatcaaatttcattccattctccacaatctcccatatgcttggatggagagagaataagtgactacgcattttgtgactccaaaatccgtagtcctccccatcgaagtgtggaggtttgccgagaggaatggaaagcaaatgtgaattcgaactatgttgaatacgagaataatcaaatgaaaagttcgaattgaccgtctttttatagtcgttgtcatcatccttttgggaagaagtagactcatcactatcgtcgtagtagatgatctccttgatgcaccttgtcttcttcttcttcccttcctttcgtctatgccccgagccagagtcggtaggcttgtcgtccttcggctcgttgacgaaggattccttctctttgtcgttgatcacaattcccttccccttaggatccatctcttcgggcggtaagtccctttgtgaagagaacggcttcgataccaattgagagcacctagaggggggggtgaataggtgatcctgtaaaaacttaactttgctcttgatttgcactttgttcatccattgcataaattcacattttaagcacttgagttggcactcaatcaccaaaatacttagaaatggcccaagggcacatttccctttcaggaaggatgacaccacagttatcggatgagactcgaagtagtgtcgcaacttccaccgcgttaggatcaccgcgtacagcagcttctgaatttgtggatagcggatcttggtctcggacagtacctcgctgatgaagtagactagcctctggacgggcaatgcatgcccctcttctcgtctctcaactacgattacggcgctaaccacctgagtggtcacggcgacgtagattaagagggcttctccggcagcggggggcaccaagatgggcgcgttcgtgaggagcgcctttaggttcccgagggcttcctcggcctcaggggtccaagtgaagcactcggccttccttaagaggcggtacagaggcaggcctcttttgccgaggcgcgagacaaaacggctcagagccgcaagacatcccgtgactctctgtatgcctttcaaatccttgatgggccccgtgctggtgatggtcgcgatcatctccgggttggcctcgatgccccgctcggagacgatgaaccccaagagcatgcctcggggaaccccgaagacacactttttgggattgagcttcacgcctttcgccttgagacatcggaatgtcacttcaaggtcggaaaggaggttggaggcttccctcgtcttgactacgatgtcatcgacgtaggcctcgaccgttcggccaatgtgttcgccgaacacatggttcatgcactctttgatgaaccctgccgccattagcttgtggatctcctcgcctatggctctgcgcttttcttcgtcgaatcggcgcagaggctgcttcacgggtcgggctccagctcggatatccagcgagtgctcggcgacatccctcggtatgccgggcatgtccgaggaactccacacgaaaacgtcggcgtttgcacggagaaagtcgacgagcactgcttcctcggggaactctcctgcctggtgatcttccttattatcgtcgtcgcgagccctgccaccctccgcgggtggcccagccttgtgaaagtggcgccgaagcatggcgcactcctcaagggtgtgcttgacgggcccctgatgataggggcacggctccttgagcatcttatcgaagaggttggcacctccaggaggtttccgagggttcttgtactcggcgacagcgacaaggtccgcgtcggcggcgtcgtgcttcgcttgcgacttcttcttgcctttcttcttggcgccgcgctgagttgacgcctcctggccagaggcgaacttggtggcgatgtccatcagctcgctcgccctggtgggggtcttgcgacccagcttgctcaccaggtcgcggcaggtggtgccggcgaggaacgcgccgatgacatccgaatcggtgatgttgggcagctcggtgcgctgcttcgagacggctgtcaaccgatcccagggtgaccgcatacgataccccagagggtttggactcgcctctacgagagcgtccaccaaagcgaagtcgcttggtgggtcgaggctgaatccaaaaggcgtgagatgggaatcggttggtacctcttggtcgacgggcggtgacgaagtcacgtcaggggctgactgcaccgtcgtctcaggtacaagggtgatgcccagcaagtccttcgcgagcgtgctggcgtcgtccgtttgcttgggattggcgtgttgcggggagacgacgctcgtcttcgtctcagacgcgaggtcgatgcccgacgtgccccccgttggggcgccggcgccgtcgactcgctcgacagccgacgaggtgccgcctcctgcttggccttggttgccccgcctcctcctccgtcggcgggggaggggacggggcgagctcgaatgttgttcttccaccacgcggggaagacgtcgttgattccgccgccggcgggcgggcgggctggcgggctgacggccgccat

SEQ ID NO: 4535 - DNA, 5016 bp, Zea mays
  Clone ID: TF_ZmC29741_3
tcaatccaagttccgcgaatctaagacatttagctcactacgcatcctgcaaaaggtcttctcatctagaggcttggtaaagatatcggctagttggttctcggtgctaacatgaaacacttcgatatctcccttttgctggtggtctctcaaaaagtgatgccggatgtctatgtgctttgtgcggctgtgctcaacaggattttccgccatgcggatagcactctcattatcacataggagtgggactttgctcagattgtagccaaagtccctgagggtttgcctcatccaaagtagttgcgcgcaacactgtcctgcggcaacatactcggcctcagcggtggatagggcaacggaagtttgtttcttagagttccatgacaccaggaaccttcctaagaattggcacgtccccgatgtactcttcctatcgaccttacatccagcatagtcggaatctcctttgttgaggtcggtgtgtccgtcagttcccatcggcgtttttgcgggcttggcatccttcatcccaaacctctttagcaagtcttgcgtgtactttgtttgggagatgaaagtgtcgtccttgagttgcttcacttggaacccaaggaagtagttcaactcgcccatcatcgacatctcgaatttctgtgtcatcaccctgctaaactcctcacaagactttttattagtagaaccaaatattatgtcatcgacataaatttggcacacaaacaaatcaccatcacatgtattagtgaaaagagttggatcggctttcccaaccttgaaagcattagcaattaagaaatctctaaggcattcataccatgctcttggggcttgcttaagtccatagagcgccttagagagcttacacacgtggtcggggtaccgttcatcctcgaagctagggggttgctctacgtacacctcctccttgattggcccgttgaggaaagcgcttttcacatccatttggaacaacctgaaagaatggtgagcggcatatgctagcaaaatacgaatggactctagcctagccacaggagcaaaggtctcctcaaagtccaaacctgcgacttgggcataaccttttgccacaagtcgagccttgttccttgtcaccacttcgtgctcgtcttgtttgttgcggaacacccacttggttcccacaacattttgcttaggacgaggcaccagcgtccaaacttcattcctcttgaagttgttgagctcctcttgcatggccaacactttaccaatcgccatggttcgtatagcggccgtaggaacatcttcttcatctacatcatcaagatcaacaacttgctctcttggagagccattagtctcatcaaatacaacgtcgctagagacttcaactaaacccgatgatttgttgaagaccctatacgcctttgtatttgaatcataacctaacaaaaacccttctacagctttgggagcaaacttagaatttctacccttctttactagaatgtagcatttactcccaaatacacgaaagtacgatacattgggtttgttaccggttagtagctcatacgacgtcttcttgaggaggcaatgaaggtagaccctgttgatggcgtggcaagccgtattcacggcttccgaccaaaagcactcgggggtcttgaactctcctagcatcgtcctcgccatatcgatgagcgtcctattcttcctttctaccacaccattttgttgtggtgtgtagggagcggagaactcgtgcttaatcccttctttctcaaggaactcctccacttgaaggttcttgaattcggacccattgtcgctccttatcttcttcaccttgagctcaaactcgttttgagctctccttaggaagcgcttgagggttccttgggtctcagacttatcctgtaaaaagaatacccaagtgaagcgggaaaaatcatccacaatgactaaaccatacttacttccccctatgcttagataagcgacgggtccgaagaggtccatatgcagcagctccagaggtcttgaggtggtcatcacattcttgctgtgatgtgctcctcccacttgtttacctgcttgacaagctgcacaaggtctatctttttcgaattgcacgttagtcaaacctatcacgtgttctccctttagaagcttgtgaaggttcttcatccccacatgtgctaagcggcgatgccacagccagcccatgctagtcttagcgattaagcatgcatctagaccggcctcctcttttgcaaaatcaactaaataaagtttgccgtctagtacacccttaaaagctagtgaaccatcacatcttctaaagacagacacatctacattagtgaatagacaattatatcccatattgcataattgactaacagatagtaaattatatccaagagactcaactaaaaacacattagagatagagtgctcattggatattgcaatcttgcctaaacctttcaccttgccttggttcccatcaccgaatatgattgaatcttgggaatccttattcttgacgtaggaggtgaacatctccttctcccctgtcatatggtttgtgcatccgctgtcgataatccagcttgagcccccggatgcataaacccaactcttgttgggtcctacaaggttagtcacaatttccttagggacccaaatgcaagttttatcacccttgcattttgcccctaattttctagcaattatcttcctatcctttctacaaatagcaaaggaagcatttaagacatgataaattgtagaaggttcattaactttcctaggagtattgacaacatttctcctaggcatatgatgaacaacatttcttctaaacacatttctaccatgcatataggaagaactagaagcaaacatggcatgagagtcaaaagcattataagcattacaactcctatcatcatgaacatttctagaaaattttctatcatggtacatgaaggcatggttctttttagcattacttgccataggggccttccctttctcctttgtggagatggaagccttatggcttgttaagttcttgacttccctcttgaagccaagaccatccttaattgaggggtgtctaccaattgtgtaggcatctcttgcaaattttaatttgtcaaattcactttttctaatcttaagttgggcattaagactagcaatttcatcatttaattttgcaatagaggctatgtgttcactacaagcattaatatcaaaatctttacacctattgcaaataacatcattttctacacaagatgttgatttactagctatttctaacttggcattcaaatcatcattaatgcttcttaagttagaaattgtctcatggcaagaagataattcacatgaaagcatttcatttcttttaacttctaaagcatgagatttttgtgcttctataaatttgtcatgttcttcatacaacaaatcttcttgtttttctagaagcctattcttatcattcaaggcatcaattaattcattaactttatctaccttggttctatctaggcccttaaatagacatgaataatctatttcatcctcatcactagattcatcctcacttgaagaagcataagtagagtctcgagtacataccttcttctcccttgccataaggcatgtgtgacgttcgttggggaagagggataacttgttgaaggcggtggcggcgagtccttcattgtcggagtcggacgaggagcaatccgaatcccactccttgccaagatgagcctcgccctttgccttcttatagtttttcttcttctccctcttgttcccttgatcctgatcactatcattgtcgggacagttagcaataaaatgaccaagcttaccgcatttgaagcatgagcgcttctccttggctttggtcttgcttggctgtcccttgcgacctttaagcgccgtcttgaatctcttgatgatgagggccatctcttcatcattaagtccagccgcctcgatttgtgccaccttgctaggtagcgcctccttgcttcttgttgcctttagagcaaggggttgcggctcgttgatcggaccattcaaagcgtcgtccacgtaccttgcctccttgatcatcattcgcccgctcacgaattttccaaggacttcttcgggcgacattttggtgtacctaggattctcacgaatattattcaccaaatgaggatcaagaacggtaaaggaccttagcatcagtcggacgacatcgtggtccgtccatcgcatgctttcgtagctccttattttgttgataagggtcttgagccggttgtatgtttgtgttggctcctcgccccttatcatcgcgaaccgtccaagctcgccctccaccaactccatcttggtgagcaaggtgacgtcgttcccctcatgagaaatcttgagggtgtcccagatctgcttggcgttatccaagccgctcactttgtggtattcatccctgcacaatgaagctagaagaacagtagtagcttgtgcattcttatgaatttgttcattaatgaacatgggactatccgaactatcaaagtgcattccactctctacaatctcccatatactaggatggagagagaacaaatgactacgcattttgtgactccaaaatccgtagtcctctccatcaaaatgaggaggtttaccaagtggaatagataataaatgagcatttgcactttgaggaatacgtgaataatcgaaagaaaagttcgagttaaccgtctttcgtttgtcgtagtcgttgttgtcgttttccttgtgggaagaagtggactcatcactgtcgtcgtagtagacgatctccttaatgcgtcttgtcttcttcttcttcccatctttgcgtctgtgacccgagcccgagtcggtagtcttgtcatccttcagatcgttgacgaaggactccttctctttgtcgttgatcacgattcccttccccttaggatccat

SEQ ID NO: 4536 - DNA, 2768 bp, Zea mays
  Clone ID: TF_ZmC29741_36
aagctattaagcaggtcgactctagaccgacttctttttttgcaaaatcaactaaataaaggttgccgtctaatacacccttaaaagctagggaaccatcactttttctaaagacagacacatctacattagtaaatagacagttataccccatattgcataattgactaacagatagtaaattatatcctagagactctactaaaaacacattagaaattgagtgctcatttgatattgcaattttacctaacccttttaccttgccttgattcccatcaccgaaaataattgaatcttgggaatccttattcttgacgtaggaggtgaacatcttcttctcccccgtcatatggtttgtgcatccgctgtcgataatccagcttgaacccccggatgcataaacctgcaaggcaaatttaggcttgggacttagtacccaactcttgttgggtcctacaaggttagtgcaaatattccttagggacccaaatgcaagttttgtcacccttgcattttgcccctaatttcctagcaattaccttcttaccctttctacaaatggcaaagggagcattgcaagcataataaatggtagaaggtttgttcacaacttttctaggagcatgagcaaaatttctcctaggcatatgcacaacatgagaactagaagcagtcatagcataagagtcataagcatgtgaatcaaaatcattataagcatttctagcatgtttcctatcatagtacaagaaagcatggttccttttagcactactaaccataggggccttccctttctccttgacgaagatggaagccttatggcttgttaagttcttggcttctctcttgaagccaagaccatccttaattgaggggtgtctacccactgtgtaggcatcccttgcaaattttattttatcaacttcactcttgctagtcttaagttgagcattaagactagccacttcatcatttagttttgaaattgaaactaagtgttcactacaagcattaacatcaaaatccttacacctagtgcaaattgtaacattttcaacatacgagttacttgctacttctagtttagcagttaaatcgttaatttcaccttttaaagaagaaatggtttcattacaagtagaaagttcacaagaaagtattccatttcttttaacttctatagcaagtgaattttgtgcactaacaaatttatcatgttcttcatataaaaggtcttcttgtttctctaagattctatccttttcatttaaggcatcgatcaactcattaatcttagctatcttagttctatccaatcccttgaataaactagagtaatcaatttcatcctcactagattcatcatcactagaagaatcataagtattagcattacgagtgattaccttcttttcccttgccatgaggcaagtgtgatgctcgttggggaagagagccgatttgttgaaggcagtggcggcgagtccttcgtcgtcggagtcggacgaagagcaatccgaatcccactcctttccaaggtgtgcttcgcctttggccttcttgtaaaccttcttgttctctctcttcccatttttcccttgctcctggtcactatcattttcgggacagttagcaataaaatgaccaagcttaccgcatttgaagcatgatcgctttcccttggtcttggccttgcttggctgtccctttcgaccttttagcgccgtcttgaatctcttgatgatgagagccatctcttcatcattgagcccggccgcctcaacttgcgccaccttgctaggtagcgactccttgctcctcgttgcctttagagcaatgggttgaggctcgtggagtggaccgttcaatgcgtcgtcgacgtatcttgcctccttgatcatcatccgcccgctcacgaattttccaagtacttcctcgggcgtcatcatcgtgtacctgggattctcacgaatattgttcatgagatgaggatcaagaacggtaaaggacctgagcattaggcggacgacgtcgtgatccgtccaacgcgtgcttccgtagctccttattttgttgataagggtcttgagccggttgtaagtttgagttggctcctctccccttatcatggcgaatcgtccaagctcgccctccaccaactccatcttggtgagcatggtgatgtcgttcccctcgtgagagatcttgagggtgtcccatatctgcttggcattgtccaagccgctcaccttattgtactcttccctgcacaaagacgctaagagaacagtagtagcttgtgcatttctatgaatttgttcatttataagcatagggctatccgagctatcaaatttcattccattctccacaatctcccatatgcttggatggagagagaataagtgactacgcattttgtgactccaaaatccgtagtcctccccatcgaagtgtggaggtttgccaagaggaatggaaagcaagtgcgaattcgaactatgttgaatacgagaataatcaaatgaaaagttcgaattgaccgtctttttgtagtcgttgtcatcatccttttgggaagaagtagactcatcactatcgtcgtagtagatgatctccttgatgcgccttgtcttcttcttctttccttccttccgtctatgccccgagccggagtcgataggcttgtcgtcctttggctcgttgacgaaggattccttctctttgtcgttgatcacgattcccttccccttaggatccat

SEQ ID NO: 4537 - DNA, 4881 bp, Zea mays
  Clone ID: TF_ZmC4916_368
atggatcctaaggggaagggaattgtgatcaacgacaaagagaaggaatccttcgtcaacgagccgaaggatgacaagcctaccgactccggctcggggcatagacggaaggaagggaagaagaagaagacaaggcgcatcaaggagatcatctactacgacgatagtgatgagtctacttcttcccaaaaggatgatgacaacgactacaaaaagacggtcaattcgaacttttcatttgattattctcgtattcaacatagttcgaattcgcatttgctttccattcctcttggcaaacctccacacttcgatggggaggactacggattttggagtcacaaaatgcgtagtcacctattctctctccatccaagcatatgggagattgtggagaatggaatgaaatttgatagctcggatagccctatgcttataaatgaacaaattcatagaaatgcacaagctactactgttctcttagcgtctttgtgcagggaagagtacaataaggtgagtggcttggacaatgccaagcagatatgggacaccctcaagatctctcacgaggggaacgacatcaccatgctcaccaagatggagttggtggagggcgagcttggacgattcgccatgataaggggagaggagccaactcaaacgtacaaccggctcaagactcttatcaacaaaataaggagctacggaagcacacgttggacggatcacgacgtcgtccgcctaatgctcaggtcctttactgttcttgaccctcatctcgtgaacaatattcgtgagaatcccaggtacacgatgatgacgcccgaggaagtacttggaaaattcgtgagcgggcggatgatgatcaaggaggcgagatacgtcgacgacgcgttgaacggtccactccacgagcctcaacccattgctctaaaggcaacgaggagcaaggagtcgctacctagcaaggtggcacaagttgaggcagccgggctcaatgatgaagagatggctctcatcataaaaagattcaagacggcgctaaaaggtcgaaagggacaaccaagcaaggccaaaaccaagggaaagcgatcatgcttcaaatgcggtaagcttggtcattttattgctaactgtcctgaaaatgatagtgaccaggagcaagggaaaaatgggaagagagagaacaagaaggtttacaagaaggccaaaggcgaagcacaccttggaaaggagtgggattcggattgctcttcgtccgactccgacgacgaaggacttgccgccactgccttcaacaaatcggctctcttccccaacgagcatcacacttgcctcatggcaagggaaaagaaggtaatcactcgtaatgctaatacttatgattcttctagtgatgatgaatctagtgaggatgagattgattactctagtttattcaagggattggatagaactaagatagctaagattaatgagttgattgatgccttaaatgaaaaggatagaatcttagagaaacaagaagaccttttgtatgaagaacatgataaatttgttagtgcacaaaattcacttgctctagaagttaaaagaaatggaatactttcttgtgaactttctacttgcaatgaaaccatttcttctttaaaaggtgaaattaatgttttaactactaaactagaagtagcaagtaactcttgtgttgaaaatattacaatttgcactaggtgtaaggattttgatgttaatgcttgtagtgaacacttagtttcaatttcaaaactaaatgatgaaatggctagtcttaatgctcaacttaagactagcaagagtgaagttgataaaataaaatttgcaagggatgcctacacgattggtagacacccctcaattaaggatggtcttggcttcaagagagaggccaagaacttaacaagccataaggctcccatcttcgtcaaggagaaagggaaggcccctatggctaatagtgctaaaaggaaccatgctttcttgtaccatgataggagacatgctagaaatgcttataatgattctgattcacatgtttatgattctcatgccatgtttgcttctagttcttcctataagcatgatagagatatgtgtaggagaaatgttgtgcatatgcctaggagaaattttgctcatgttcctagaaaagttgtgaacaaaccttctaccatttattatgcttgcaatgctccctttgctatttgtagaaagggtaagaaggtttatgcatccgggggatcaagctggattatcgacagcggatgcacaaaccatatgacgggggagaagaagatgttcacttcctacgtcaagaataaggattcccaggattcaattatattcggtgatgggaatcaaggcaaggataagtctgaaacccaagggaccctcaagcgcttcctcaggagagctcaaaatgagtttgagctcaaagtgaagaagataaggagcgacaacgggtccgaattcaagaatcttcaagtggaggaattccttgaggaggaagggatcaagcacgagttctccgctccctacacaccacagcaaaatggtgtggtagagaggaagaacaggacgctaatcgatatggcaaggacaatgcttggagaattcaagacccccgagtatttctggtcggaagccgtgaacacggcttgccacgccatcaacagggtctaccttcatcgcctcctcaagaagacttcgtatgagcttctaaccggtaacaaacccaatgtatcttactttcgtgtatttgggagcaagtgctacattctagtgaagaaaggtagaaattctaagtttgctcccaaagctgtagaagggtttttgttaggttatgactcaaatacaaaggcgtatagagtcttcaacaaatcatcgggtttggttgaagtctctagcgacgttgtatttgatgagactaatggctctccaagagagcaagttgttgattgtgatgatgtagatgaagaagatgttccgacggccgctatacgaaccatggcgattggagaagtacgaccacaggaacaagatgaacgagatcaaccttcttcctcaactatggtgcatcccccaaccgaagatgacgaacaggtacctcaagtggaggcgcttgatcaagggggagcacaagatgatcaagtgatggaggaagaagcgcaaccagcacctccaacccaagttcgagcgatgattcaaagggatcatcccgttgaccaaattctgggtgatattagcaagggagtaactactcgatctcaattagttaatttttgcgagcattactcctttgtctcttctattgagcctttcagggtagaggaggccttgctagatccggactgggtgttggccatgcaggaggagctcaacaacttcaagagaaatgaagtttggacgctggtgcctcgtccgaagcaaaatgttgtgggaaccaagtgggtgttccgcaacaaacaggacgaacacggggtggtgacgagaaacaaggctcgacttgtggcaaaaggttatgcccaagtcgcaggtttggatttcgaggagacttttgctcctgtggctaggctagagtctattcgtatcctgctagcatatgccgctcaccattctttcaggctgttccaaatggatgtgaagagcgctttcctcaacgggccgatcaaggaggaggtgtacgtggagcaaccccctggcttcgaggatgaacggtaccccaaccacgtgtgtaagctctctaaggcactctatggacttaagcaagccccaagagcatggtatgaatgccttagagactttctaattgctaatgctttcaaggttgggaaagccgatccaactctttttactaagacatgtgatggtgatttgtttgtgtgccaaatttatgtcgatgacataatatttggttctactaaccaaaagtcttgtgaagagtttagcagggtgatgacgcagaaatttgagatgtcgatgatgggcgagttgaactacttccttgggttccaagtgaagcaactcaaggacggcaacttcatctcccaaacgaagtacacgcacgatctgctaaagcggtttgggatgaaggacgccaaacccgcaaagactccgatggggaccgacggacacaccgacctcaacaaaggaggtaagtccgttgatcaaaaagcataccggtcaatgataggttctttgctttacttatgtgctagtagaccggatattatgcttagcgtatgcatgtgtgctagatgtcaatccgattctaaggagtgtcacttagtggcagtaaagcgaattcttagatatttggttgctacgccttgcctcgggctctggtatccaaaggggtctacctttgacttagttggatactcagactccgactatgctggatgtaaggtcgataggaagagtacatcagggacgtgccaattcttaggaaggtccctggtgtcatggaactctaagaaacaaacctccgttgccctatccaccgctgaggccgagtacgttgccgcaggtcagtgttgcgcgcaactactttggatgaggcaaaccctccgggactttggctacaatctgagcaaagtcccactcctatgtgacaatgagagtgctatccgcatggcggaaaatcctgttgagcacagccgcacaaagcacatagacatccggcatcactttttgagagaccaccagcaaaagggagatatcgaagtgtttcatgttagcaccgagaaccagctagccgatatcttcactaagcctctagatgagaagaccttttgcaggttgcgtagtgagctaaatgtcttagattcgcggaacttggattga

SEQ ID NO: 4538 - DNA, 4827 bp, Zea mays
  Clone ID: TF_ZmC4916_380
atggatcctaaggggaagggaatcgtgatcaacgacaaagaaaaggaatccttcgtcaacgagccgaaggacgacaagcctaccgactccggctcggggcatagacggaaggaaggaaagaagaagaagacaaggcgcatcaaggagatcatctactacgacgatagtgatgagtctacttcttcccaaaaggatgatgacaacgactacaaaaagacggtcaattcgaacttttcatttgattattctcgtattcaacatagttcgaattcgcatttgctttccattcctcttggcaaacctccacacttcgatggggaggactacggattttggagtcacaaaatgcgtagtcacttattctctctccatccaagcatatgggagattgtggagaatggaatgaagtttgatagctcggatagccctatgcttataaatgaacaaattcatagaaatgcacaagctactactgttctcttagcatctttgtgcagggaagagtacaataaggtgagcggcttggacaatgccaagcagatatgggacaccctcaagatctctcacgaggggaacgacatcaccatgctcaccaagatggagttggtggagggcgagcttggacgattcgccatgataaggggagaggagccaactcaaacttacaaccggctcaagacccttatcaacaaaataaggagctacggaagcacgcgttggacggatcacgacgtcgtccgcctaatgctcaggtcctttaccgttcttgatcctcatctcgtgaacaatattcgtgagaatcccaggtacacgatgatgacgcccgaggaagtacttggaaaattcgtgagcgggcggatgatgatcaaggaggcaagatacgtcgacgacgcgttgaacggtccactccacgaacctcaacccattgctctaaaggcaacgaggagcaaggagtcgctacctagcaaggtggcgcaagttgaggcggccgggctcaatgatgaagagatggctctcatcattaaaagattcaagacggcgctaaaaggtcgaaagggacagccaagcaaggccaagaccaagggaaagcgatcatgcttcaaatgcggtaagcttggtcattttattgctaactgtcccgaaaatgatagtgaccaggagcaaggaaaaaatgggaagagagagaacaagaaggtttacaagaaggccaatggcgaagcacaccttggaaaggagtgggattcggattgctcttcgtccgactccgacgacgaaggactcgccgccactgccttcaacaaatcggctctcttccccaacgagcatcacacttgcctcatggcaagggaaaagaaggtaatcactcgtaatgctaatacttatgattcttctagtaatgatgaatctagtgaggatgaaattgattactctagtttattcaagggattggatagaactaagatagctaagattaatgagttgattgatgccttaaatgaaaaggatagaatcttagagaaacaagaagaccttttatatgaagaacatgataaatttgttagtgcacaaaattcacttgctctagaagttaaaagaaatggaatactttcttgtgaactttctacttgtaatgaaaccatttcttctttaaaaggtgaaattaatgttttaactgctaaactagaagtagcaagtaactcttgtgttgaaaatattacaatttgcactaggtgtaaggattttgatgttaatgcttgtagtgaacacttagtttcaatttcaaaactaaatgatgaagtggctagtcttaatgctcaacttaagactagcaagagtgaagttgataaaataaaatttgcaagggatgcctacacggttggtagacacccctcaattaaggatggtattggcttcaagagagaggccaagaacttaacaagccataaggctcccatcttcgtcaaggagaaagggaaggcccctatggctagtagtgctaaaaggaaccatgctttcttgtaccatgataggagacatgctagaaatgcttataatgattttgattcacatgtttatgattctcatgccatgtttgcttctagttcttcctataagcatgatagagatatgtgtaggagaaatgttgtgcatatgcctaggagaaattttgctcatgttcctagaaaagttgtgaacaaaccttctaccatttattatgcttgcaatgctccctttgctatttgtagaaagggtaagaaggtttatgcatccggaggatcaagctggattatcgacagcggatgcacaaaccatatgacgggggagaagaagatgttcacttcctacgtcaagaataaggattcccaggattcaattatattcggtgatgggaatcaaggcaaggataagtctgaaacccaagggaccctcaagcgcttcctcaggagagctcaaaatgagtttgagctcaaggtgaagaagataaggagcgacaacgggtccgaattcaagaaccttcaagtggaggaatttcttgaggaggaagggatcaagcacgagttctccgctccctacacaccacagcaaaatggtgtggtagagaggaagaacaggacgctaatcgatatggcgaggacaatgcttggagaattcaagacccccgagtgtttctggtcggaagccgtgaacatggcttgccacgccatcaacagggtctaccttcatcgcctcctcaagaagacttcatatgagctactaaccggtaacaaacccaatgtatcttactttcgtgtatttgggagcaagtgctacattctagtgaagaaaggtagaaattctaagtttgctcccaaagctgtagaagggtttttgttaggttatgactcaaatacaaaggcgtatagagtcttcaacaaatcatcgggtttggttgaagtctctagcgacgttgtatttgatgagactaatggctctccaagagagcaagttgttgattgtgatgaagaagatgttccggcggccgctatacgaaccatggcgattggagaagtgcggccacaggaaaaagatgaacaaccttcttcctcaactatggtgcaacccccaaccgaagatgacgaacaggtacctcaagtggaggcgcttgatcaagggggagcacaagatgatcaagtgatggaggaagaagcgcaaccggcacctccaacccaagttcgagcgatgattcaaagggatcatcccgtcgaccaaattctgggtgacattagcaagggagtaacgactcgatctcgattagttaatttttgtgagcattactcctttgtctcttctattgagcctttcagggtagaggaggccttgctagatccggactgggtgttggccatgcaggaggaactcaacaacttcaagcgcaatgaagtttggacactggtgcctcgtccgaagcaaaatgttgtgggaaccaagtgggtgttccgcaacaaacaggatgagcacggggtggtgacgaggaacaaggctcgacttgtggcaaaaggttatgcccaagtcgcaggtttggactttgaggagacgtttgctcctgtggctaggctagaatcaattcgtatcttgctagcatatgccgctcaccattctttcaggttgtaccaaatggatgtaaagagcgctttcctcaacgggccaatcaaggaggaggtgtacgtggagcaaccccctggcttcgaggatgaacggtaccccgaccacgtgtgtaagctctctaaggcgctctatggacttaagcaagccccaagagcatggtatgaatgccttagagactttttaattgctaatgctttcaaggttgggaaagccgatccaactcttttcactaagacatgtgatggtgatttgtttgtgtgccaaatttatgtcgatgacataatatttggttctactaaccaaaagtcttgtgaagagtttagcagggtgatgacacagaaattcgagatgtcgatgatgggcgagttgaactacttccttgggtttcaagtgaagcaactcaaggacggcaccttcatctcccaaacaaagtacacgcaagaactgctaaagtggtttggaatgaaggacgccaagcccgcaaagactccgatggggaccgacggacacaccgacctcaacaaaggaggttctttgctttacttatgcgctagtagaccggatattatgcttagcgtatgcatgtgtgctagatttcaatccgatcctaaggagtgtcacttagtggcggtgaagcgaattcttagatatttggttgctacgccttgcttcgggctctggtatccaaaggggtctacctttaacttagttggatactcagactccgactatgctggatgtaaggtcgataggaagagtacatcggggacatgccaattcttaggaaggtccctggtgtcatggaactctaagaaacaaacctctgttgccctatccaccgctgaggccgaatacgttgccgcaggtcagtgttgcgcgcaactactttggatgaggcaaaccctccgggactttggctacaatctgagcaaagtcccactcctatgtgacaatgagagtgctatccgcatggcggagaatcctgttgagcacagccgcacaaagcacatagacatccggcatcactttttgagagaccaccagcaaaagggagatatcgaagtgtttcatgttagcaccgagaaccagctagccgatatcttcactaagcctctagatgagaagaccttttgcaggttgcgtagtgagctaaatgtcatagattcgcggaacctggattga

SEQ ID NO: 4539 - DNA, 4788 bp, Zea mays
  Clone ID: TF_ZM4266.C12.o4.fg
atggatcctaaggggaagggaatcgtgatcaacgacaaggagaaggagtccttcgtcaacgagccgaaggatgacaagcctactgactcgggctcgggccacaagcgcaaagatgggaagaagaagaagacaaggcgcatcaaggagatcgtctactacgacgatagcgatgagtctacttcttcccaaaaagacgatgacaacgactacaaaaagacggtcaattcgaacttttcatttgattattctcgtattcaacatagttcgaattcgcacttgctttccattcctcttggcaaacctccacacttcgatggggaggactacggattttggagtcacaaaatgcgtagtcacttattctctctccatccaagcatatgggagattgtggagaatggaatgaaatttgatagctcggatagccctatgtttataaatgaacaaattcatagaaatgcacaagctactactgttctcttagcgtctttgtgcagggaagagtacaataaggtgagcggcttggacaattccaagcagatatgggacaccctcaagatctctcacgaggggaacgacatcaccatgctcaccaagatggagttggtggagggcgagcttggacgattcgccatgataaggggagaggagccaactcaaacttacaaccggctcaagacccttatcaacaaaataaggagctacggaagcacgcgttggacggatcacgacgtcgtccgcctaatgctcaggtcctttaccgttcttgatcctcatctcgtgaacaatattcgtgagaatcccaggtacacgatgatgacgcccgaggaagtacttggaaaattcgtgagcgggcggatgatgatcaaggaggcaagatacgtcgacgacgcgttgaacggtccactccacgagcctcaacccattgctctaaaggcaacaaggagcaaggagtcgctacctagcaaggtggcgcaagttgaggcggccgggctcaatgatgaagagatggctctcatcatcaagagattcaagacggcgctaaaaggtcgaaagggacagccaagcaaggccaagaccaagggaaagcgatcatgcttcaaatgcggtaagcttggtcattttattgctaactgtcccgaaaatgatagtgaccaggagcaagggaaaaatgggaagagagagaacaagaagggttacaagaaggccaaaggcgaagcacaccttggaaaggagtgggattcggattgctcttcgtccgactccgacgacgaaggacttgccgccactgccttcaacaaatcggctctcttccccaacgagcatcacacttgcctcatggcaagggaaaaaagtgataatgaatctagtgaggatgagattgattactctagtttattcaagggattggatagaactaagatagctaagattaatgagttgattgatgccttaaatgaaaaggatagaatcttagagaaacaagaagaccttttatatgaagaacatgataaatttgttagtgcacaaaattcacttgctttagaagttaaaagaaatggaatactttcttgtgaactttctacttgtaatgaaaccatttcttctttgaaaggtgaaattaatgttttaactgctaaactagaagtagcaagtaactcgtgtgttgaaaatattacaatttgcactaggtgtaaggattttgatgttaatgcttgtaataaacacttagtttcaatttcaaaactaaatgatgaagtggctagtcttaatgctcaacttaagactagcaagagtgaagttgataaaataaaatttgcaagggatgcctacacagtgggtagacacccctcaattaaggatggtcttggcttcaagagagaggccaagaacttaacaagccataaagctcccatcttcgtcaaggagaaagggaaggcccctatggctagtagtgctaaaaggaaccatgctttcttgtaccatgataggagacatgctagaaatacttataatgactttgattcacatgtttatgattctcatgccatgtttgcctctagttcttcctataagcatgatagagatatgtgtaggagaaatgttgtgcctaggagaaattttgctcatgttcctagaaaagttgtgaacaaaccttctaccatttattatgcttgcaatgctccctttgctatttgtagaaagggtaggaaaatagttgctagaaaattaggggcaagatgcaagggtgacaaaacttgcatttgggtccctaaggatatttgtgctaaccttgcaggacccaacatgagttgggtttatgcatccgggggttcaagctggattatcgacagcggatgcacaaaccatatgacgggggagaagaagatgttcacctcctatgtcaagaataaggattcccaagattcaattatattcggtgatgggaatcaaggcaagatagaccttgtgcagcttgtcaagcaggataagtccgaaacccaagggaccctcaagcgcttcctcaggagagctcaaaatgagtttgagctcaaggtgaagaagataagaagcgacaatgggtccgagttcaagaaccttcaagtagaggagttccttgaggaggaagggatcaagcacgagttctccgctccctacacaccacaacaaaatggtgtgaattcaagaccccccgagtgtttctggtcggaagccgtgaacacggcttgccacgccatcaacagggtctaccttcatcgccttctcaagaagacttcgtatgagctactaaccggtaacaaacccaatgtatcttactttcgtgtatttgggagcaagtgctacattctagtgaagaaaggtagaaattctaagtttgctcccaaagctgtagaagggtttttgttaggttatgactcaaatacaaaggcgtatagagtcttcaacaaatcatcgggtttggttgaagtctctagcgacgttgtatttgatgagactaatggctctccaagagagcaagttgttgattgtgatgatgtagatgaagaagatgttccgacggccgctatacagaccatggcgattggagaagtacggccacaggaacaagatgaacaagatcaaccttcttcctcaacaacggtgcatcccccacctcaagatgatgaacatgttcatcaacaggaggcggatgatcatgtgatggaggaagatgcgcaaccggcacctccaacccaagttcgagcgatgattcaaagggatcatcccgtcgaccaaattctgggtgacattagcaagggagtaactactcgttctcgattagttaatttttgtgagcattactcctttgtctcttctattgagcctttcagggtagaggaggccttgctagatccggattgggtattggccatgcaggaggagctcaacaacttcaagcgcaatgaagtttggacactggtgcctcgtccaaagcaaaatgttgtgggaaccaagtgggtgttccgcaacaaacaggacgagcacggggtggtgacgagaaacaaggctcgacttgtggcaaaaggttatgcccaagtcgcaggtttggactttgaggagacgtttgctcctgtggctaggctagaatcaattcgtatcttgctagcatatgccgctcaccattctttcaggttgttccaaatggatgtgaagagcgctttcctcaacgggccaatcaaggaggaggtgtacgtggagcaaccccctggcttcgaggatgaacggtaccccgaccatgtgtgtaagctctctaaggcgctctatggacttaagcaagccccaagagcatggtatgaatgccttagagactttttaattgctaatgctttcaatgtcgggaaagccgatccaactctctttacaaagacatgtgatggtgatttgtttgtgtgccaaatttatgtcgatgacataatatttggttctactaaccaaaagtcatgtgaagagtttagcagggtgatgacgcagaaattcaagatgtcgatgatgggcgagttaaactacttccttgggttccaagtgaagcaactcaaggacggcaccttcatctctcaaacaaagtacacgcaagatctgctgaagcggtttgggatgaaggacgccaagcccgcaaagactccgatgggaaccgacggacacactgacctcaacaaaggaggtaagtccgttgatcaaaaagcataccggtcaatgatagggtctttactttatttatgtgctagtagaccggatattatgcttagctatccaaaggggtctacctttgacttagttggatactcagactccgactatgctggatgtaaggtcgataggaagagtacatcggggacgtgccaattcttaggaaggtccctggtgtcatggaactctaagaaacaaacttccgttgccctatccaccgctgaggccgagtatgttgccgcaggacagtgttgcgcgcaactactttggatgaggcaaaccctccgggactttggctacaatctgagcaaagtcccactcctatgtgataatgagagtgctatccgcatggcggaaaatcctgttgagcacagccgcacaaagcacatagacatccggcatcactttttgagagaccaccagcaaaagggagatatcgaagtgtttcatgttagcaccgagaaccagctagccgatatctttaccaagcctctaggtgagaagaccttttgcaggttgcgtagtgagcttaatgtcttagattcgtggaacttggattga

SEQ ID NO: 4540 - DNA, 1990 bp, Zea mays
  Clone ID: TF_ZM4707.C2.o8.fg
atggatcctaaggggaagggaatcgtgatcaacgacaaagagaaggagtccttcgtcaacgagccgaaggacgacaagcctaccgactccggctcggggcatagacggaaggaagggaagaagaagaagacaaggcgcatcaaggagatcatctactacgacgatagtgatgagtctacttcttcccaaaaggatgatgacaacgactacaaaaagacggtcaattcgaacttttcatttgattattctcgtattcaacatagttcgaattcacatttgctttccattcctcttggcaaacctccacacttcgatggggaggactacggattttggagtcacaaaatgcgtagtcacttattctctctccatccaagcatatgggagattgtggagaatggaatgaaatttgatagctcggatagccctatgcttataaatgaacaaattcatagaaatgcacaagctactactgttctcttagcgtctgtgtgcagggaagagtacaataaggtgagtggcttggacaatgccaagcagatatgggacaccctcaagatctctcacgaggggaacgacatcaccatgctcaccaagatggagttggtggagggcgagcttggacgattcgccatgataaggggagaggagccaactcaaacttacaaccggctcaagactcttatcaacaaaataaggagctacggaagcacacgttggacggatcacgacgtcgtccgcctaatgctcaggtcctttaccgttcttgatcctcatctcgtgaacaatattcgtgagaatcccaggtacacgatgatgacgcccgaggaagtacttggaaaattcgtgagcgggcggatgatgatcaaggaggcaagatacgtcgacgacgcattgaacggtccactccatgagcctcaacccattgctctaaaggcaacgaggagcaaggagtcacttcctagcaaggtggcgcaagttgaggcggccgggctcaatgatgaagagatggctctcatcatcaagagattcaagacggcgctaaaaggtcgaaagggacagccaagcaaggccaagaccaagggaaagcgatcatgcttcaaatgcggtaagcttggtcattttattgctaactgtcccgaaaatgatagtgaccaggagcaagaaaaaaatgggaagagagagaacaagaaggcttacaagaaggccaaaggcgaagcacaccttggaaaggagtgggattcggattgctcttcgtccgactccgacgacgaaggactcgccgccactgccttcaacaaatcggctctcttccccaacgagcatcacacttgcctcatggcaagggaaaagaaggtaatcactcataatgctaatacttatgattcttctagtgatgatgaatctagtgaagatgaaattgattactctagtttattcaagggattggatagaactaagatagctaagattaatgagttgattgatgccttaaatgaaaaggatagaatcttagagaaacaagaagaccttttatatgaagaacatgataaatttgttagtgcacaaaattcacttgctctagaagttaaaagaaatggaatactttcttgtgaactttctacttgtaatgaaaccatttcttctttaaaaggtgaaattaatgttttaactgctaaactagaagtagcaagtaactcgtgtgttgaaaatattacaatttgcactaggtgtaaggattttgatgttaatgcttgtagtgaacacttagtttcaatttcaaaactaaatgatgaggtggctagtcttaatgctcaacttaagactagcaagagtgaagttgataaaataaaatttgcaagggatgcctacacggttggtagacacccctcaattaaggatggtcttggcttcaagagagaggccaagaaattaacaagccataaggctcccatcttcgtcaaggagaaagggaaggcccctatggcta

SEQ ID NO: 4541 - DNA, 1551 bp, Zea mays
  Clone ID: TF_ZM4712.C2.o2.fg
atggatcctaaggggaagggaatcgtgatcaacgacaaagagaaggaatccttcgtcaacgagccgaaggacgacaagcctaccaactccggctcggggcatagacggaaggaagggaagaagaagaagacaaggcgcatcaaggagatcatctactacgacgatagtgatgagtctacttcttcccaaaaggacgacgacaacgactacaggaagacggcaacgaggagcaaggagtcgctacctagcaaggtggcgcaagttgaggcggtcgggctcaatgatgaagagatggctctcatcatcaagagattcaagacggcgctaaaaggtcgaaagggacagccaagcaaggccaagaccaagggaaagcgatcatgcttcaaatgcggtaagcttggtcattttattgctaactgtcccgaaaatgatagtgaccaggagcaagggaaaaatgggaagagagagaacaagaaggtttacaagaaggccaaaggcgaagcacaccttggaaaggagtgtgattcggattgctcttcgtccgactccgacgacgaaggactcgccgccactgccttcaacaaatcggctctcttccccaacgagcatcacacttgcctcatggcaagggaaaagaaggtttatgcatccgggggttcaagctggattattgatagcggatgcacaaaccatatgacgggggagaagaagatgttcacctcctacgtcaagagtaaggattcccaagattcaattatattcggtgatgggaatcaaggcaaggataagtctgaaacccaagggaccctcaagcgcttcctcaggagagctcaaaatgagtttgagctcaaggtgaagaagataaggagcgacaacgggtccgaattcaagaaccttcaagtggaggaattccttgaggaggaagggatcaagcacgagttctccgctccctacacaccacagcaaaatggtgtgatgaagaagatgttccgacggccgctatacggaccatggcgattggagaagtacggccacaggaacaagatgaacgagatcaaccttcttcctcaactatggtgcatcccccaaccgaagatgacgaacaggttgtaccaaatggatgtgaagagcgctttcctcaacgggccaatcaaagaggaggtgtacgtggagcaaccccctggcttcgaggatgaacggtaccccgaccatgtgctctcagggggctacacgcacctgctggtcgccatcgacaaattctccaagtggatcgaggtccgacccctaaacagcatcaggtccgaacaggtagtggcgttctttaccaacatcatccatcgctttggggtcccgaactccatcatcaccgacaacggcacccagttcaccggcggaaagttcctggacttctgcgaggatcaccacatccaggtggactgggccgccgtggctcaccccatgatgaatgggcaagtagagcgtgccaacaacatgattctgcaaggactcaagccacggatctacaacgacctcaacaagttcggcaagtga

SEQ ID NO: 4542 - DNA, 4998 bp, Zea mays
  Clone ID: TF_ZM4715.C1.o7.fg
atggatcctaaggggaagggaatcgtgatcaacgacaaagaaaaggaatccttcgccaacgagccgaaggacgacaagcctaccgactctggctcggggcatagacggaaggaaggaaagaagaagaagacaaggcgcatcaaggagatcatctactacgacgatagtgatgagtctacttcttcccaaaaggatgatgacaacgactacaaaaagacggtcaattcgaacttttcatttgattattctcgtattcaacatagttcgaattcgcatttgctttccattcctcttggcaaacctccacacttcgatggggaggactacggattttggagtcacaaaatgcgtagtcacttattctctctccatccaagcatatgggagattgtggagaatggaatgaagtttgatagctcggatagccctatgcttataaatgaacaaattcatagaaatgcacaagctactactgttctcttagcatctttgtgcagggaagagtacaataaggtgagcggcttggacaatgccaagcagatatgggacaccctcaagatctctcacgaggggaacgacatcaccatgctcaccaagatggagttggtggagggtgagcttggacgattcgccatgataaggggagaggagccaactcaaacttacaaccggctcaagactcttatcaacaaaataaggagctacggaagcacgcgttggacggatcacgacgtcgtccgcctaatgctcaggtcctttactgttcttgatcctcatctcgtgaacaatattcgtgagaatcccaggtacacgatgatgacgcccgaggaagttcttggaaaattcgtgagcgggcggatgatgatcaaggaggcaagatacgtcgacgacgcattgaacggtccactccacgaaccccaacccattgctctaaaggcaacgaggagcaaggagtcgctacctagcaaggtggcgcaagttgaggcggccgggctcaatgatgaagagatggctctcatcattaaaagattcaagacggcgctaaaaggtcaaaagggacagccaagcaaggccaagaccaagggaaagcgatcatgcttcaaatgcggtaagcttggtcattttattgctaactgtcccgaaaatgatagtgaccaggagcaagggaaaaatgggaagagagagaacaagaaggtttacaagaaggccaaaggcgaagcacaccttggaaaggagtgggattcggattgctcttcgtccgactccgacgacgaaggactcgccgccactgccttcaacaaatcagctctcttccccaacgagcatcacacttgcctcatggcaagggaaaagaaggtaatcactcgtaatgctaatacttatgattcttctagtgatgatgaatctagtgaggatgaaattgattactctagtttattcaagggattggatagaactaagatagctaagattaatgagttgattgatgccttaaatgaaaaggatagaatcttagagaaacaagaagaccttttatatgaagaacatgataaatttgttagtgcacaaaattcacttgctctagaagttaaaagaaatggaatactttcttgtgaactttctacttgtaatgaaaccatttcttctttaaaaggtgaaattaatgttttaactgctaaactagaagtagcaagtaactcttgtgttgaaaatattacaatttgcactaggtgtaaggattttgatgttaatgcttgtagtgaacacttagtttcaatttcaaaactaaatgatgaagtggctagtcttaatgctcaacttaagactagcaaaagtgaattcgaaaaactaaaatttgcaagggatgcctacactattggtagacacccctcaattaaggatgggcttggcttcaagagggaagccaagaacttaacaagccataagactcctatctccaccaaggagaaagggaaggctcctatggctaatagtgttaagaagaatcatgctttcatgtattatgataggagatactctagaaatgcttttaggagtaatgatgtttttgattcacatgcttatgactcttatgctatgactgcttctagttctcatgttatgcatggtagaaatgtgtttagaagaaatgttgttcaccaaatgcctaggagaaatgtagatcataatgctcctaggaaagtagtgaatgaaccttccgaaatttattgtgctctaaatgcttcctttgctatttgtagaaaggataagaaaattgttgctaggaagttaggggcaagatgcaagggagataaaacttgcatttgggtccctaagaatatttgtgctaaccttgtaggacccaacatgagttgggtttatgcatccgggggttcaagctggattattgatagcggatgcacaaaccatatgacgggggagaagaagatgttcacttcctacgtcaagaataaggattcccaagattcaattatattcggtgatgggaatcaaggcaaggataagtctgaaacccaagggaccctcaagcgcttcctcaggagagctcaaaatgagtttgagctcaaggtgaagaagataaggagcgacaacgggtccgaattcaagaaccttcaagtggaggaatttcttgaggaggaagggatcaagcacgagttctccgctccctacacaccacaacaaaatggtgtggtagagaggaagaacaggacgctaattgatatggcgaggatgatgcttggagaattcaagacccccgaatgtttctggtcggaagccgtgaacacggcttgtcacgccatcaacagggtgtaccttcaccgcctcctcaagaagacatcgtatgagctactaaccggtaacaaacccaatgtatcttactttcgtgtatttgggagcaagtgctacattctagtgaagaagggtagaaattctaaatttgctcccaaagctgtagaagggtttttgttaggttatgattcaaatacaaaggcgtatagagtcttcaacaaatcatcgggtttggttgaagtctctagcgacgttgtatttgatgagactaatggctctccaagagagcaagttgttgatcttgatgatgtagatgaagaagacgttccaacggccgctatgcgcaccatggcgattggtgatgtgcgaccacaggaacaattggagcaagatcaacctcactcctcaactatggtgcaacccccaactcaagacgatgaacaggttcatcaacaggaggcgtgtgatcaagggggagcacaagatgatcgagtgatggaggaagaagcgcaaccggcacctccaacccaagttcgagcgatgattcaaagggatcatcccgtcgatcaaattatgggtgacattagcaagggagtaactactcgatctcgattagttaatttttgtgagcattactcctttgtctcttctattgagcctttcagggtagaggaggccttgctagatccggactgtgtgttggccatgcaggaggagctcaacaacttcaagagaaatgaagtttggacactggtgcctcgtccgaagcaaaatgttgtgggaaccaagtgggtattccgcaacaaacaggacgagcacggggtggtgacgaggaacaaggctcgacttgtggcaaaaggttatgcccaagtcgcaggtttggatttcgaggagacttttgctcctgtggctaggctagagtcaattcgaatcttgctagcatatgccgctcaccattctttcaggttgtaccaaatggatgtgaagagcgctttcctcaacgggccgatcaaggaggaggtgtacgtagagcaaccccctggcttcgaggatgatcggttcctcgaccatgtgtgtaagctctctaaggcgctctatggacttaagcaagccccaagagcatggtatgaatgccttagagatttcttagttgctaatgctttcaatgttgggaaagccgatccaactctttttactaagacttgtaatggtgatttgtttgtgtgccaaatttatgtcgatgacataatatttggttctactaaccaaaagtcttgtgacgagtttagcagggtgatgacgcagaaattcgagatgtcgatgatgggcgagttgaactacttccttgggttccaagtgaagcaactcaaggatggcaccttcatctcccaaacgaagtacacgcaagacttgctaaaaaggtttgggatgaaggacgccaagcccgcaaagacgccgatgggaaccgacggacacacagacctcaacaaaggaggtaagtccgttgatcaaaaagcataccggtcaatgatagggtctttactttatttatgtgctagtagaccggatattatgcttagcgtatgcatgtgtgctagatttcaatccgatcctaaggagtgtcacttagtggcggtgaagcgaattcttagatatttagttgctacgccttgcttcggactctggtatccaaaggggtctacctttgacttggttggatactcagattccgactatgctggatgtaaggtcgataggaagagtacatcggggacgtgccaattcttaggaaggtccctggtgtcatggaactctaagaaacaaacctccgttgccctatccaccgctgaggccgagtatgttgccgcaggacagtgttgcgcgcaactactttggatgaggcaaaccctccgggactttggctacaatctgagcaaagtcccactcctatgtgataatgagagtgctatccgcatggcggaaaatcctgttgaacacagccgcacaaagcacatagacatccggcatcactttttgagagaccaccagcaaaagggagatatcgaagtgtttcatgttagcaccgagaaccagctagccgatatctttaccaagcctctagatgagaagaccttttgcaggctgcgtagtgagctaaatgtcttagattcgcgaaacttggattga

SEQ ID NO: 4543 - DNA, 2118 bp, Zea mays
  Clone ID: TF_ZM4843.C9.o1.fg
atggatcctaaggggaagggaatcgtgatcaacgacaaagagaaggaatccttcgtcaacgagccgaaggacgacaagcctaccgactccggctcggggcatagacgaaaggaagggaagaagaagaagacaaggcgcatcaaggagatcatctactacgacgatagtgatgagtctacttcttctcaaaaggatgatgacaacgactacaaaaagacggtcaattcgaacttttcatttgattattctcgtattcaacatagttcgaattcgcatttgctttccattcctcttggcaaacctccacacttcgatggggaggactacggattttggagtcacaaaatgtgtagtcacttattctctctccatccaagcatatgggagattgtggagaatggaatgaaatttgatagctcggatagccctatgcttataaatgaacaaattcatagaaatgcacaagctactactgttctcttagcgtctttgtgcagggaagagtacaataaggtgagtggcttggacaatgccaagcagatatgggacaccctcaagatctctcacgaggggaacgacatcaccatgctcaccaagatggagttggtggagggcgagcttggacgattcgccatgataaggggagaggagccaactcaaacttacaaccggctcaagactcttatcaacaaaataaggagctacggaagcacacgttggacggatcacgacgtcgtccgcctaatgctcaggtcctttaccgttcttgatcctcatctcgtgaacaatattcgtgagaatcccaggtacacgatgatgacgcccgaggaagtacttggaaaattcgtgagcgggcggatgatgatcaaggaggcaagatacgtcgacgacgcattgaacgatccactccatgagcctcaacccattgctctaaaggcaacgaggagcaaggagtcgcttcctagcaaggtggcgcaagttgaggcggccgggctcaatgatgaagagatggctctcatcatcaagagattcaagacggcgctaaaaggtcgaaagggacagccaagcaaggccaagaccaaaggaaagcgatcatgcttcaaatgcggtaagcttggtcattttattgctaactgtcccgaaaatgatagtgaccaggagcaaggaaaaaatgggaagagagagaacaagaaggcttacaagaaggccaaaggcgaagcacaccttggaaaggagtgggattcggattgctcttcgtccgactccgacgacgaaggactcgccgccactgccttcaacaaatcggctctcttccccaatgagcatcacacttgcctcatggcaagggaaaagaaggtaatcactcgaaatgctaatacttatgagtcttctagtgatgatgaatctagtgaggatgaaattgattactctagtttattcaagggattggacagaactaagatagctaagattaatgagttgatcgatgccctaaatgaaaaggatagaaccttagagaaacaagaagacctcttatatgaagaacatgataaatttgttagtgcacaaaattcacttgctctagaagttaaaagaaatggaatactttcttgtgaactttctacttgtaatgaaaccatttcttctttaaaaggtgaaattaacgatttaactgctaaactagaagtagcaagtaactcgtatgttgaaaatattacaatttgcactaggtgtaaggattttgatgttaatgcctgtagtgaacacttagtttcaatttcaaaactaaatgatgaagtggctagtcttaatgctcaacttaagactagcaagagtgaagttgataaaataaaatttgcaagggatgcctacacagtgggtagacacccctcaattaaggatggtcttggcttcaagagagaagccaagaacttaacaagccataagactcctatctccaccaaggagaaagggaaggctcctatggctaatagtgttaagaagaatcatgctttcatgtactatgataggagatactctagaaatgcttttagaagtaatgatgtttttgattcacatgcttatgactcttatgctatgactgcttctagttctcat

SEQ ID NO: 4544 - DNA, 2109 bp, Zea mays
  Clone ID: TF_ZM4989.C2.o1.fg
atggatcctaaggggaagggaatagtgatcaacgacaaggaaaaggagttcttcgtcaacgacccaaaagatgacaaatccaacgactccggctcggggcataaacggaaggaagggaagaagaaaaagacaaggagcatcaaggagatcatctactacgacgatagtgataagtctacttcttcccaaaaggatgatgacaacgactacaaaaagacggtcaactcgaacttttcatttgattattctcgtattcaacatagttcgaattcgcatttgctttccattcctcttggcaaacctccacacttcgatggggaggactacggattttggagtcacaaaatgcgtagtcacttattctctctccatccaagcatatgggagattgtagagaatggaatgaagtttgatagctcagatagccctatgcttataaatgaacaaattcatagaaatgcacaagctactactgttctcttagcatctttgtgcagggaagagtacaataaggtgagcggcttggacaatgccaagcagatatgggacaccctcaagatctctcacgaggggaacgacatcaccatgctcaccaagatggagttggtggagggcgagcttggacgattcgccatgataaggggagaggagccaactcaaacttacaaccggctcaagacccttatcaacaaaataaggagctacggaagcacgcgttggacggatcacgacgtcgtccgcctactgctcaggtcatttaccgttcttgatcctcatctcgtgaacaatattcgtgagaatcccaggtacacgaagatgacgcccgaggaggtacttggaaaattcgtgagcgggcggatgatgatcaaggaggcaagatacgtcgacgacgcgttgaacggtccactccacgagcctcaacccattgctctaaaggcaacaaggagcaaggagtcactacccagtaaggtggcacaaattgaggcagccggtcttaatgatgaagagatggccctcatcattaaaagattcaagacggcgctaaaagatcgaaagggacagccaagcaaggccaagaccaagggaaagcgatcatgcttcaaatgcggtaagcttggtcattttattgctaactgtcccgaaaatgatagtgaccaggagcaagaaaaaaatgggaagagagagaacaagaaggtttacaagaaggccaaaggtgaagcacaccttggaaaggagtgggattcggattgctcttcgtccgactccgacgacgaagggcttgctgccactgccttcaacaaatcggctctcttccccaacgagcatcacacttgcctcatggcaagggaaaagaaggtaatcactcgtaatgctaatacgtatgattcttctagtgatgatgaatctagtgaggatgagattgattactctagtttattcaagggactggatagaactaagatagctaagattaatgagttgattgatgccttaaatgaaaaggataaaatcttagagaaacaagaagacctgttatatgaagaacatgataaatttgttagtgcacaaaattcacttgctctagaagttaaaagaaatggaatactttcttgtgaactttctacttgtaatgaaaccatttcttctttaaaaggtgaaattaatgttttaactgctaaactagaagtagcaagtaactcgtgtgttgaaaatattacaatttgcactaggtgtaaggattttgatgttaatgcttgtaatgaacacttagtttcaatttcaaaactaaatgatgaagtggctagtcttaatgctcaacttaagactagcaagagtgaagttgataaaataaaatttgcaagggatgcctacacagtgggtagacacccctcaattaaggatgggcttggcttcaagagagaggccaagaacttaacaagccataaagctcccatcttcgtcaaggagaaagggaaggcccctatggctagtagtgctaaaaggaaccatgctttcttgtactatgataggagacatgctagaaatgcttataatgattttgattcacatgcttatgattcttatgctatgactgcttctagttctcat

SEQ ID NO: 4545 - DNA, 5199 bp, Zea mays
  Clone ID: TF_ZM5043.C4.o4.fg
atggatcataaggggaagggaatcgtgatcaacgacaaagagaaggaatccttcgtcaacgagccgaaggacgacaagcctaccgactccggctcggggcatagacggaaggaagggaagaagaagaagacaaggcgcatcaaggagatcatctactacgacgatagtgatgagtctacttcttcccaaaaggatgatgacaacgactacaaaaagacggtcaattcgaacttttcatttgattattctcgtattcaacatagttcgaattcgcatttgctttccattcctcttggcaaacctccacacttcgatggggaggactacggattttggagtcacaaaatgcgtagtcacttattctctctccatccaagcatatgggagattgtggagaatggaatgaaatttgatagctcggatagccctatgcttataaatgaacaaattcatagaaatgcacaagctactactgttctcttagcatctttgtgcagggaagagtacaataaggtgagtggcttggacaatgccaagcagatatgggacaccctcaagatctctcacgaggggaacgacatcaccatgctcaccaagatggagttggtggagggcgagcttggacgattcgccatgataaggggagaggagccaactcaaacttacaaccggctcaagacccttatcaacaaaataaggagctacggaagcacgcgttggacggatcacgacgtcgtccgcctaatgctcaggtcatttaccgttcttgatcctcatctcgtgaacaatattcgtgagaatcccaggtacacgatgatgacgcccgaggaagtacttggaaaattcgtgagcgggcggatgatgatcaaggaggcaagatacgtcgacgacgcattgaacggtccactccacgagcctcaacccattgctctaaaggcaacaaggagcaaggagtcgctacctagcaaggtggcgcaagttgaggcggcagggctcaatgatgaagagatggccctcatcattaaaagattcaagacagcactaaaaggtcgaaagggacagccaagcaaggctaagaccaagggaaagcgatcatgcttcaaatgcggtaagcttggtcattttattgctaactgtcccgaaaatgatagtgaccaggagcaagggaaaaatgggaagagagagaacaagaaggtttacaagaaggccaaaggcgaagcacaccttggaaaggagtgggattcggattgctcttcgtccgactccgacgacgaaggactcgccgccactgccttcaacaaatcggctctcttccccaacgagcatcacacttgcctcatggcaagggaaaagaaggtaatcactcgtaatgcttatgattcttctagtgatgatgaatctagtgaggatgaaattgattactctagtttattcaagggattggatagaactaagatagataagattaatgagttgattgatgccttaaatgaaaaggatagaatcttagagaaacaagaagaccttttatatgaagaacatgataaatttgttagtgcacaaaattcacttgctctagaagttaaaagaaatggaatactttcttgtgaactttctacttgtaatgaaaccatttcttctttaaaaggtgaaattaatgttttaactgctaaactagaagtagcaagtaactcttgtgttgaaaatattacaatttgcactaggtgtaaggattttgatgttaatgcctgtagtgaacacttagtttcaatttcaaaactaaatgatgaagtggctagtcttaatgctcaacttaagactagcaagagtgaagttgataaactaaaatttgcaagggatgcctacacgatcggtagacacccctcaattaaggatggacttggcttcaagagggaagccaagaacttaacaagccataagactcccattcccgctaaggagaaagggaaggcccctatggctactagtgttaaaaagaaccatgcctttttgtatcatgatagaaaaaattctagaaatgcttttagaagttatgatgcttatgattcacatgcttatgattcttatgctatgactgcttctagttctcatgttgtgcatgaaagaaatgttggtagaagaaatgttgttaatattcctaggaaagttaatgagccttctacaatatatcatgctttgaatgcttcctttgcaatttatagaaaggatagaaaggtttatgcatccgggggttcaagctggattattgatagcggatgcacaaaccatatgacgggggagaagaagatgttcacctcctacgtcaagaataatgattcccagattcaattatattcggtgatgggaatcaaggcaagaagaagtgatggttcactagcttttaagggtgtattagacgacaaactttatttagttgattttgcaaaagaggaagccggtctagatgcatgcttaatagctaagactagcatgggctggctgtggcatcgccgcttagcacatgtggggatgaagaaccttcacaagcttctaaagggagaacacgtgataggtttgactaacgtgcaattcgaaaaagatagaccttgtgcagcttgtcaagcaggtaaacaagtgggaggagcacatcacagcaagaatgtgatgaccacttcaagacccctggagctgctgcatatggacctcttcggacctgtcgcctatctgagcataggagggagtaagtatggtctagttattgttgatgacttttcccgcttcacttgggtgttctttttgcaggataagtctgaaacccaagggaccctcaagcgcttcctcaggagagctcaaaatgagtttgagctcaaggtgaagaagataagaagcgacaacgggtccgagttcaagaaccttcaagtggaggagttccttgaggaggaaggaatcaagcatgagttctccgctccctacacaccacagcaaaatggtgtggtagagaggaagaacaggacgctaattgatatggcgaggactatgcttggagagttcaagacccccgagcgattttggtcggaagccgtgaacacggcttgccacgccatcaacagggtctaccttcaccgcctcctcaagaagacgtcgtatgagctactaaccggtaacaaacccaatgtatcatactttcgtgtatttgggagcaagtgctacattctagtaaagaagggtagaaattctaaatttgctcccaaagcagtagaagggtttttgttaggttatgactcaaatacaaaggcgtatagagtcttcaacaaatcatcaggtttggttgaagtctctagcgacgttgtatttgttgagactaatggctctccaagagagcaagttgttgattgtgatgatgtagatgaagaagatgttccgacggccgctatacgaactatggcgattggagaagttcatcaacaggaggcgtgtgatcaagggggagcacaagatgatcatgtgatggaggaagatgcgcaaccggcacctccaacccaagttcgagcgatgattcaaagggatcatcccgttgaccaaattctgggtgacattagcaagggagtaactactcgatctagattagttaatttttgtgagcattactcctttgtctcttctattgagcccttcagggtagaggaggccttgctagatccggactgggtgttggccatgcaggaggagctcaacaacttcaagtgcaatgaagtttggacactggtgcctcgtcccaagcaaaatgttgtgggaaccaagtgggtgttccgcgacaaacaggacgagcacggggtggtgacgagaaacaaggctcgacttgtggcaaaaggttatgcccaagtcgcaggtttggatttcgaggagacttttgctcctgtggctaggctagaatcaattcgtatcttgctagcatatgccgctcaccattctttcaggttgtaccaaatggatgtgaagagcgctttcctcaacgggccaatcaaggaggaggtgtacgtggagcaaccccctggcttcgaggatgaacggtactccgaccatgtgtgtaagctctctaaggcgctctatggacttaagcaagccccaagagcatggtatgaatgccttagagactttctaattgttaatgctttcaaggttgggaaagccgatccaactctttttactaagacttgcaatggtgatttgtttgtgtgccaaatttatgtcgatgacataatatttggttctactaaccaaaagtcctgtgaagagtttagcagggtgatgacgcagaaattcgagatgtcgatgatgggcgagttgaactacttccttgggttccaagtgaagcaactcaaggacggcactttcatctcccaaacgaagtacacgcaagacttgctaaagaggtttgggatgaaggacgccaagcccgcaaagacgccaatgggaaccgacggacacacagacctcaacaaaggaggtaagtccgttgatcaaaaagcataccggtccatgataggttctttgctttattcatgtgctagtagaccggatattatgcttagcgtatgcatgtgtgctagatttcaatccaatcctaaagagtgtcacttagtggcggtgaagcgaattcttagatatttagttgctacgccttgcttcgggctctggtatccaaaggggtctacctttgacttagttggatactcagactccgactatgctggatgtaaggtcgataggaagagtacatcggggacgtgccaattcttaggaaggtccctggtgtcatggaattctaagaaacaaacttccgttgccctatccaccgctgaggccgagtatgttgccgcaggacagtgttgcgcgcaactactttggatgaggcaaaccctccgggactttggctacaatctgagcaaagtcccactcctatgtgataatgagagtgctatccgcatggcggaaaatcctgttgaacacagccgcacaaagcacatagacatccggcatcactttttgagagaccaccagcaaaagggagatatcgaagtgtttcatgttagcaccgagaaccagctagccgatatctttaccaagcctctagatgagaagaccttttgcaggctgcgtagtgagctaaatgtcttagattcgcggaacttggattga

SEQ ID NO: 4546 - DNA, 1635 bp, Zea mays
  Clone ID: TF_ZmC4916_385
atggatcctaagggtaaggggatggtgattaatgacaaggagaaggagtccctcctaaatgagccaagagatgacaagcctaccgactcaggctcaagtcacaagaagagggaagggaagaagaagaggcacatcaagaaaatcatctactacgacagcgatgcctcttcatcttcaccaagagacgacgatgacgatgactcttcatcgaaaaagaaaacggttaatcaaaattattcatttgattattcccgtattccattcaattctaatgcttatttgctatcaattccacttgggaaaccttcacactttgatggagaagactactctttttggagtcacaaaatggatgaatacaacaaggtgagcggcttggacaacgccaagcaaatctgggataccctcaagatatctcatgagggaaacgacgccaccatgatcaccaaaatagagttggtggaaggcgagctagggagatttgcgatgatcaggggagaggagccaacgcaaagctacaacaggctcaagaccctggtcaacaagattaggagctatggaagcacaagatggatggactacgacgtcgtccgactcatgctcaggtcctttactataattgacccccatcttgtaaaccttattcgtgaaaatcccaggtacaccaaaatgacgcccgaggagattcttggaaaatttgtgagcaggcgcatgatggtgaaagaagcacgatacgtagacaacatgcttaatggtccactactcgtctacgagccacaactcgttgctctcaaagcaacaagcagcagggaggcgctaccaagcaaggtggcacaagttgaggctgccgggctaaacgaagatgagatggccctaatcatcaagcgcttcaagaccgcactgaaaggacgcaaggagtaccccaacaagaataaagcaaggggaaagcgctcctgtttcaaatgtggtaagactggtcatttcatagctcaatgccccgataatgataatgaccaggaacaagaaaagtatgggaagaaagagaagaagaagagctacaggaaggcaaagggcgaggcgcaccatggaaaagaatgggactcggactgctcctctttcgactccgacgacgaaggactcgctgcctcggccttcaacaagtcttctctcttccccaacgaacgccatacatgtcttatggcaaaggaaaagaaggatagattgttagaaaaacaagaggatattttatatgaggagcatgataaatttgttagtgtgcaaaaatctcttgctttagagattaaaaggaatgaaagtctatcatctgagttatctacttgccatgaaactatatctagtttaaagagtttaaatgatgaattaactactaagctagaaggagttaataaatctagttcttgtgaagagcatgttgttgtttgtgatagatgtaaggattttgatgttgatgcttgtgatgaacaccttatttctattacaaaattaaatgatgaagtggcaagtcttaatgctcaacttaagacttgcaaaattaattttgatcaattaaaatttgctagggaagcctacaccgttggtagacacccctcaattaaggatgggcttggtttttga

SEQ ID NO: 4547 - DNA, 4800 bp, Zea mays
  Clone ID: TF_ZM4449.C5.o7.fg
atggatcctaagggtaaggggatgatgattaatgacaaggagaaggagtccctcctaaatgagccaagagacgacaagcctaccgactcaggctcaagtcacaagaagagggatgggaagaagaagaagaggcgcatcgagaaaatcatctactacgataatgatgcctcttcattttcaccaagagacgacgatgacgacgactctttattgaaaaagaaaacggttaatcaaaattattcatttgattattctcgtattccattcaattctaatgctcatttgctatcaattccacttgggaaacctccacactttgatggagaagactactctttttggagtcacaaaatgcgtagtcacttattttctctccatcctagtatttgggaggttgttgaaaacgggatgcattttgatagtactgacaatcctgttttcataaatgagcaaattcataaaaatgcacaagttaccactgttttgctagcatctttgtgctgggatgaatacaacaatgtgagcggcttggacaacgccaagcaaatttgggacaccctcaagatctcacatgagggaaacgatgctacaatgatcaccaaaatggagttggtggaaggcgagttgggaagatttgccatgatcaggggagaagagccaacacaaacctacaacaggctcaagaccctggtcaacaagattaggagctatggaagcacaagatggacggaccacgacgtcgtccgactcatgctcaggtcctttactgtaattgacccccatcttgtagaccttattcgtgaaaatcctaggtacaccaaaatgacgcctgaggagatactcggaaaattcatgagcgggcgtatgatggtaaaggaggcgcgatacgtggatgatgctcttaatgcccctctacccgtctacgagcctcaacccgttgctctcaaagcaacaagcagcagggaggcgctaccaagcaaggtggcacaagttgaggctgccgggctaaacgaagatgagatggccctaatcatcaagcgcttcaagaccacactgaaaggacaagcaaggggaaagcgctcctgtttcaaatgcggtaagactggtcatttcatagcacaatgccccgataatgataatgatcaggaacaagaaaagtatggaaagaaagagaagaagaagaattacaagaaggcgaaggacgaggcacatcttggaaaggaatggaattctgactgctcttcatctgactccgatgatgaaggattggctgcctcggccttcgacaaatcttcgctcttccccaatgaacgccatacgtgccttatggctaaggaaaagaaggtatgtattcagaacactcacaagtatacttcttctagtgatgaagagtcatctgatgatgaagtagagtataccgatttatttaagggtttagatagagctaaagtagataaaatcaatgagttaattgatgctctaaatgaaaaaaatagattgctagaaaggcaagaggacattttgtatgaggaacatgaaaaatttgttagtgttcaaaagtcgcttgccttagaacttaaaagaaatgaaattctgtcttttgaattgtctgcctgtcaggaatatgtctctagtttaaagaatttaaatgatgaattaaatgttaagctagaggaggcaaatgcaactagatcttgtgtagaacatgtagctatttgcaacagatgcaaggacgttgatgttaatgcttgtgatgaacatcttattgctattacaaaattaaatgatgaggtggcaagtcttaatgctcaacttaagacttgcaaaattgattttgataagttaaaatttgctagggatgcttacacaattggtagacacccctctattaaggatggacttggttttcgaaagaaaaccaataacttaacaagccaaaagactctcgttctcaacaaggagaaagggaaggctcctatggctagtagttctcaaaagtgtcatgcctacacttatgttagaaaattttctaggactgctcataggagttatgatcatgatgtttttaatccacatgctatgtttgcctctagatctacttttgttcatggtagaagtaggcctaggagaaatcatgttgtgcatcatgtgcctaggaaagtttatgcatccgggggctcaagctggattatcgacaacggatgcacaaaccacatgacgggggagaagaagatgttcacctcctacgtcaagaacaaggattcccaggatacgattatttttggagatgggaaccaaggcaaggtcaaaggtttgggaaagatagccatcacaagcgagcactctatttcaaatgtatttttagtagagtcattagggtacaacctcctgtctgtaagtcaattgtgccacatgggctacaattgtttgtttacaaatgttgatgtatctgtctttagaaggagtgatggttcattagcatttaagggtgcattagacgacaaactctacttagttgatttttcgaaagaggaggccgatctagatgcatgcttaatagctaagactagtatgggctggctgtggcatcgccgtctagcacatgttgggatgaagaaccttcataaacttctaaagggagaacatgtgttaggactaaccaatgataaatcagaaacccaagggaccctcaagcgctttctaaagagggctcaaaacgaatgtgagctcaaggtgaaaaagataagaagcgacaacgggtccgagttcaagaatctacaagtggaggagtatcttaaggaggaaggtgtcaagcacgagttctccgctccctacacaccacaacaaaacagtgtgatagagaggaagaacaggacgtttatcgacatggcgaggacgatgcttggagaattcaagacgcccgagcggttttggtcggaagctgtgaacatagcttgccatgccataaaccggctctatctgcatcgccttctcaagaagacctcctacgaagtccttaccggtaacaaacccaacgtttcttactttcgtgtatttgggagcaaatgttacattctggtgaagaaaggtagacattctaaatttactcccaaggcagtagaagggtttttactagggtatgactcaaatacaaaggcgtatagagtcttcaacaaatcatcgggtttggttgaagtctctagcgacgttgtatttgatgagactaatgactctccaagagagcaagttgatcttgatgacatagatgaagatgatgttccgacgaccgcaatgcgcatgatggcgatagatggtgaacaggtacctcaaaaagagggacaggatcaagggggagcacatgaagaacaagtgatggaggaagaagcaccaagtgtccctccaactcaaatccgagcaacgatccaacgacatcaccccgttgaccagattctgggtgacataagcaagggagtaacgactcgctcaagattagctaatttttgtgagcattactcgtttgtctcttctattgagccttttagggtagaagaggccttgcaggatccggattgggtgttggccatgcaggaagagctcaacaccttcaagagaaatgaagtatggagcctggtgccacgtccaaagcaaaacattgtgggaaccaagtgggtgttccgtgacaagcaagacgagcacggggtggtgacaagaaacaaggctcgacttgtggcaaaaggttatgcccaagtcgcaggtttggattttgaggagacttttgctcctgtggctaggctagagtctattcgaatattattagcctatgccgctcaccactctttcaggttgtttcaaatggatgtgaagagcgctttcctcaacgggccaatcaaggaggaggtatacgtggaacaaccccctagctttgagggtgacaggtaccccgaccatgtgtttaaactctctaaggcgctctatggacttaagcaagccccgagagcatggtatgaatgccttagagatttcttaattgctaatgctttcaaggttgggaaagtcgatcccactcttttcactaagacttgtgatggtgatctttttgtgtgccaaatttatgtcaatgacataatatttggttctactaaccaaaagtcttgtgaggagtttagcagggtgatgactcaaaagtttgagatgtcgatgatggtgaagcaactcaaggacaacaccttcatctcccaaacgaagtacactcaagatcttctcaagcggtttgggatgaaggacgccaagcccgcaaagacaccgatgggaaccgacgggcatgtcgacctcaacaaaggagactcttatgctggatgcaaggttgataggaagagtacatcagggacgtgtcaattcctaggaaggtccctgatttcttggagttcaaagaaacaaacatctgttgccctatccaccgttgtgcccgagtatgttgccgcaggacagtgttgcacgcaactactttggatgagtcaaaccctccgggactttggctacaatctgagcaaagtcccactcctatgtgacaatgggagtgcaatccgcatggcggataatcctgctgaacacgaccgcactaagcacatagacattcgacatcactttctgagggaccaccagcaaaagggagatattgaggtgttccaaattagcaccgagaaccaactagccgatatctttaccaaaccgttggatgagaaaaccttttgtaggttgcgtagtgagctaaatgtcttagattcatgtaacttggattga

SEQ ID NO: 4548 - DNA, 765 bp, Zea mays
  Clone ID: TF_ZM4544.C5.o1.fg
atggcgcttatcatcaagcgcttcaagaccgcattgaaaggacgcaaggagtaccccaacaagaacaaagcaaggggaaagcgctcctgtttcaaatgcggtaagactggtcatttcatagcacaatgccccgataatgatgatgaccaggaacaagaaaagcatgggaagagggagaagaagaaggtttacaagaaggcgaagggcgaggcgcaccttggcaaagaatgggattcagactgctcttcatccgactccaacgatgaaggactggcagcctcagccttcaacaagtctttgctcttcccaaacgaacgccacacttgcctcatggccaaggagaagaaggataaaccagaaacccaagggaccctcaagcgctttctaaggagggctcaaaacgaatttgagctcaaggtgaaaaagataagaagcgacaacgggtccgaattcaagaacctacaagttgaggagtatcttgaggaggaaggtgtcaagcaagagttctccgctccctacacaccacaacaaaacggtgtgatgtgcgaccacaagaacaacaagagcaagatcaaccttcttcctcaacgatggtgcatcccccaactcaagatgatggacacgttcctcaagaggaggcgcgttatcaagggtgagcacaagaagaaaaagtcatggagaaagaagcaccactggcccctccaactcaagtccgagcgacaattcaaagagatcatcccgtcgatcagattctgggtgacataa

SEQ ID NO: 4549 - DNA, 555 bp, Zea mays
  Clone ID: TF_ZM4647.C3.o3.fg
atgacacccgaagagatcctcagaaaattcgtgagtgggcgcatgatggtaaaggaggctcgatacgtggacgatgcactcaacagtccactacccgtctatgaaccacagtccgttgctctcaaagcaaccagcagcagggaggcactaccaagacaggtggcacaagtggaagctaccgggctaaatgaagatgaaatggtgcttatcatcaagcgcttcaagatcgcacttaaaggacgcaaggagtaccccaacaagaataaaacaaagggaaagcgttcatgcttcaaatgcggtaagactggtcactttattgcccaatgtcccgataatgatcatgaccagggacaagaaaaaggcaggaagagggagaaaaagaaaaactacaggaaggcaaagggcgaggcgcaccttggaaaggaatgggattcggactgctcctcttccgactccgatgatgaaggattagctgcctcggcttttgacaaatcttcactcttccccaaagaacgccatacgtgtctcatggccaaggagaagaagtttaaatga

SEQ ID NO: 4550 - DNA, 1443 bp, Zea mays
  Clone ID: TF_ZM4840.C5.o1.fg
atggatcctaagggaaaggggatggtggtcaacgacaaggagaaggagtccttcctcaatgagcctagagacgacaagcctactgactcaggctcaagtcacaagaagagggatgggaagaagaggcgcatcaagaaaatcgtctactacgacagcgatgcctcttcatcttcaccaagagacgacgatgacgacgactcttcatcgaaaaagaaaatgcaaattcataagaatgcacaagctaccactgttttgctagcatctttgtgcagggatgaatacaacaaggtgagcggcttggacaacaccaaacaaatttgggataccctcaagatatcacacgagggaaacgacgccaccatgatcaccaagatggagttggtggaaggcgagctgggaaggttcgcgatgatcagaggagaggagccaacacaaacatacaacaggctcaagaccctggtcaacaaaattagaagctatggaagcacaagatggacggaccacgacgtcgttcgactaatgctaaggtcatttacggtacaccaagatgacgcacgaggagattcttgggaagtttgtgagcaggcgcatgatggtgaagaggctcgatatgtggacgatgctctaaacggtccactacctgtccatgagcctcaaaccattgccctcaaagcaaccagcaacagggagacgctaccaagcaaggtggcacaagtggaggccacgggcctcaacgaagatgagatggcacttatcatcaagagcttcaagaccgcactaaaaggacgcaaggagtaccccaacaagaataagacaaagggaaagcgctcctgtttcaaatgcggtaagactggtcatttcatagcacaatgccccgataatgatgatgaccaggaacaagaaaagcatgggaagagggagaagaaggtgtacaagaaggcgaagggtgaggcacaccttggcaaagaatgggattcagactgctcttcatccgactccaacgatgaaggactggcagcctcggccttcaacaagtcttcgctcttccccaacgaacgccacacttgcctcatggccaaggagaagaaggtaagcgttcgagatacctctaagtatactacttctagtgatgatgattctagtgatgatgaagtagattactctagcttattcaaaggtttagatagagctaaggtagaaaagatcaatgaattaattgatgctctaaatgaaaaggatagattgttagaaaaacaagaggatattttatatgaagagcatgataaatttgttagtgtgcagaaatctcttgctttagagattaaaaggaatgaaatgctatcctctgaattttctgtttgtcatgaatctgtctctagtttaaagattctgaatgatgatttaaatgttaagctagaggaagctaataaatctagttcatga

SEQ ID NO: 4551 - DNA, 1497 bp, Zea mays
  Clone ID: TF_ZM5106.C2.o12.fg
atggatcctaagggtaaggggatggtggtcaacgataaggagaaggagtccctcttcaacgagccaagagacgacaagcccactgactcaggctcgagtcacaagaagagggacgagaagaagaagagacgcatcaagaagatcatctactacgacagtgatgcatcatcttcttcaccaagggacgacaacaacgacgacgactcttcatcaaagaaaaagatgcatatgggaattgtagaaaatgggatgcattttgataacactgataatcctgtgattattaatgagcaaatccataaaaatgcccaagctactactgtgttgttagcatctctttgcagggacgagtataataaacaactagctaccggactcaatgaagatgaaatgacgcttatcatcaagcgcttcaaaaccgcgcttggacgcaaagagtaccccaacaagaacaaaacaaggggaaagcgctcctgcttcaagtgcggtaagactggtcatttcattgcacaatgccctgataatgataatgaccagggagaagaaaagagcgggaagagggaaaagaagaagaactacaggaaggcgaagggcgaggcacaacttggaaaggggtgggattctgactgctcctcatctgactccgacgatgaaggattggctgcctcggccttcaacaagtcttcgctcttccccaacgaacaccacacttgcctcatggccaaggagaagaaggtacatattcgagattcccctaagtactcttcttctagtgatgaggaatcctccgatgatgaagtagattactctagtttatttaaaggtttagatagagtcaaagcagatgaaattaatgaattaattgatgctctaaatgaaaaagatagactgctagaaaagcaagaggacattttgtatgaggaacatgacaaatttgttagtgtacaaaaatatcttgctttagaaactaagaaaaatgaaatgctatcttctgagttatcttcttgccatgaatctatatctagtttaaagaatttaaatgatgaattaaatgctaagctagaggaagttagtaaaacaagttcatgtgtagagcatgttagtatttgtaatagatgtaaggactatgatgttgatgcctgtgatgaacatcttatttctattacaagattaaatgatgaggtgtcaagtcttaatgctcaacttaagacttgcaaaattgattttgataaattaaaatttgctagggatgcctacactattgctctacttttgtttatggtagaagtaggcctaggagaaatcatgttgtgcctcatgtgcctaggagaatgtgcaatgaacctactactgtttttcattcttgcaacacttcttttgtactttcatgtttatgcatccgtgggctctagctggataatcggcagcgtatgcacaaaccacatggcgggggagaagaagatgttcacctcctacgtcaagaacaaggattcctag

SEQ ID NO: 4552 - DNA, 4534 bp, Zea mays
  Clone ID: TF_ZmC24260_9
atgaagatgaagaggggtcaacctagaagaggccatacatcaagaagacatgctttcaatgatagaaaatgttttgagtgtggggaacccggtcacatcgccatgaattgccctaacaagaataagaatggcacagatggagatgataagaagaagaataaattctacaacaggaagaaagatggcagagcctacctagttgaatgggatttggataatagctcggatgatgatgatgatgacacctcatccaaacttaatgccggaatggccatcaatgaagccccttcacttttctcatcccctcattgtctcatggcaaagggagatgctaagaatgttgggtgaggccgatgactacatgcacaaagaaaaagaaaaatttaagaccttgaaggaattgtataaaaacctccaagtgtcttttgaggagctcaagacctctcacaatgacctaaaagaaaattgtgagaagcttgtggatgctcaaaaatcgtctattgtgcatgaagttatggtggtcactaaggatgttggagtcacttgtgacttacttgatagtcttacaagtgaaccactacctactaactctatttgtgataaatgcaaaatttctctcaatgataatattgctcttgatgaatcaaaaattgttgttgagaataaagtgttagtagatagagtaaatactctaactcatgacctagaaaaggcatatggtggaaaggctaaattggatttcatattgggaagtcaacggtgctcacttaaccgtgaaggtcttggatatgttcccaagaaaggaaataatgcttttataaagcaaaatacattgtttgtgaaagaatgtgacaaagtgtgtcacaagtgtcacaagaagggacatgttaagaaaaattgtcctaagctcaaaaatgtatcctccacttgttttgagcattgttatgttctttctcataatgcaaaaggtgttcatgctaaatttattggtacttcaattgttggaaacaaaaagaaagctatttgggtgccaaagaccttggtcactaacatccaaggacccaagcaagtttgggtgaactacaaggcgggagggaatcattgggtgttagatagtggatgcactcaacacatgaccagagatatgaaaatgttcacccaaatgagtgaggaagattgctcaaattatgatagtatcacgtttggagataatcgcaaaggaaaggttaaaggtttgggtaaaattgctatttcaaatgatcattccatatcaaatgtgctcttggttgagtctttaaattttaatttactttccgtagctcaattatgtgatttgggatttaattgcaatttcacggttgaagatgttattatctctagtgttgatggtagcaatcttaagtttaaaggttttagacatgaaaatctttatcttgttgatttctcatctaatgaggcaaagctcacaacttgcttattctcgaaagcttcactagacaaatctaatgtgtttgaaacattcaagtcatttgctatattggctcaaaatcaatttgatttcgacataaaaaatgttagaagtgataatgggtcggaattcaaaatgcaagaattgatgaatattgtgatgacaagggtattaaacatgaattctcttccaaatataccccagaacaaaatggtattgttgaaagaaagaatagaactctcattgatggctaggtctatgttagcggaatataatatatcggattcttattgggccgaggcaataaatactgcttgtcattcatcaaatagactatattatcacaagcttttgaagaaaactccatatgaattgctcattggtagaaagccaaatatctcatattttagggtattcggttgcaaatgttatattttgagaaagggaagccggctttctaaatttgagaagaaatgtgatgagggttttcttcttgaatattcatcaaatagtaaagcttatagagtcttcaacaaaactcatggtattattgaagaagcatatgatgttgaattcgataaaacaaatgggtctcaagatgagagtgataatcttgatgatgttggtggaactcaattgataaatgcaatgaaaacaatggccattggtgaaataaagccaaaggaagatgatgatgaaaatagtgtggttgtcattccttcatcttcaactctaaatgaggaagatcaccaaagccaacaacatgatgaaactatggatactcatgatcaaggtacttcaagacattcggttcctcctaatgcttcaactagcaattatcaaaccgtatcaagaattcatcattctattgtgaaggatcgcccggttgatcaaattgttggtgatattagtaagggtgttcaaactcgctctcgcatagcttcattttgtgaacatttctcttttgtatcttgtatggaacctaaccgtgtagatgaagctctacttgatgttgattgggtgaatgcaatgcatgaagaattaactaacttcgctcgaaatgaagtttgggagcttgttgagagaccaaagaaccacaatgttattggtacgaaatgggtgtttcacaacaagcacaatgaagatggtgtggtagtaagaaacaaggcaagattagttgcacaaggatatactcaaattgagggattggattttggggagacatttgctcccgtggcaagattagaagcaatccggattcttcttgcttatgcttctgcacataatatcaagctctaccaaatggatgtaaagagtgcttttctaaatggtaagattagtgaactagtgtatgttgaacaacctcccggttttgaggaccccaaaagacctaaccatgtgttcaagctttctaaagctctctatgggcttaagcaagctccacgcgcttggtatgaaaggcttagggatttcttgctttccaaagacttcaaaattgggaaggttgacactactctattcactaaaagaattgggaaacacttatttgtttgtcaaatctatgttgatgatattatttttggatctactaatgaattattttgtgaggaattcggaaaaatgatgtcaaaagaatttgaaatgtctatgataggagaatttagcttcttccttggccttcaaatcaaacaattgaaagatggaatttttataagtcaatcaaaatatttgaaggacatgctcaagaagtttggtttagaaaatgcaaagcctaccaagactccaatggaaacaaatggtcatctagacttagatgaaggaggtcgctttaaatcaaagcgccctcatggagatgatgctgattatacaccaaccactgattcagaggcccaatcctcagctgggggcactgaatctatggatactgaagactttcctcatatccatcccgactatcccattgacaccacaggatggacatatccaaagcggaggttttctatggctgagtactactcaaggcggactgtgaaccaatacactctgccatctgacaccaatgttcaatttttccacactcagctgcagtttgatgttttttggggcaccttggtggatacaaattttcataaacatcaagtgattgattggtctttcatgctaggacaatcagtcatggaggatctgatccctaagtttgagacgtgtggactgtatcagtttatgtggcaacgaacagacttcagtgaaatggctgtcaagcaattcctggccacctcagagattgatatagaagaagaatccatcacttggatgactggattcaagcgatattctgcatcttttgctgactttgccactgccaacagtctggattatggcaccatttcagctgagctggatctctatactgaggataattttgaggattttgtgcaattctatgagccagcaaggctaggaatacccaggaggtttggagagacagcaggactcaggcatcatcctgctgtaatcaataagattgtcagagtcactattcttcccaagagtggtgttaagagcaaaataagagacaaattctggaacattatccagcacatcatgaatggtgaggtcatgaatattgttcttttcatgatgagacagctcaatgatttgaaaatggataagattcagaatttagcatatgctccttatattatggctctcatcaaagccaagacaagatttgaggggccctgtgagattgttcacacaccgtttagaccctttaagaatgagatagggtttctcaccaggccactcactcccttcccagatgatgaggaagaccctggctataatgcaggagcagctcctgatgttgaggccgagcagatgcctcctcctccacctcctcctcagcctcagcagtattggcagcctggtccaggctactttgatccctattttcacaatatgcagcaggggcttcagacccatattgatactcgctttgagggcatgatgacacatgtggatcaccgcctcgatgacatgcaatctcgctttgacagtaactag

SEQ ID NO: 4553 - DNA, 2073 bp, Zea mays
  Clone ID: TF_ZmC4916_422
atggatcctaagggaaaggggatggtggtcaacgacaaagagaaggactccatcttcaacgagccaagagatgacaagcccactgactcaggctcgagtcacaagaagaaggacaggaagaagaagaggcgcatcaagaagatcatctactacgacagtgatgcctcctcttcttcaccaagagatgacgacgacgacaacgactcgtcgccgaaaaagaaaatggttaatcaaaattattcttttgattactcttgcattccctacaactcaaatgctcatttgctttctattcctcttggaaaacccccacactttgatggagaggattactcattttggagccataaaatgcgtagtcatctgttttctctccatcctagtatctgggaaattgtggaaaatgggatgcattttgatagtacagataatcttatattcattaatgaacaaattcataagaatgcccaagctactactgtcttgttagcttcgctttgcaggaacgaatacaataaagtaagtggcttggacaacaccaagcaaatctgggacaccctcaagatctcacatgagggaaatgatgctacaatgatcaccaaaatggaactggtggaaggcgagctctggagatttgccatgatcaggggagaagagccaacacaaacctacaacaggctcaagaccctggtcaacaagattagaagctatggaagcacaagatggacagaccgcgacgtcgtccgactcatgctcaggtcctttacagttattgacccccatcttgtgaatcttatccatgaaaaccccaggtacacaaagatgacgcctgaggagatactcagaaaatttgtaagcgggcgcatgatggttaaggaggcaaggtatgtagatgacgccttaaacggcccactgcccgtctacgagccacaacccattgcgctcaaggcaacaagcagcaaggaggcgctaccaagcaaggtagcacaattggaggctgccgggctcaacgagaatgaaatggcgcttatcatcaagcgcttcaagaccgcacttaaaggacgcaaggagtaccccaacaagaacaaaacaaggggaaagcgctcctgcttcaaatgcggtaagactggtcactttattgcaaattgtcccgataatgagagtgaccagggacaagaaaagagcgggaaggagaaaaagaagaactataggaaggctaagggcgaggcgcacttgggaaaggaatgggacttggactgctcctcttccgactccgacgacgaaggactcacttcctcggccttcaacaagtcttctctcttccccaacgaacgccatacatgtcttatggccaaggaaaagaaggtacatgttcgagatacccctaagtacactacttctagcgatgatgattcttccgatgatgacgtagattactctagtttatttaaaggtttagatagagctaaagtagagaaaattaatgaattaattgatgctctaaatgaaaaagatagattgctagaaaggcaagaagatattttatatgaggaacatgacaaatttgttagtgtgcaaaaatcccttgccttagaaactaagagaaatgaaatgttatcttctgaattgtctatttgccatgaatcggtctctagtttaaatagtttaaatgatgaactaaatgctaggctagaggaagtcaacaaaactagttcatgtgtagagcatgttgtgatttgtaatagatgtaaaaattttgatgttgatgcttgtgatgaacaccttgcttctattactaaattaaataatgaggtggcaagtctgaatgctcaacttaagacttgcaaggttgattacgacaaactaaaatttgctagggatgcctacactgttggtagacacccttcaattaaggatggacttggttttcgaaaggaaaccaagaacttaacaagccaaaggactcctgttctcaacaaggagaaagggaaggcccctatggcaagtagtcctcaaaggaaccatgcttttattatgataggaaaattgctagtcgttctcattacaataaga

SEQ ID NO: 4554 - DNA, 1821 bp, Zea mays
  Clone ID: TF_ZM4132.C6.o2.fg
atggatcctaagggaaaggggatggtggtcaacgacaagacaaaggagtccatcgtcaacgagccaagagatgataagccttcggactctggctcgagtcataagaaaagagacgggaataagaagaggcgcatcaagaagatcgtctactacgacagcgacgagtcctcttcttccccaagagacgacgacgacgagaaaaagaaaccggttaattcaaacttttcttttgattattctcgtattccggttaactccaatgctcatttactttcaattccacttgggaaacctccgaactttgatggagaagactactcattttggagtcacaaaatgcgaagtcacctattctctcttcatccaagtatttgggagattgttgaaaatggaatgctttttgatagtactgataaccccgttttaattaatgagcaaatccataaaaatgcacaagctaccactgttttgctagcatccttgtgcatggacgagtaccacaaggtgagcggcttggataacgccaagcaaatttgggataccctcaagatctctcatgaggggaacgacgccaccatgatcaccaagatggagttggtggaaggcgaactgggaaggttcgcaatgatcaggggggaggagccaacccaaacgtacaacaggctcaagaccctggtcaacaagatcaggagctatggaagcacgagatggatggaccacgacgtcatccgacttatgctcaggtccttcagcgtccttgatcctcatcttgtgaactcgattcgtgaaaatcctaagtacacgaagatgacgcctgaggaaatacttggaaagtttgtaagcgggcgtatgatgatcaaggaagcaagatacgttgatgaggcattgaatggcccaatgcccatctacgagcctcaaactgttgctctcaaagcaacaagcagccgggaggcactacctagcaaggtggcgcaagttgaagcggtcgggctaaatgaggacgaaatgaccctcattatcaagcgcttcaagacaacgctaaaaggacgaaaggagcatcccaacaagagcaaagcaaagggaaagcgctcctgttttaaatgtggtaagactggtcatttcatagcaaattgtcccgataatacaaatgaccaggaacaagaaaggaatgggaagagggagaaaaagaagacctacaagaagatgaagggcgaggcgcaccttggcaaagagtgggactcggattgttcttcgtccgactccgacgacgaaggactcgccgcctcggccttcaacaagtcgttgctcttccccaacgagcgccatacttgcctaatggcaaaggagaagaaggtaaacgctcgagaaactcctaagtactctacttctagtgatgaggactctagtgatgatgaagtagattacactagcttgttcaaaggattagatagagctaaagtggaaaagattaatgagttgattgatgcattgaatgaaaaagatagactgctagagaggcaagaggacattttgtatgaggaacataacaaatttattagtgttcaaaagtctcttgccttagagattaaaaggaatgaattactatcttctaagttatctatttgcaatgaatctatttctagcttgaagattttgagtgatgatttaaatgctaatctagaagtcgttaataaatctagtccttgtgtagagcacgttgtgatttgtaataggtgtaaggatttcaatatagatgcatgtgttgagcaccttactgaaagggaaatgtgcccttgggctatttctaatatattttggtga

SEQ ID NO: 4555 - DNA, 1224 bp, Zea mays
  Clone ID: TF_ZM4133.C5.o1.fg
atgacgcttataatcaagcgcttcaagaccgcgcttaaaggacacagggagtaccccaacaagaacaaaacaaggggaaagcgctcctgctttaaatgcggtaagactggtcactttattgcaaattgtcccgataatgatagtgaccagggacaagaaaagagcaggaagaaggagaaaaagaagaactacaggaaggcaaagggtgaggcgcaccttggaaaggaatgggactcagactgctcctcttccgactctgacgacgaaggacttgctgcctcagccttcaacaaatcctcactcttccccaacgagcgtcatacatgccttatggccaaggagaaaaaggtttatgcatccgggggctcaagctggattatcgacagcggatgcacaaaccacatgacggaggagaagaagatgttcacctcctatgtcaaaaacaaggattcccaggatacgatcatctttggagatgggaaccaaggaaaggtcaaaggcttgggcaagatagccatcaccaacgagcactccatatcgaatgtatttctagtagagtcgcttggttacaaccttctgtctgataaatcagaaacccaagggaccctaaagcgcttcctaaggagggctcaaaacgaatttgagctgaaggtgaaaaagataaggagcgacaatgggtccgagttcaagaatctgcaagttgaggagtatcttgaggaggaaggagtcaagcacgagttctccgctccctacacaccacagcaaaacggtgtggtagagaggaagaacaggatgcttatcgacatggcgagaacgatgcttggagagttcaacacgcccgagcggttttggtcggaagttgtgaacacagcttgccacgctataaaccggctctatctgcatcgccttctcaagaagacctcctacaaactcctgaccggtaacaaacccaacgtctcctactttcgtgtatttgggagcaaatattacattctggtgaagaaaggtagacattctaaatttgctcccaaggtagtagaagggtttttactaggggtagaagaggccttgcaggatctggactgggtgttggccatgcaggaagagctcaacaacttcaagagaaatgaagtttggagcctggtgccacgtccaaagcaaaatgttgtgggaaccaagtgggtgttccgcaacaagcaagacaagcacggggtggtgacatga

SEQ ID NO: 4556 - DNA, 4290 bp, Zea mays
  Clone ID: TF_ZM4325.C1.o25.fg
atggatcctaagggaatggggatggtggtcaacgacaagacaaaggagtccatcgtcaacgagccaagagatgataagccttcggactctggctcgagtcataagaagaaggacaggaagaagaagaggcgcatcaagaagatcgtctactacgacagcgacgagtcttcttcttccccaagagacgacaaatacgaagagaaaaagaaaacagtcaactcaaacttttcttttgattattctcgtattccattcaattctaatgctcatttactttcaattccactcgggaaacctctgcactttgatggagaagactacccattttggagtcacaaaatgcgtagtcacctattctctctccatccaagcattttggagattgttgaaaacggaatgctttttgatagtactgacaaccccgttttcattaatgagcaaatccataagaatgcacaagctacctctattttgttagcatccttgtgcagggacgagtacaataaggtgagcggcttggacaacgccaagcaaatctgggacaccctcaaaatctctcatgaggggaacgacgccaccatgatcaccaagatagagttggtggaaggtgaactagggaggttcgcaatgatcaggggagaggagccaacgcaaacgtacaattggctcaagaccctggtcaacaaaatcagaagctatggaagcacgagatggaccgatcacgacgtcgtccggcttatgctcaggttcttcactgttctcaatcctcatcttatgaattcaatttgtgagaatccctggtacacaaggattacgcccgaggaaatactcggaaagtttgtaagcgggcatatgatgatcaaggaggcaagatacgttgatgaggcattgaatggcccaatgcctatctatgagcctcaacccgttgctctcaaagcaacaagcagcagggaggcgctacctagcaaggtggcacaagtagaggcagccgggctaaacgaggatgaaatggccctcatcatcaagcgcttcaagacggcgctaaaaggtcgcaaggagcatcccaataagagcaagacgaagggaaagcgctcctgcttcaagtgtggtaagactggtcactttattgctaactgtcccgataatgatagtaaccagggacaagaaaagagcgggaagagggagaaaaagaaatcctacaagaaggcgaagggcgaggcgcaccttggcaaggagtgggattcggattgctcttcgtccaactccaacgacgaaggactcaccgcctcggccttcaacaagtcgtccctcttccccagcgagtgtcacacctgcctcatggcaaaggagaggaaggtaagcgctcgaaataactctatgtatgattcttctagcgatgaagagtctagtgatgatgaagtagactattctagcttgtttaaaggtctagatagagccaaggtagaaaagatcaatgaattgattgatgcattaaatgaaaagaataaactcctagaaaagcaagaggatttattgtatgaagaacatgataagtttattagagtacaaaaatctcttgttttggcaactaaaagaaatgagattctatcttctgaaatttctgcttgccatgaatctatttctagtttgaggagtgttaatgatgatttaattgctaagttagaggtagctaacaaatctagttcaagtgtagaacgtgttgtaatttgtaataggtgcaagaattttgatgttaatgcttgtaatgaacatcttgcatccattactaaactaaatggtgaagtggctagtcttaatgcccaacttaagactagcaaaaatgattttgacaaactaaaatttgcaagggatgcctacactgttggtagacacccctctattaaggatgggcttggctttcgaagggaagccaagaacttaacaagtcaaagggctcccatctccgctaaggagaaagggaaggcccctatgactagtaatgctcaaaggaatcatgcttttatctatagtgataggaaattttctagaaatgctcataggagttatgcttatgattcacatgctatgattgcttcaagttcttcttttgtgcatggtagaaataggcctaggaaaaatgttgttcatgtgcctaggaaagtttatgcatccgggggctcaagctggattatcgacagcggatgcacaaaccacatgacgggggagaagaagatgttcacctcctatgtcaagaataaggattcccaagatacaataatatttggagatgggaatcaaggcaaggtcaaaggcttaggcaagatagctatcactaatgagcactttatatctaatgtatttctagtagagtcgctaggatataatctgttgtctattagtcaattatgccacatgggttataattgtctatttacaaatgtagatgtgtctgtgtttagaaggagtgatggttcactagcttttaagggtgtactagatgacaaactctatttagtggatttttcgaaagaggaggccgatctagatgcatgcttaattgctaagactagcatgggctggctgtggcatcaccgtctagcacatgttgggatgaagaaccttcacagacttctaaagggagaacatgtgttaggtctaacaaatgtgtttttcgaaaaagatagaccttgtgcagcttgtcaagtaggcaaacaggtgggaagcgctcatcacagcaagaatgtgatgaccacatcaagacctttggagctacttcacatggacctcttcggacccgtcgcctacctcagcttagggggaagtaagtatgatcttgttgttgttgatgatttttcccacttcacttgggtattctttttgcaggataaatcagaaacccaagggaccctcaagcgctttctaaggcgagctcaaaacgaatttgagctcaaggtgaaaaagattagaagcgacaacaggtccgagttcaagaacctgcaagtggaggagttctttgaggaggaaggaattaagcacaagttctccgctccctacacaccacagcaaaatggtgtggtagagaggaagaacagaacacttatagacatggcaaggacgattcttggagaattcaagatgcccgagcgatttaggtcagaagctgtgaacacagcttgccacgccataaaccaggcctaccttcatcgcctcctcaagaagacgtcgtatgaactcctaaccggtaacaaacccaatgtttcatgttttcgtgtatttgggagtaaatgttacattctagtgaagaaaggtaggaattcaaaatttgctcccaaagctgtagaagggtttttgttaggttatgactcaaatacaaaggcgtatagagtcttcaacaaatcatcgggtttggttgaagtctctagcgacgttgtatttgatgaaactaatggctctccaagagagcaagttgatcttgataatatagatgaatacgatgttccaacggacgcaattcgcaccatggcgattggagatgtttctcaaaagaaggcgtgtgatcaagggggagcacaagaagatcaagttatggaggaagaagcaccacggccccctccaactcaagttcgagcgacgattcaaaggaatcatcccgtcgaccagatattgtgtgatataagcaagggagtaaccactcgctctagattagctaatttttgtgagcattactcttttgtctcttctattgagcctttcagggtagaagaggccttgctagatcccgactgggtgctggccatgcaggaagagctcaacaacttcaagcgaaacgaagtttggacactggtgccatgtcccaagcaaaacattgtgggaaccaagtgggtgttccgcaacaagcaagacgagcacggggtggtgacacgaaacaaggctcgacttgtggcaaaaggttatgcccaagtcacaggtttggatttcgaggagacttttgctcctgtggctaggctagagtcgattcgcattttgttagcctatgccgctcagcattctttcaggttgttccaaatggacgtgaagagcgcttttctcaacgggccaatcaaggaggaggtgtacgtggagcaacccctggctttgaggatgaacggtaccccgaccacgtgtgttgggaaagctgatccaactcttttcactaagacttgtgatggtgatctatttgtgtgccaaatttatgtcgatgacataatatttgcccttcctttcatcacatgcaaaagcatatggtcttga

SEQ ID NO: 4557 - DNA, 3693 bp, Zea mays
  Clone ID: TF_ZM4335.C2.o1.fg
atggtggtcaacgacaaggaggagtccctcttcaacgaggcaagagacggcaagcccaatgactcaggatcgagtcacaagaagagggacgggaagaagaagaggcgcatcaagaagatcatttactacgacagcgatgcctcctcttcttcaccaagagacgacaatgacgatgactcttcgtctaaaaagagaacggttaatcaaaactactcttttgactactctcgcatgccgtacaattcaaatgcacatctactttcaattccccttggaaaacctccacactttgatggagaggactattcgttttggagtcataaaatgcgtagtcatttattctctctccatcctagcatttgggaaattatagagaatgggatggatgaatataataaggtgagcggcttagacaacgccaagcaaatctgggacaccctcaagatatctcatgagggaaacgacgccaccatgatcaccaaaatggagctggtggaaggcgagatggggagattcacgatgattaggggagaggagccaactcagacttacaacaggctcaagactctgaatcctaggtacactaaaatgacgcccgaggagattcttggaaaatttgtgagcgggcgcatgatggtgaaggaggctcgatacgtggacaatgctctaaacggtccactacccgtctacgagcctaaacctgttgctcttaaggcaaccagtagcagggaggcgcttccaagcaaggatgagatgacgcttataatcaagcgcttcaagaccgcgcttaaaggacacagggagtaccccaacaagaacaaaacaaggggaaagcgctcctgctttaaatgcggtaagactggtcactttattgcaaattgtcccgataatgatagtgaccagggacaagaaaagagcaggaagaaggagaaaaagaagaactacaggaaggcaaagggtgaggcgcaccttggaaaggaatgggactcagactgctcctcttccgactctgacgacgaaggacttgctgcctcagccttcaacaaatcctcactcttccccaacgagcgtcatacatgccttatggccaaggagaaaaaggtacgtgttcgggacacacccaagtacacttcatctagtgatgaagaatcctccgataatgaagtagattactctagtttatttaaaggtttagatagagccaaagtagagaaaattaacgaattaattgatgctctaaatgaaaaagatacattgctagagaagcaagaagatattttgtatgaagagcatgacaaatttattagtgttcaaaaatctcttgctctagaaattaaaagaaatgaaatgctatcctctgagttgtctgcttgccatgaatctgtctctagtttaaggagtttaaatgatgatttaaatgctaagctagaggaagttaataaatctacttcatgtgtagagcatgttgttatttgtaatagatgtaaggattttgatgttgatgccagtaatgaacatattgtttctattacaaaattaagtaatgaggtttatgcatccgggggctcaagctggattatcgacagcggatgcacaaaccacatgacggaggagaagaagatgttcacctcctatgtcaaaaacaaggattcccaggatacgatcatctttggagatgggaaccaaggaaaggtcaaaggcttgggcaagatagccatcaccaacgagcactccatatcgaatgtatttctagtagagtcgcttggttacaaccttctgtctgtaagtcaattgtgtcacatgggttacaattgtctttttacaaacgttgatgtatctgtctttagaaggagtgatggttcattagcttttaagggtgtattagatggcaaactctacttagttgatttttcgaaagaggaggccgatctagatgcatgcttaatagctaagactagtatgggctggttgtggcatcgccgtctagcacatgttgggatgaagaaccttcataaacttctaaagggagaacatgtgttaggactaaccaatgtttgtttcgagaaagataggccttgtgcagcatgtcaggcagggaaacaggtgggaagcactcatcatagcaagaatgtgatgacaacatcaagaccactggagcttcttcacatggacctcttcggacccgttgcctaccttagcatcgggggaagtaagtatggtcttgtaattgttgatgatttttcctgcttcacttgggtgttctttttacaggataaatcagaaacccaagggaccctaaagcgcttcctaaggagggctcaaaacgaatttgagctgaaggtgaaaaagataaggagcgacaatgggtccgagttcaagaatctgcaagttgaggagtatcttgaggaggaaggagtcaagcacgagttctccgctccctacacaccacagcaaaacggtgtggtagagaggaagaacaggatgcttatcgacatggcgagaacgatgcttggagagttcaacacgcccgagcggttttggtcggaagttgtgaacacagcttgccacgctataaaccggctctatctgcatcgccttctcaagaagacctcctacaaactcctgaccggtaacaaacccaacgtctcctactttcgtgtatttgggagcaaatattacattctggtgaagaaaggtagacattctaaatttgctcccaaggtagtagaagggtttttactagggtatgacttaaatacaaaggcgtatagagtcttcaacaaatcatcgggtctggttgaagtttctagcgacgttgtatttgatgatactaatggctctccaagagagcaagttgatcttgatgacatagatgaagatgatgttccaacggctgcaatgcgcacaatggcgataggtgatgtgcgaccacaggaacaacaggagcaagatcaaccatcttcctctacaatggtgagtcccccaactcaagatgatggacaggttcctcaagaagaggctcgacttgtggcaaaaggttatgcccaagtcgcaggtttggatttcgaggagacctttgctcctgtggctaggctagagtctattcgaattctattggcctatgccgctcaccactctttcaggctatttcaaatggatgtgaagagcgctttcctcaatgggccaataaaggaggaggtatacgtggaacaaccccctggctttgaggatgtcagggtgatgacacaaaagttcgagatgtcgatgatgggcgagttgacctacttccttgggttccaatacacacaagatcttctcaagcggtttgggatgaaggacgccaagcccgcgaagactccaatgggaactgacgggcatgttgacctcaacaaaggagtttctacgccttgtttcgggatctggtatctaaaggggtctacctttgacttgattggatactcagactctgattatgccgggtgcatggttgataggaagagcacatcagggacgtgccaatttctaggaaggtccctggtgtcctggagttctaagaatcaaacatccgttgccctatccaccgctgaggccgagtatgttgccacaaggacagtgttgcgcgcaactactttggatgaggcaaaccctctaggactttggctacaatctgagcaaagtcccactcctatgtga

SEQ ID NO: 4558 - DNA, 1281 bp, Zea mays
  Clone ID: TF_ZM4509.C2.o1.fg
atggatattaagggaaatgggatggtggtcaacgataaggagaaggagtccatcttcaacgagccaagagataacaagcccactgactctggcttgagtcacaagaagaaggatgggaagaagaagaggcgcatcaagaagatcgtctactacgacagcgacgaatcttcctcttcaccaagagacaacgacgagaaaaggaaaccggagatagttgaaaatggaatgcaatttgatagtacggataaccctgtgtttattaacgagcaaattcataaaaatgcacaagctaccactgttttgctagcatccttgtgcagggacgagtacaacaaggtgagcggcttggacaatgccaagcaaatctgggacaccctcaaaatatcacatgagggaaacgacgccaccatgatcaccaaaatggagttggtggaaggtgagctgggaaggttcgctatgatcaggggagagaagccaacacagacgtacaacaggctcaagaccctggtcaacaagatcaggagctatgggagcacgagatggacggaccacaacgtcgtccgacttatgctcaggtcttttactgttattgaccctcatcttgtgaacctcatccatgaaaatcccaggtacacaaaaatgacgcccgaagagatactcggaaaatttgtgagcgggcgcatgatggtcaaggaggcgaggtatgttgatgatgcattaaacggccccatgcccatctacgagccgcaacccgttgcactcaaggcaacaagcagcaaggaggcgctaccaagcaaggtagcacaagtagaggctctcgggctcaatgagagtgaaatggtgcttatcatcaagtgtttcaagaccgctcttaaaggacgcaaggagtaccccaacaagaacaagacaaggggaaagcgctcctgcttcaaatgcggtaagactggtcactttattgcaaactgtcccgataatgatagtgaccagggacaagaaaatagcgggaagagggagaagaaggcctacaagaaggcaaagggcgaggcgcatcttgggaaagaatgggattcagactgctcttcctccgactccgatgacgaaggacttgctgcctcagccttcaacaagtcctctctcttccccaacgaacgccatacctgcctcatggcaaaggagaaaaaggatagacttttagaaaagcaagaggatattttgtatgaagaacatgataagtttgttagtgtgcaaaaatctcttgctttagagcttaaagagtattaa

SEQ ID NO: 4559 - DNA, 1770 bp, Zea mays
  Clone ID: TF_ZM4576.C1.o19.fg
atggatcctaagggaaaggggatggtggtcaatgataaggagaaggagtccatcttcaacgagccgagggatgacaagcccactgactctggctcaagtcataagaagaaggacgggaagaagaagaggcgtatcaagaagatcgtctactacgatagcgacgagtcttcttcttccccaagagacgacgactacgacgagaaaaagaaatcggttaactcaaatttttcatttgattattcttgtattccatataattccaatgcccatttgctttctattcctcttggtaaacctccacactttgatggagaggactacgctttttggagtcacaaaatgtgtagtcaccttttctctctccatcctagtatttgggagatagttgagaatggaatacaatttgatagtacggataaccctgtattcattaacgaacaaattcataagaatgcacaagctaccactattttgttagcatcattgtgcagggatgaatacaacaaggtgagcggcttggacaacaccaagcaaatatgggacaccctaaaaatatcgcatgaagggaacgacgccaccatgatcaccaaaatggagttggtggaaggagagctaggaaggtttgccatgatcaggggagaggagccgacacaaacgtacaacagactcaagaccctggtcaacaagatcaggagctatggaagcacgagatggacggaccacgacatcatccgacttatgctcaggtctttcactgttattgaccctcatcttgtgaacctcatacgtgaaaatcccaggtacacaaagatgacgcccgaggagatactcggaaagtttgttagcgggcgtatgatggtcaaggaagcacgatatgttgatgatgcattgaacggccccatgcccgtctacgagcctcaacccgttgctctcaaagcaacaagtagcagggaggcgctacctagcaaggtggcacaagttgaggctgccgggctaaatgaagatgaaatggccctcatcatcaagcgcttcaagacggcgctaaaaggacgcaaggagcatcccaacaagagcaaagcaaagggaaagcgatcctgttttaaatgtggtaagactggtcatttcatagcaaattgtcccgataatgctaatgaccaggaacaagaaaagaacgagaagagggaaaagaagaaggcctacaagaaggcgaagggcgaggcgcaccttggcaaagagtgggattcagattgctcttcgtccgactccgacgacgaaggactcaccgcctcggccttcaacaagtcatctctcttccccaacgagcgccacacctgcctcatggcaaaggagaaaaagaatagacttttagaaagcaagaggatattttatatgaagagcatgataaggttgtgtaaggattttgatgttgatgcatgtgttgagcaccttacttctattacaaaattaaatggtgaagtgacaagtcttaatgcccaacttaagacttgcaaaaatgactttgataagttaaaatttgctagggatgcctacaccgttggtagacatccctcaattaaggatggacatgggtttcgaaaggaagtcaagaacctaacaagccaaagggctcccattcccaacaaggagaaagggaaggcccctatggctagtagtaatcaaaagaatcatgctttcatgtataatgatagaaaatttctagaagttctcattataataggagttataatgcttttgattcacatgccatga

SEQ ID NO: 4560 - DNA, 1956 bp, Zea mays
  Clone ID: TF_ZM4582.C2.o1.fg
atggatattaagggaaatgggatggtggtcaacgataaggagaaggagtccatcttcaacgagccaagagataacaagcccactgactctggcttgagtcacaagaagaaggatgggaagaagaagaggcgcatcaagaagatcgtctactacgacagcgacgaatcttcctcttcaccaagagacaacgacgagaaaaggaaaccgcaaattcataaaaatgcacaagctaccactgttttgctagcatccttgtgcagggacgagtacaacaaggtgagcggcttggacaatgccaagcaaatctgggacaccctcaaaatatcacatgagggaaacgacgccaccatgatcaccaaaatggagttggtggaaggtgagctgggaaggttcgctatgatcaggggagagaagccaacacagacgtacaacaggctcaagaccctggtcaacaagatcaggagctatgggagcacgagatggacggaccacaacgtcgtccgacttatgctcaggtcttttactgttattgaccctcatcttgtgaacctcatccatgaaaatcccaggtacacaaaaatgacgcccgaagagatactcggaaaatttgtgagcgggcgcatgatggtcaaggaggcgaggtatgttgatgatgcattaaacggccccatgcccatctacgagccgcaacccgttgcactcaaggcaacaagcagcaaggaggcgctaccaagcaaggtagcacaagtagaggctctcgggctcaatgagagtgaaatggtgcttatcatcaagtgtttcaagaccgctcttaaaggacgcaaggagtaccccaacaagaacaagacaaggggaaagcgctcctgcttcaaatgcggtaagactggtcactttattgcaaactgtcccgataatgatagtgaccagggacaagaaaatagcgggaagagggagaagaaggcctacaagaaggcaaagggcgaggcgcatcttgggaaagaatgggattcagactgctcttcctccgactccgatgacgaaggacttgctgcctcagccttcaacaagtcctctctcttccccaacgaacgccatacctgcctcatggcaaaggagaaaaaggataaatcagaaacccaagggaccctaaagcgctttctaaggagggctcaaaacgagtttgagctcaaggtgaaaaagataagaagcgacaacgggtccgagttcaagaatctgcaagtggaggagtaccttgaggaggaaggcatcaagcacgagttctccgctccctacacaccacaacaaaatggtgtagtagagaggaagaacatgacacttatcgacatggcaaggacgatgcttggagagttcaagacgcctgagcggttttggtcggaagctgtgaacacaacctgccacgccataaaccggctctaccttcatcgcctcctcaagaagacctcggtagaagaggccttgcaagatccggactgggtgttggccatgcaggagaagctcaacaacttcaagcgaaatgaagtttggagcctggtgccacgtccaaagcaaaacgttgtgggaaccaagtgggtgttccacaacaagcaagacgagcacggggtggtgacaagaaacaaggctcgacttgtggcaaaaggttatgcccaagtcgcaggtttggattttgaggagacttttgctcctgtggctaggctagagtcaattcgcattttgttagcctatgccgctcaccattcttttagcttgtttcaaatggatgtgaagagcgttttcctcaacgggccaatcaaggaggaggtgtacgtggaacaaccccctggctttgaggatgacaggtatcccgaccacgtttttaagctctctaaggcgctccatggacttaagcaagccccaagagcatggtatgaatgccttagagattttgagagcacctag

SEQ ID NO: 4561 - DNA, 3840 bp, Zea mays
  Clone ID: TF_ZM4622.C5.o2.fg
atggatcctaagagaaaggggatggtggtcaacgacaaggagaaggagtccatcttcaacgagccaagagatgacaagcccacagactcaggctcgagtcacaagaagaaggacgggaagaagaagaggcgcatcaaaaagatcatctactacgacagcgatgcatcttcttcttcaccaagagacgatgacgattcctcgtcaaagaaaaagacgattaatcaaaactattcttttgattattctcgcatgtcatacaattcaaatgtacatctactttcaattccccttggaaaacccccacactttgatggagaggattgctcattttggagtcataaaatgtgtagtcatctattttcgctccatcctagcatttgggaaattgtggaaaatggaatgcatttcgatagtacggatacccctgtaatgataaatgaacaaattcataaaaatgcacaagctactgctgtcttgctagcttcactttgcagggatgagtacaacaaaatgacgcccgaggagatccttggaaaatttgtgagcgggcgcatgatggtgaagaaggcacgatacgtggatgacgctttgaacggtccactacccatctacgagttgcagctcgttgctctcaaagcaacaagtagcaaggaggcgctaccaagcagggatgaaaggagtacccccaacaagaacaaaacaaggggaaagcgctcctgctttaaatgcggtaagactggtcactttattgcaaattgtcccgataatgatagtgaccagggacaagaaaatagcgggaaggagaaaaagaagaactacaggaaggcaaagggcgaggcacaccttggaaaggaatgggactcggtctgctcctcttccgactctgacgacgaaggacttgctgcctcagccttcaacaaatcctcactcttccccaacgaacgccatacatgccttatggccaaggagaaaaaagatagagccaaagtagagaaaaataatgaattaattgatgctctaaatgaaaaagatagattgctagagaagcaagaagatattttgtatgaagagcatgacaaatttattagtatccaaaaatctcttgctctagaaattaagagaaacgaaatgttatcctctgagttgtctgcttgccatgaatctgtttctaatctaaagagtttaaatgatgatttaaatgctaagctagaggaagttaataaatctagttcatgtgtagagcatgttgttatttgtaatagatgtaaggattttgatgttgatgcttgtaatgaacatattgtttctattacaaaattaagtaatgaggtggcaagtcttaatgctcaacttaagacttgcaaggatgattttaataaattgaaatttgctagggatgcctacactattggtagacacccttcaattaaggatggacttggttttcgaaaggaaaccaagaacttaacaagccaaaaggctcctgttctcaacaaggagaaagggaaggcccctatggctagtagttctcaaaagtgtcatgcctacatttatgatagaaaattttctaggaatgcgtatagagactatgatcatgctatgattgcttccagttctacttatgattgtagtagaaataggcctaggcgcaatcatgccgtgtctcatgcacctagaagaaataatgttgtgtctcatgtgcctaggaaaatgtgcaatgaacccactactgtttttcatacttgcaacacttcttttattctttcatgtaagaatgcaaaagtagtggctaggaagttgggatccaaatgcaagggagacaaaacttgcatatgggttccaaaaactattgtgactaaccttgcaggacccaacaagagttgggtttatgcatccgggggctcaagctggattatcgacagcggatgcacaaaccacatgacgggggagaagaagatgttcacctcctatgtcaagaacaaggattcccaggatatgatcatctttggagatgggaaccaacgcaaggtcaaaggcttgggcaagatagccatcaccaacgagcactccatatcgaatgtatttctagtagagtcgcttggttacaaccttctgtctgcagggaaacaagtgggaagcactcatcatagcaagaatgtgatgacaacatcaagaccactggagcttcttcacatggacctcttcggacccgttgcctaccttagcatcgggggaaggaccctaaagcgcttcctaaggagggctcaaaacgaatttgagctaaaggtgaaaaagataaggagcgacaacgggtccgagttcaagaatctgcatgttgaggagtatcttgaggaggaaggcgtcaagcacgagttctccgctccctacacaccacagcaaaacggtgtggtagagaggaagaacaggacacttatcgacatggcgagaacgatgcttggagagttcaagacgcccgagcggttttggtcggaagctgtgaacacagcttgccacgccataaaccagctctatctgcatcgccttctcaaaaagacctcctacgaactccttaccggtaacaaacccaatgtctcctactttcgtgtatttgggagcaaatgttacattctggtgaagaaagtctctagcgacgttgtatttgatgagactaatggctctccaagagagcaagttgatcttgatgacatagatgaagatgatgttccaacggccccaatgcgcacgatggcgattggttatgtgcgaccacaggaacaacatgagcaagatcagccatcttgctcaacaatggtgcatcctccaactcaagacgatgaacatgtacctcaagaagagggaccggatcaagggggagcacaagaagaacaagtgatggaggaagaagcaccacaggtgcctccaactcaagtccgagcgacgatccaaagaaatcaccccatcgatcagattctgggtgatatcagcaagggagtaacgactcgctcacgtttagctattttttgtgagcattactcgtttgtatcttctattgagccgttcggggtagaagagaccttgcaggatccgtactgggtgttggccatgcaggaagagctcaacaacttcaagagaaacgaagtttggagcctggtgccacgtccaaagcaaaacgttgtggaaaccaagtgggtgttccacaacaagcaagacgagcacagagtggtgacaagaaacaaggctcgacttgtggcaaaagactatgctgctcaccattcttttaggctgtttcaaatggacgtgaagagcgctttcctcaacgggccgatcaaggaggaggtatacgtggaacaaccccctggctttgaggatgacaggtaccccgaccatgtgttcaagctctctaaggcgctctatggacttaagcaagctccaagagcatggtatgaatgccttagagatttcttaattgctaatgccttcaaggttgggaaagccgatcccactctttttacaaatacttgtgatggtgatctttttgtgtgccaaatttatgtcgatgacataatatttggttctactaaccaaaagtcttgtgaggagtttagcagggtgatgatacagaaatttgaaatgtcgatgatgggcgagttgacctacttccttggattccaagtgaagaaactcaaggacgacaccttcatctcccaaacgaagtacacacaagatcttatcaagcggtttgggatgaaggacgccaagcccacgaagacaccgatgggaaccgacgggcatgttgacctcaacaaaggaggtacgtccgttgatcaaaaggcatactga

SEQ ID NO: 4562 - DNA, 1806 bp, Zea mays
  Clone ID: TF_ZM4679.C2.o5.fg
atggagaaaattagggaagtgatggctggactattccaatataggttcagagttagtgtagctagagtgggacaatcatatcagaagccatatgatcacctgtttgaaactgtcccatatccacaaggggcaaggataccagagttttctaagttttctgatgtatatatcgctgagtttgtttggccagcaaaggccaaatcttctgcatgttcttccttacaaccggttcaaaagaatcggcaagaagagattaaatttacctttaatgttgccaaatgcgataggatatttgacgaactactaaaaaatgacaacattaaattaactcatactattcctcctatggacaaattaaagagatgtgcttattcagatcaagggggagcagtgtctccgaaccaccgctggcgttttgactacctgcatgggtgccgacgaatccggtttctagaagtgcttcgcgcacgttcgcttgggttcctctccaacactcgtggaaatcatttggttggtggcatcattgccaaattacctcctacttggaggatatttttcatggctctcaaacacaagaaggaggcaatgattgttaaaagtataatttctactcttgatgttgaggaggtgagatccaaggatgtacctcgttctggtccaatggatagtggcacctctaatgccaacgtggttgaaggtaaatctggtgggaaaaacaaaaacaagacaaaccggaaaccaaaggccaagcagaacagtgattttaagaagaaaaacattgtagacctgacttgctttgtgtgtggtgaatctggtcacatagctagaaaatgtcgtaatagaaagggcaagaaaggtgatggtcagaaaactgtaaatgtggctattgctgatgctgggaattctggtggtggtttgttccgcctttcagtggctgatgattgtaataatgtggcaaactcagtttcatattctgaattgaatctctatcttgttaagacgaaagatgaggcacttaattgtttcgaaatctataaggcaaaggtagaaaaccaactagcaaagaaaattaaacgggttaggtctgatagaggaggggagtatctttctaacaaattcggtgaatactgtgtggaacatggaatcatccatgagacaacagctccctactcgcctcaatcaaacggggtggctgaacggaaaaaccaaactttgatagacttggttaatgccatgttggatagttctggtttacctaagtcatggtgtggagaagctattttagccacatgctttgttctaaaccgagttccatcagctaagggtgataaaacaccctatgaaggatggaaaggtgataccctaaaaacccttgaagaggcatatgcatcaccagatgcagagcactggaaggaagcagtccacaatgaaatggagtccattctaacaaatgggacttgggaaatatgtgacttgccagttgggtgtaaacctatggaattaaatggatattcaagaaaaaactcaaaccagatggtattgtcgataaatacaaggataggcttgtggccaagggatttacccaaaataaaggcagctttccttaatggtgagcttgacgaggagatctatatgaagcagtcagatggatttgtgacacatggacaggagaacatggatttgggagaggcagatgttatattaaacataaaactgattaagggtgagaatgggattattctgaaacaatctcattatgtggagaacattccaaagcttctccaacaccttttgatcctagtctaa

SEQ ID NO: 4563 - DNA, 3687 bp, Zea mays
  Clone ID: TF_ZM4823.C5.o4.fg
atggatcctaagggaaagggaatggtggtcaacgacaaggaaaaggagtccatcttcaacgagccaagagatgacaagcccactgactcaggctcgagtcacaagaagagggacgggaagaaaaagaggcgcatcaagaagatcatatactatgacagcgatgcctcctcttcttcaccaagggaggacgatgacgatgacgactcgtccaaaagaaagacgcatctctgtgccagggatgaatataacaaggttagcggcttggacaacgccaaacaaatctgggacaccctcaagatctcgcatgagggaaatgatgctacaatgatcaccaagatagaactggtggaaggcgagctgaggagattcgccatgatcaggggagaagagccaacacaaacctacaacaggctcaagaccctggtcaacaagatccgaagctatggaagcacaagatggacggatcatgacgtcgtccgactcatgctcaggtcatttacggttattgacccccatcttgtgaatcttattcgtgaaaaccccaggtacaccaagatgacgtccgaggagatactcggaaaatttgtaagcgggcatatgatggtgaaagaagctcgatacgtagacgatgcactaaacggtccactacccgtctacgagccacaacccattgctctcaaagcaaccagcagcagggaggcgctaccaagcagggtggcacaagtggaggctactgggctcaacgaggacgaaatggcacttatcatcaagcgtttcaagaccgcgctcaaaggacgcaaagagtaccccaacaagaataaaataaggggaaagcgctcatgcttcaaatgcggtaagactggtcactttatttctcaatgtcccgataatgacaatgaccaggcacaagaaagacatgggaagaaggagaagaagaagaattataggaaggcgaagggcgaggcgcatcttggaaaagaatgggattctgactgctcttcatccgactccgacgatgaaggactggctgcctcgaccttcgacaagtcttcactcttccccaacgaacgtcatacatgtcttatggctaaggagaagaaggtacatattcgagatactcctaagtactcttcttctagtgatgaggaatcttctgatgatgaagtagattactctgaattgtttaagggtttagatagagctaaggtttatgcatccgggggctcaagctggattatcaacagcggatgcacgaaccacatgacggaggagaagaagatgttcacctcctacgtcaagaacaaggattcccaagatacgatcatctttagagatgggaaccaaggcaaggtgaaaggcttgggcaagatagccatcactaacgagcaatcaatatcaaatgtatttttagtagagtcgctcggaagaagtgatggttcattagcttttaagagtgtattagacggcaagctctgcttagttgatttttcgaaagagaatgccggtctagatgcatgcttaatagctaatacaaatatgggctggctttggcatcaccatctagcacatgttgggatgaagaaccttcataagcttctaaagggagatcgtgtgttaggactaactgatgtctgttttgagaaaaatagaccttgtgcaacatataagtcagaaacccaagggactctaaagcgcttcttaaggaaagctcaaaatgagtttgagcttaaggtgaaaaagataagaagcgacaatgggtccgagttcaagaatctacaagttgaagagtttcttgaggaggaaggcatcaagcacgagttctccgctccctacacatcacaacaaaatggtgtggtagagaggaagaacaggacgctaatcgacatggcgaggacgatgcttggagagttcaggacgcccgagcggttttggtcggaagttgtgaacacggcctgccacgctataaaccggctctatctgcatcgcctcctcaagaagacctcctacaaacttcttaccggtaacaaacctaatgtctcttactttcgtgtatttggaagcaaatgctacattctggtgaagaaaggtagacattctaaatttgctcctaaggctgtagaagggtttttactaggatatgacttaaatacaaaggcgtatagagtcttcaacaaatcatcgggattagttgaagtctctagcgacgttgtatttgatgagacgaatggctctcaaagagagcaagttgatcttgatgatatagatgaagatgaagttccgacggccgcaatgcgtatgatggcgataggtgatgtgcgaccacaggaactacaggaacaagatcagccttcttcctcgacactggtgcatcccccaactcaagatgatggacaggtacctcaagaacaggagcgtgatcaagggggagcgcaagaagaacatgttatggaggaagaagcaccacaggcccctccaactcaagtccgggcgtcaatccaaggacatcaccccgtcgaccagattttgggtgagatcagcaagggagtaaccactcgctcacgattagctactttttgtgagcattactcatttgtctcttctattgagcctttcagggtagaagaggtcttgcatgatccggactggatgttagccatgcaggaagagctcaacaacttcaaaagaaatgaagtctggagcctggtgccacgtccaaagcaaaacgttgtgggaaccaagtgggtgttccgcaacaaacaagacgagcacggagtggtgacaagaaacaaggctcgacttgtggcaaaagcctatgccggtcaccactcctttaggctgtttcaaatggacgtaaagagcgctttcctcaatgggccaatcaaggaagaggtatacgtggaacaaccccctggttttgaggatgactggtatcccgaccatgtatataagctctctaaggcgctctatggacttaagcaagccccaagaggatgctatccctctctcttacaaaagccttgtgatggtgacctttttgtttgccaaatttatgtcgatgacataatatttggttctactaaccaaaagtcttgtgaggagtttagcagggtgatgatgcaaaagttcgagatgtccatgatgggcgagttgacttactttcttggattccaagtgaagcaactcaaggatggcactttcatctcccaaacgaagtacactcaagatcttctcaagaggtttggaatgaaggacgccaagcccgcgaagacacttatgggaactgatgggcatcttgacctcaacaaaggaggtaagtccgttgatcaaaaggcataccggtcaatgataggttcattactttatctttgtgctagtagaccggacattatgcttagtgtatgcatgtgcgctagatttcaatccgaccccaaggaatgtcaccttgtggccgttaagcgaattcttaggtatttagtttctacgcattgcttcgggatctggtatccaaaggggtctacctttgacttaattggatacgcagactccgattatgccgggtgcaaggttgataagaagagcacatcagggacgtgccaatttctaggaaggtccctggtgtcccggagttccaagaaacaaacatcagttgccctatccaccattgaggccgagtacattgccgcatga

SEQ ID NO: 4564 - DNA, 1434 bp, Zea mays
  Clone ID: TF_ZM4904.C1.o13.fg
atggatcctatgggaaaggggatggtgatcaatgacaaggagaaggagtccttcctcaatgagccaaaagatgacaagcccactgactcaggctcaagtcataagaagaaggataggaagaagaagaggcacatcaagaaaatagtctactacgacatcgacgagtcctcttcttcccaaagagacgacgacgacaagaaaaagaaaacggtcaactcaaatttttcttttgattattctcgtattccgcaaaattccaatgctcatttgctttccattcctcttggtaaacctccacactttgatggagaggactacggattttggagtcacaaaatgcgtagccacttgttctctcttcatccaagtatatgggagatagtagaaaatggaatgcaatttgatagtacggataatcccatggaagagtatcataaggtgggaggcttggataatgccaagcaaatttgggacaccctcaagatctcacatgaggggaacgacgccaccatgatcaccaagatggagttggtggaaggcgaactaggaaggttcgcaatgatcaagggggaggagccaactcaaacgtacaacaggctcaagaccctggtcaacaaaatcaggagctatggaagcacgagatggacggaccacgatgccgtccggcttatgctaaggtccttcactgtccttgatcctcatcttgtaaactctatccgtgaaaatcctaggtacaccaagatgacgcccgaggaaatactcagaaagtttgtaagcggacgaatgatgatcaaggaggcaagatatgttgatgaggcgttgaatggcccaatgccgatccacgagcctcaaaccgttgctctcaaagcaacaagcagcaaggaggggctacctagcaagcgcttcaagacggcgctaaaaggacgcaaggaacatcccaacaaaagcaagacaaagggaaaacgctcctgcttcaagtgtggtaagactggtcactttattgctaactgtcccgataatgatagggaccagggacaagaaaagagtgggaagagagagaacaagaaggtttacaagaaggctaaagtcgaggcacaccttggtaaagagtgggactcggattgttcgtcgtccgactccgacgacgaaggactcgccgcctcagccttcaacaagtcgtcgctcttccccaacgagcatcatacttgtctaatggcaaaggaaaagaaggtttatgcatccgggggctcaagttggattatcgacagcggatgcacaaaccacatgacgggggagaagaagatgttcacctcctacgtcaagaacaaagattcccaggattcaatcatattcggtgacgggaatcaaggcaaggttaaaggactaggaaagatagctatttcatctgagcattcatatctaatgtgtttttag

SEQ ID NO: 4565 - DNA, 615 bp, Zea mays
  Clone ID: TF_ZM4909.C3.o1.fg
atggatcctaagggaaaggggatggtggtcaacgataaggagaaggagtccatcttcaacgagccaagagatgacaagcccactgactctggctcgagtcacaagaagaaggacgggaagaagaagaggcgcatcaagaagatcgtctactacgacagcgacgaatcttcttcttcgccaaaagacggcgacgacgactcgcacgaatacaacaaggtgagcagcttggacaacgccaagcaaatttgggataccctcaagatatcgcatgagggaaacgacgccaccatgatcaccaaaatggagttcgtggaaggcgagctgggaaggtacaccaaaatgacgcccgaggagatactcggaaagttagtgagcgggcgcatgatggtgaaagaggcacggcgcttcaagaccgcactgaaaggacgcaaggagtacccaaacaagaacaaagcaaagggaaagcgctcctgcttcaaatgcggtaagactggtcactttatagcaaattgtcccgataatgatagtgaccaaggacaagaaaagagcgggaagaaggagaagaaaaagagctacaggaaggcaaagggtgaggcacacctcggaaaggaatga

SEQ ID NO: 4566 - DNA, 2865 bp, Zea mays
  Clone ID: TF_ZM5004.C1.o6.fg
atggtaaaggaggcacgatatgtggatgacgccttgaacggtccactacctatctacgagccgcagcccgttgctctcaaagcaacgagcagcaaggagacactaccaagcagggtagctcaagtggaggctgccggacttaatgaagatgagatggcgcttatcatcaagcgcttcaagactgcactcaaaggatgcaaggagtaccccaacaggaataaaacaaagggaaaacgctcctgcttcaaatgcggtaagactggtcactttattgcaaactgtcccgataatgatagtgaccagggacaagaaaagagcgggaagaaggagaaaaagaagaactacaggaaggcaaagggcgaggcgcaccttgtaaaggaatgggactcagactgctcctcttccgactccgatggcgaaggactcgctgcttcggccttcaacaaatcctcactcttccccaacaaacaccatacatgtcttatggccaaggagagaaaatgtaaggattttgatgttgatgcttgtgatgatcaccttatttctattaccaaattaaatgatgaggtggcaagtctcaatgctcaacttaagacttgcaaaattaactttgataaattaaaatttgctagggatgcctacactgttggtaaacacccctcaattaaggatgggcttggttttcgaaaggaagccaagaacttaacaagccaaatggctcccattcccaacaaggagaaagtgagggctcctatggacccaacaagagttgggtacctaaaacccaagcttaaattccttgcaggtttatgcatccaggggctcaagctagattatcgacagcggatgcacaaaccacatgacgagggagaagaagatgttcacctcctacatcaagaacaaggattccaggatacgattatctttggagatgggaatcaaggcaaggtcaggggtttgggaaagatagccatcaccaatgagcactccatatcaaatgtatttctagtagagtcgcttggttacaaccttctgtctgtaagtcaattgtgtcacatgggttacaattgtctttttacaaatgttgatgtatctgtctttagaaggagtgatggttcattagcttttaagggtgtattagacgacaaactctacttagttgattttttgaaagaggaggccgttctagatgcttgcttaatagctaagactggtttgggctggctgtggcatcaccgactatcacatgttgggatgaagaaccttcataaacttctaaagggagaacatgtgttaggactaaccaatatttgttttgagaaagatagaccttgtgcagcttgtcaggcagggaaacaggtgggaaggactcatcacagcaagaatgtgatgacaacatcaagaccactggagcttcttcacatggacctcttcggacccgttgcctaccttagcatcgggggaagtaagtatggtcttgtaattattgatgattttttccgcttcacttgggtgttctttttgcaggataaatcagaaacccaagggaccctaaagcgctttctaaggagggctcaaaacgaatttgagctcaaggtgaaaaagataagaagcgacaacgggtctgagttcaagaatctgcaagtggaggagtatcttgaggaagaaggcgtcaagcacgagttctccgctccctacacaccacagcaaaacggtgtggtagagaggaagaacatgatgcttattgacatggagagaacgatgcttggagaattcaagacgctcgagcggttttggtcggaagctgtgaacacagcttgccacgccataaaccggccctacctacatcgccttctcaagaagacctcgtatgaactccttaccggtaacaaacccaacgtttcttacttccatgtatttgggagcaaatgttacattctagtgaagaaaggtagacattctaaatttgctcccaaggcagtagaagggtttttactagggtatgactcaaatacaaaggcgtatagagtcttcaacaaatcatcgggtttggttgaagtctctagcgatgttgtatttgatgagactaatggctctccaagagagcaagttgatcttgatgacatagatgaagatgatgttccaacggccgcaatgcacacgatggcgataggtgatgtgcgaccacaggaacaacaagagcaagatcagccatcttcctccacaatggtgcaacctccaactcaagacggtgaacagcctggtgccacatctaaagcaaaatgttgtgggaaccaagtgggtgttccgcaacaagcaagacgagcacgagtggtgacaagaaacaaggctcgacttgtggcaaaaggttatgcccaagtcgcaggtttggatttcgaggagacttttgctcctgtggctaggatagagtctattcgaatattattagcctatgccgctcaccactctttcaggttgtttcaaatggacgtaaagagcgctttcctcaacgggccaatcaaggaggaggtatacgtggaacaaccccctggctttgaggatgacaggtaccccgaccatgtgttcaagctctctaaagcgctctatggacttaagcaagccccaagagcatggtatgaatgccttagagatttcttaattgctaatgctttcaaggttgggaaagccgatcccactctttttattaagacttgtgatggtgatctttttgtgtgccaaatttatgtcgatgacataatatttggttctactaatcaaaagtcttgtgaggagtttagcagggtgatgacacaaaagttcaagatgtcgatgatgggcaagttgacctacttccttgggttctaa

SEQ ID NO: 4567 - DNA, 4383 bp, Zea mays
  Clone ID: TF_ZM5105.C4.o2.fg
atggatcctaagggaaaggggatggtggtcaacgacaaggagaaggagtccttcctcaacgagccgagggacgacaagcctactgactctggctcaagtcataagaagaaggacgggaagaagaagagggatgaatacaacaaggtgagcggcttggacaacgccaagcaaatatgggacaccctcaagatttcacatgaggggaacgatgccaccatgatcaccaaaatggagttggtggaaggcgagctaggaaggtttgccatgatcaggggagaggagccaacgcaaacatacaacaggctcaagaccctggtcaacaagatcaggagctatggaagcacgagatggacggaccacgacgttgtccgacttatgctcaggtcttttactgtcattgaccctcatcttgtgaacttcatctgtgaaaatcccaggtacacaaagatgacgcccgaggagatactcggaaagtttgtaagcggacgtatgatggtcaaggaagctagatatgttgatgatgcattgaacggcccaatggccatctatgagccccagcccgttgcactcaaggcaacaagcagcaacagggaggcgctacctagcaaggtggcacaagttgaggctgccgggctaaacgaagatgagatggccctcatcatcaagcgcttcaagatcgcactaaaaggacgcaaggagcatcccaacaagagcaaagcaaagggaaagcgctcctgttttaaatgcggtaagactggtcattttatagcgaattgtcccgataatgctaatgacaaggaacaagaaaatagcgggaagagggagaagaagaaggcctacaagaaggcgaagggcgagccgcaccttgacaaaaaatgggattcagattgctcttcttccgactccgacgatgaaggactcgccgcctcgaacttcaacaagtcgtatctcttccccaacgagtgtcatacttgcctcatggcaaaggagaaaaaggtaagcactcgagatacccctaagtatactacttcaagtgatgatgactctagtgatgatgaagtagattacacaagcttatttaaaggtttagaaagaactaaagtagataaaatcaatgaattgattgatgctttaaatgaaaacaatagactcttagaaaagcaagaggatattttgtatgaagagcatgataagtttgttagtgtacaaaaatctcttgctttagatattaaaaggaatgaaatgttgtcctctgaattatctgcttgtcatgaaactgtgtctagcttaaagagtattaatgacgatttaaatgctaagctagaagtagttaataaatctagttcttttacagagcatgttgtcatttgtaatagatgtaaagattttgatgttgatgcatgtgttgaacaccttacttctattacaaaattaaatggtgaagtggcaagtcttaatgcccaacttaagacttgcaaaaatgactttgataagttaaaatttgctagggatgcctacaccgttggtagacatccctcaattaaggatggacttggctttcgaaaggaagccaagaacttaacaagccaaagggctcccattcccaacaaggagaaagggaaggcccctatggctagtagtaatcaaaagaatcatgctttcatgtataatgatagaaatttttctagaagttctcattataataggagttataatgcttttgattcacatgctatgattgcttcaagttccaattttaatgtggttgctagaaagatggggtctaaatgcaaaggagacaagacttgcatttgggtcccaaagactattgtaactaaccttgtaggacccaacaagagttgggttcatgcatccgggggctcaagttggattatcgacagcggatgcacaaaccacatgacgggggagaagaagatgttcacctcctacgtcaagaacaaggattctcaggatacgattatctttggagatgggaaccaaggcaaggtcaaaggcttgggaaggatagccatcacaaatgagcactctatttctaatgtatttttagtagagtcgctaggctataatctcctgtctgttagtcaattgtgccacatgggctacaattgtttgtttacaaatgttgatgtatctgtctttagaaggagtgatggttcattagtgtttaagggtgtactagatggcaaactctacttagttgatttttcgaaagaggaggctgatctagatgcatgcttaatcgctaagactagtatgggctggctgtggcatcgccgtctagcacatgttgggatgaagaaccttcacaaacttctaaagggagagcatgtgttaggactaaccaatgataaatcagaaacccaagggacccttaagcgcttcctaaggcgggctcaaaatgaatttgagctcaaggtgaaaaggataagaagcgacaacgggtccgagttcaagaatctgcaagtggagtaccttgaggaggaaggcatcaagcacgagttctccgctccctacacaccacagcaaaatggtgtggtagagaggaagaacaggatgcttattaacatggcgaggacaatgcttggagagttcaagacgcctgagcggttttggtcggaagctgtgaacacagcttgccacgccataaaccggctctacctttatcgcctcctcaagaagacctcgtacgaacttcttatcagtaacaaacccaacgtatcatactttcgtgtatttgggagcaaatgttacattctagtgaagaaaggtttggttgaagtctctagcgacgttgtatttgatgagactaatgactctccaagagagcaagttgatcttgatgatatagatgaagatgatgttccgacggccgcaatacacaccatggcgattggagatgtgcgaccacaagaacaacaacagcaagatcaaccttcttcctcaacgatggtgcaccccccaactcaagatgatgaacaggttcatcaagaaggggcgtgtgatcaagggggagcacaagaagaacaagtgatagaggaagaagtaccactggcccctccaactcaagtccgagcgataattcaaaggaatcaccatgtcgatcagattctgggtgacataagcaagggagtaactactcgctcacgattagctaatttttgtgagcattactcgtttgtctcttctattgagcctttcagggtagaagaggccttgcaagatccggactgggtgttggccatgcaggaggagctcaacaacttcaagcgaaatgaagtttggagcctggtgccacgtccaaagcaaaacgttgtgggaaccaagtgggtgttccgcaacaagcaagacgagcacggggtgctcgacttgtggcaaaaggagacttttgctcctgtggctaggctagagtctattcgcattttgttagcctatgctgctcaccattctttcaggttgtttcaaatggacgtgaagagcgctttcctcaatgggccaatcaaggaggaggtgtacgtggaacaaccccctggctttgaggatgacaaatatcctgaccatgtttttaagctctctaaggcgctctatagacttaagcaagccccaagagcatggtatgaatgccttagagatttcttaattgctaatgctttcaaggttgggaaagtcgatcccactcttttcactaagacttgtgatggtgacctttttgtatgccaaatttatgtcgatgacataatatttggttctactaatcaaaagtcttgtgaggagtttagcatggtaatgacacagaaatttgagatgtcaatgatgggcgagttgaactacttccttaggttccaagtgaagcaactcaaggacggcaccttcatctcccaaacgaagtacactcaagatcttctcaagcggtttgggatgaaggacgccaagcccgcgaagacgccaatgggaaccaacggacatgtcgacctcaacaaaggaggtaggtcagttgatcaaaaggcataccggtctatgataggatccttgctttatttatgtgctagtagaccggatattatgctaagcgtatgcatgtgtgctagatttcaatccgatccaagggagtgtcactttgtggccgttaagcgaattctcagatatttagttgctactccttgcttcgggatctggtatccaaaggggtctacctttgacttggttggatactcagactccgattatgctggatgcaaggtcgataggaagagtacatcagggacatgccaattcctaggaaggtccctggtgtcttggagttctaagaaacaaacctccgttgccctatccaccgttgaggctgagtatgttgccgcaggatag

SEQ ID NO: 4568 - DNA, 1344 bp, Zea mays
  Clone ID: TF_ZmC4916_440
atggatcctaagggaaaggggatggtggtcaacgacaaggaaaaagagtccatcttcaatgagccaagagacgacaagcctaccgactcaggctcgagtcacaagaagagggacgggaagaagaaaaggcgcatcaagaagattatctactacgacagcgatgcctcatcttattcaccaagggacgacgacgacgactcctcgtcaaagaaaaagacggtcaatcaaaattattcgtttgattactctcgcattccctacaattcaaatgcgcatttactatcaattcccctcagaaaacctccacactttgatggagaggactattcattttggagtcataaaatgcgtagtcatttattttctctccatcccagcatatgggaaattgtagaaaatgggatgcatttcgatagcactgataatcctatgatcattaatgaacaaattcataagaatgcccaagccactactgtcttgctagcttcactttacaggaatgaatataataaagtgagtggcttggacaacgctaagcaaatctgggacaccctcaagatatctcatgagggaaacgacgccactatgatcacaaagatggaactagtggaaggcaagctggggaggttcacgatgatcaggggagaggagccaactcagacctacaacagactcaagaccctggtcaacaagatccgaagctatggaagcacaagatggacggatcatgatgtcgtccgactcatgctaaggtcatttactgtaattgacccccatcttttcaatcttattcgtgaaaaccctaggtacaccaagatgacgcccgaggagatcctcgaaaaatttgtgagcgggcgcatgatggtgaaggaggcgcgatacgtggatgatgcgctaaatggtccactgcccatctacgagccgcagcccgttgccctcaaagcaatgagcggcagggagacactaccaagcaaggtagcacaagtggaggctaccgggctcaatgagaatgaaatggcactcatcatcaagcgtttcaaaaccgccttaaaaggacgcaaggaataccccaacaagaataaaacaaggggaaagcgctcctgcttcaaatgcggtaagactggtcatttcatagcacagtgccccgttaatgataatgaccagggacaagaaaagcacggtaagagggagaagaagaaggtctacaagaaggtgaagggcgaggcacaccttggaaaggaatgggattctgactgctcttcatccgactccgacgatgaaggattgtctgccttggctttcgacaagtcttcgctcttattaggcttttctttgcccttctga

SEQ ID NO: 4569 - DNA, 2592 bp, Zea mays
  Clone ID: TF_ZM4989.C10.o1.fg
atggatcctaaaggcaaggggatggtgatcaacgacaaggaaaaggagtccttcgtcaacgagcccaatgatgacaagcccaccgactcaggctcgggccacaaaagaaaagacgggagaaagaagaaggcaaggcgcatcaaggaaattgtctactacgacagcgacgaatcttcctcctcccaaaaggacaacgacgactacgatagacgaaagacggttaactcaaacttttctttcgattattcgcgcatcccgcatagttcaaatgctcaattgcttcccattccacttggcaagccccctcactttgatggagaggattacggattttggagccacaaaatgtgtactcacctgttttctctccatccaagcatttgggagattgtggaaagtggaatgaaatttgatagctcggatagccctatgtttattaatgaacagattcatagaaatgcacaagctactactgtattgctagcctctttgtgcagggacgagtatcacaaggtgagcggcttggacaatgccaagcagatctgggacaccctcaagatctctcatgagggaaacgacgtcaccttgctcaccaaaatggagttggtggaaggcgaacttggacggttcgcgatgataaggggggaggagccgacgcaaacatacaaccggctcaagacccttatcaacaaaataaggagctacgggagcacgcgatggacggaccacgacgtcgtccgcctaatgctaaggtcatttaccgttcttgatcctcatttggtgaacaatatacgtgaaaatcccaggtacaccaagatgtcgcccgaagaagttcttgggaaattcgttagtgggcgaatgatgatcaaggaggcaaggtacgtggacgacgccttgaatggttcgatcaacgagccgcaaccccttgctctcaaagcaacacgaagcaaggaggcgctacctagcaaggtggcacagattgaggcggccggacttaatgatgaagagatggctctcatcatcaaaagattcaagacggtgcttaaaggtcgcaagggacagctaagcaagaccaaagccaaggggaagcgctcatgcttcaaatgcggtaagcttggtcattttattgctaactgtcccaacaatgatagtgatcaggatcaagggaacaagagggagaaaaagaagaactataagaaggcaaagggcgaggctcatctgggcaaggagtgggattcggactgctcttcatccgactccgacaatgaaggactcgccgccaccgccttcaacaagtcatccctcttccccaacgagcgtcacacttgcctcatggcaagggagaagaaagtaagcactcataatactagtacttatgcttcttcaagtgaggatgagtctagtgatgatgatgagatagattactcatgcttattcaagggattagatagaaccaaggtagacaaaattaatgaattgattgatgccttgaatgataggaatatacttttagaaaagcaagaggatttgttgtatgaagaacatgataaatttgtagaagctcagaaatctcttgctctagaaattaagaggaatgaaatgctctctagtgaattatcttcttgtcatgaaactattgccaagttaaagagttttaatgatgatttaaatgctaaactagaagtagcgactagtcttaatgcccaacttaagactagcaagaatgaatttgacaagctaaaatttgcaagggatgcctacacaattggtagacacccctcaattaaggatggacttggctacaaaagggaagccaagaacttgacaagccataaggctcccatctccgccaaggagaaagggaaggcccctatggctactagcactaaaaagaaccatgcttttttatatcatgatagaagacaatctagaagtgcttataggggttataatgcttatgatgattttgattctcatcacatgattgcttctagctcttcatatatgcatggtagaaatatgtctaggagaaatgctattcatcatgtgcctagaaagaatgttagtcatgcttctaggaaagtagtaaatgaaccttctacaatttattgtgctttaaatgcttcctttgctattcgtagaaaggataagaaaattgttgctaggaagttaggggcaaaatgcaagggtgacaaaacttgcatttgggtccctaaggatatttgcactaaccttgtaggacccaacatgagttgggtttatgcatccgggggttcaagctggattatcgacagcggatgcacaaaccatatgacgggggagaagaagatgttcacttcctacgtcaaaaataaggattcccaggattcaattattttcggtgatgggaatcaaggcaaggataagtctgaaacccaagggaccctcaagcgcttccttaggagagctcaaaatgagtttgagctcaaggtgaagaagataaggagcgacaacgggtccgaattcaagaaccttcaagtggaggaattccttgaggaggaagggatcaagcacgagttctccgctccctacacaccacagcaaaatggtgtg

SEQ ID NO: 4570 - DNA, 6385 bp, Zea mays
  Clone ID: TF_ZmC24260_2
atggctagtaacaacaatgtgcacattgggaagccaccgcactttgatggaaacaattatgattattggaaaataagaatgtcaatgcatcttagagcaatgggtggaaaaatttggccaattgttagagatggattcgttgtattgaaggaagatgaaccatccgttagtgataatgagaatatcctcacaaatgatcaagccatgaatgtcttttatgatgctcttgatataaatgagttcaatcgtatcaagaatctcacaaccgctcatgagatttgggtaaaactaatggaaattcatgaaggaactacaattgtgaagagtgccaaactatatgtgtgcaaagggaagtttgagcaatttattatgaaagaagatgagagtgtatccgatatgttcaatcgattgaatgagattgtaaatgaactcaaaggacttggttttaatgtaccagatgtggatttcacacacaagttccttagatcacttccggagaaatatgagactattgtgacaatgctagtaaggagtgatctatctacaacctctccaaccgaagtattgggagaaattctcactcaagatatatttaagaagtcacaagccgatgctttaagtttggcaaagaaggtgaaaaatgaatctattgctctcaaagccaaggcctcaaaggcaattgaaaaggaagatagcaatgatgaagaaaatgaaagcgagagtgatggtgacatggctttatttgtaaggaaattcaataaattcatgaagatgaaaagaggtcaacctagaagaggtcaaacatctagaagaaatgctttcaatgatagaaaatgttttgagtgtggggaacccggtcacattgccatgaattgtccaagcaagaagaagaagggcaaagatgaaagtgacaagaagaaaaagaaatactataacaagaagaaagatggcaaagcctacttagttgaatgggactcggatgatagctcggatgatgatgatgatgacacctcatccaagcttaatgccggaattgccatcaaggaagctccctcactcttctcgtccccccattgtctcatggcaaagggagatgctaaggccttgaaggaattgtataaaaacctccaagtgtcttttgaggagctcaagacctctcacaatgacctcaaagaaaattgtgagaagcttgcggatgctcaaaaatcatctattgtgcatgaagttgaggtggtcactaaggatgttggagtcacttgtgacttacttgatagtcttacaagtgaaccactacctactaactctatttgtgataaatgcaaaatttctctcaatgataatattgctcttgatgaatcaaaaattattgttgagaatgaagtgttagtggatagaataagtactctaactcatgacctagaaaaggcatatggtggtaagaagaatttggatttcatattgggaagtcaacgatgctctcttaaccgtgaaggtcttggatatgttcccaagaaaggaaagaatgcttttgtaaagcaaaagacattgtttgtgaaagaatgtgacaaagtaaactacaaggcgggagggaatcattgggtgttggatagtggatgtactcaacacatgaccggggatatgaagatgtttacccaaatgagtgatgaagattgctcaaattatgatagtatcacatttggagataatcgtaaaggaaaggttaaaggtttgggtaaaattgctatttcaaatgatcattctatatcaaatgtgctattggttgagtctttgaattttaatttactttccgtagctcaattatgtgatttaggattttgttgcaatttcacggttgaagatgttattatctctagtgttgatggtagcaatcttaaatttaaaggttttagacatgaaaatctttatcttgttgatttctcatctaatgaggcaaagctcacaacttgcttattttcaaaagcttcactaggttggttatggcatagaagacttggtcatgttgggatgaagcaactcaatcggttaaccaagcatgacttagttcgaggcttaaaagatgtgaagtttgaaaagaacaaattgtgtagctcttgtcaagccggtaagcaagtggcaaatactcatccaaataaaagtcaaatgtccactcatcgacctttggaattacttcacatggatttatttgggcccacatcttttgtaagtattggtggtaattcttattgtcttgtgattgtggatgactattcaagatttacttgggtttattttctacgagacaaatccaatgtgtttgaaacattcaagtcatttgctatattggctcaaaatcaatttgatttcgacatcaaaaaggttagaagtgataatgggtcggaattcaaaaatgcaagaattgatcaatattgtgatgacaagggtatcaagcatgaattctcttccaaatataccccagaaacaaaacggtattgttgaaagaaagaatagaactcttattgatatggcaaggtctatgttagcggaatataatatatcggattcttattgggccgaggcaataaataccgcttgtcattcatcaaatagactatattgtcacaagctcttgaagaaaactccatatgaattgctcattggtagaaagccaaatatctcatattttagggtattcggttgcaaatgttatattttaagaaagggaagccgactttctaaatttgagaagaaatgtgatgagggttttcttcttggatattcatcaaatagtaaggcttatagagtcttcaacaaaactcatggtattattgaggaagcatatgatgttgaattcgatgaaacaaatgggtctcaagatgagagtgaaaatctcgatgatgttgggggaactcaattgataaatgcaatgaaaacaatggccattggtgaaataaaaccaaaagaagatgatgatgaaaatagtgtggttgtcattccctcatcttcaactataaatgaggaagatcaccaaagccaacaactcaatgaaaccattgatactcatgatcaaggtacttcaagacctccaattcctcctaatgcttcaacaagcaattatcaaacggtatcaagaattcatcattccattgtgaaggatcacccggttgatcaaattgtgggtgatattagtaagggtgttcaaactcgctctcgcatagcttcgttttgtgaacatttctcttttgtatcttgtgtggaacctaaccgtgtagatgaagctctacttgatgttgattgggtgaatgcaatgcatgaagaattaaataacttcgctcgaaatgaagtttgggagcttgttgagagaccaaagaaccacaatgttattggtacaaaatgggtatttcgcaacaagcacaatgaagatggtgtggtagtaagaaacaaggcaagattagttgcacaaggatatactcaaattgaaggattggattttggggagacatttgctcccgtagcaagattagaagcaatccggattctacttgcttatgcttgtgcacacaatatcaagctctaccaaatggatgtaaagagcgccttcctaaatggtaagattagtgaactagtgtatgttgaacaacctcccggttttgaggaccccaaaagacctaaccatgtgttcaagctttctaaagctctctatgggcttaagcaagctcctcgcgcttggtatgaaaggcttagggatttcttgttttccaaagacttcaaaattgggaaggttgacactactctattcactaaaagaattggcaaagatttatttgtttgtcaaatctatgttgatgatattatttttggatctactaatgaattattttgtgaggagttcggaaaaatgatgtcaaaagaatttgaaatgtctatgataggagaattgagcttctttcttggccttcaaatcaaacaattgaaagatggaatttttataagtcaatcaaaatatttgaaggacatgctcaagaagtttggtttagaaaatgctaagcctatcaagactccaatggcaacaaatggtcatctagacttagatgaaggaggtactatggttgatcaaaaactttatcgttcaataattggtagtttgctttatattaccgcatctaggcccgatgttatgtttagtgtatgcatgtgtgctcgatttcaagcttctcctagagagattcacttgaaggccgctaaaagaattctaagatatttgaagtatactcccaatattggtctatggtatcccaaaggtgctcaatttgaattaattggatattcggattcggactatgcgggatgcaaagttgatagaaaaagcacctccgggtgttgtcaatttcttggtagatctattgtttcatggtcttctaagaaacaaaattcggttgctctatctaccgccgaggcggaatatatatcggccggaaattgttgcgctcaactattatggatgaaacaaaccttattggactatggaattattttcaagaatgtgcctcttatgtgtgataatgagagtgcgaaagtggacagaagttggaaaaatgagtgtcaggccgcggaccgtccgcccatggaccgcggaccgtccgcggaatcaggaaatggacagtccgagcagcctcgcagaccgtctgagatcctcagggcgcggaccgtccgccgccccagcgcggaccgtccgcgacagggcagaaaaagggacaaagacgcagacttgccagttgtgctccctcgctctatctctcttgctctccactcgccatatactctcttgtgtcgagttggttttggtggtctccgcaagaaacttgcaggtcgctttaaatccaagcgccctcgtggcaatgatgatgactatacaccgaccactgattcagaggcccaatcctcagctgggggcactgaatccatggatgctgaagattttcttcatgttcaccctgattatcccattgatatccaaggatggacttaccccaagcggagattttctatggctgagtactgctctagacggactgtgaaccagtatgctctgccatcagatacaaatattcagtttttccacactcagctgcagtttgatgtcttttggggcaccctggtggataccaattttcataagcatcaggtgattgattggtccttcttgctcagtcaatcagtcatggagggtctcattcccaaatttgaaacatgtgggttatatcagtttatggggcagcgcactgatttcaatgaaatggcagttaagcaattcttggctacctcagagattgatattgcagaagaatctatcacatggatgactggctttaagcggtattctgcttcttttgctgactttgccgctgccaacagtctgaactatggcaccatttctgctggggtggatctttatactgaagataattttgaggattttgtgcagttttatgagcccgccaggctcggtatacccaggaggtttggagaaacagcaggactcagacatcatcctgctgtcatcaacaagattgccagagtcaccattcttcccaagagtggtgataagagcaaaattcgcgataagttctggaacataatccagcacatcatgaatggtgaagtcatgaacattgttcttttcatgatgaggcagcttaatgatttaaagatggacaagaatcaaaacttggcttatgctccctacattatggctctcataaaatccaagacaagatttgagggcccatgtgagattgttcacactccattcaggccttttaagaatgagatagggttcctcaccaggccactcactccattcccagatgatgaggaagaccctggctatgcgggtggagcagctcctaatgttgaggaacagcagatgcctcctcctccacctcctcctcagcctcagcactattgggagcctgctccaggatattttgatccttattttcacaatatgcagcaagggctggagactcatattgatgctcgctttgatggcctgatgtcacatgtggatcaccgccttgatgacatgcagtctcgctttgacagcaactgggatgcgctcaactctgaattttctgactttcgtgatcaaattcacactaatgtcactgatcccatcatgtcaaggctcaataatatgcaacaaagctttcaagataacatgagtgctctctccagtcagtttgacaatctttctacaactgacaacatgcatgatataagtcagaggcagcagcagctccagcaggactttggccagttctcctccctgtttgacaccttcagcactcattattacaacatgcatcctccgccgagtgatcagtaa

SEQ ID NO: 4571 - DNA, 4683 bp, Zea mays
  Clone ID: TF_ZM4182.C3.o1.fg
atggctagtaacaacaatgtgcacattgggaagccaccgcactttgatggaaacaattatgattattggaaaataagaatgtcaatgcatcttagagcaatgggtggaaaaatttggccaattgttagagatggattcgttgtattgaaggaagatgaaccatccgttagtgataatgagaatatcctcacaaatgatcaagccatgaatgtcttttatgatgctcttgatataaatgagttcaatcgtatcaagaatctcacaaccgctcatgagatttgggtaaaactaatggaaattcatgaaggaactacaattgtgaagagtgccaaactatatgtgtgcaaagggaagtttgagcaatttattatgaaagaagatgagagtgtatccgatatgttcaatcgattgaatgagattgtaaatgaactcaaaggacttggttttaatgtaccagatgtggatttcacacacaagttccttagatcacttccggagaaatatgagactattgtgacaatgctagtaaggagtgatctatctacaacctctccaaccgaagtattgggagaaattctcactcaagatatatttaagaagtcacaagccgatgctttaagtttggcaaagaaggtgaaaaatgaatctattgctctcaaagccaaggcctcaaaggcaattgaaaaggaagatagcaatgatgaagaaaatgaaagcgagagtgatggtgacatggctttatttgtaaggaaattcaataaattcatgaagatgaaaagaggtcaacctagaagaggtcaaacatctagaagaaatgctttcaatgatagaaaatgttttgagtgtggggaacccggtcacattgccatgaattgtccaagcaagaagaagaagggcaaagatgaaagtgacaagaagaaaaagaaatactataacaagaagaaagatggcaaagcctacttagttgaatgggactcggatgatagctcggatgatgatgatgatgacacctcatccaagcttaatgccggaattgccatcaaggaagctccctcactcttctcgtccccccattgtctcatggcaaagggagatgctaaggccttgaaggaattgtataaaaacctccaagtgtcttttgaggagctcaagacctctcacaatgacctcaaagaaaattgtgagaagcttgcggatgctcaaaaatcatctattgtgcatgaagttgaggtggtcactaaggatgttggagtcacttgtgacttacttgatagtcttacaagtgaaccactacctactaactctatttgtgataaatgcaaaatttctctcaatgataatattgctcttgatgaatcaaaaattattgttgagaatgaagtgttagtggatagaataagtactctaactcatgacctagaaaaggcatatggtggtaagaagaatttggatttcatattgggaagtcaacgatgctctcttaaccgtgaaggtcttggatatgttcccaagaaaggaaagaatgcttttgtaaagcaaaagacattgtttgtgaaagaatgtgacaaagtaaactacaaggcgggagggaatcattgggtgttggatagtggatgtactcaatacatgaccggggatatgaagatgtttacccaaatgagtgatgaagattgctcaaattatgatagtatcacatttggagataatcgtaaaggaaaggttaaaggattttgttgcaatttcacggttgaagatgttattatctctagtgttgatggtagcaatcttaaatttaaaggttttagacatgaaaatctttatcttgttgatttctcatctaatgaggcaaagctcacaacttgcttattttcaaaagcttcactaggttggttatggcatagaagacttggtcatgttgggatgaagcaactcaatcggttaaccaagcatgacttagttcgaggcttaaaagatgtgaagtttgaaaagaacaaattgtgtagctcttgtcaagccggtaagcaagtggcaaatactcatccaaataaaagtcaaatgtccactcatcgacctttggaattacttcacatggatttatttgggcccacatcttttgtaagtattggtggtaattcttattgtcttgtgattgtggatgactattcaagatttacttgggtttattttctacgagacaaatccaatgtgtttgaaacattcaagtcatttgctatattggctcaaaatcaatttgatttcgacatcaaaaaggttagaagtgataatgggtcggaattcaaaaatgcaagaattgatcaatattgtgatgacaagggtatcaaacatgaattctcttccaaatataccccgaaacaaaacggtattgttgaaagaaagaatagaactcttattgatatgacaaggtctatgttagcggaatataatatatcggattcttattgggccgaggcaataaataccgcttgtcattcatcaaatagactatattgtcacaagctcttgaagaaaactccatatgaattgctcattggtagaaagccaaatatctcatattttagggtattcggttgcaaatgttatattttaagaaagggaagccgactttctaaatttgagaagaaatgtgatgagggttttcttcttggatattcatcaaatagtaaggcttatagagtcttcaacaaaactcatggtattattgaggaagcatatgatgttgaattcgatgaaacaaatgggtctcaagatgagagtgaaaatctcgatgatgttgggggaactcaattgataaatgcaatgaaaacaatggccattggtgaaataaaaccaaaagaagatgatgatgaaaatagtgtggttgtcattccctcatcttcaactataaatgaggaagatcaccaaagccaacaactcaatgaaaccattgatactcatgatcaaggtacttcaagacctccaattcctcctaatgcttcaacaagcaattatcaaacggtatcaagaattcatcattccattgtgaaggatcacccggttgatcaaattgtgggtgatattagtaagggtgttcaaactcgctctcgcatagcttcgttttgtgaacatttctcttttgtatcttgtgtggaacctaaccgtgtagatgaagctctacttgatgttgattgggtgaatgcaatgcatgaagaattaaataacttcgctcgaaatgaagtttgggagcttgttgagagaccaaagaaccacaatgttattggtacaaaatgggtatttcgcaacaagcacaatgaagatggtgtggtagtaagaaacaaggcaagattagttgcacaaggatatactcaaattgaaggattggattttggggagacatttgctcccgtagcaagattagaagcaatccggattctacttgcttatgcttgtgcacacaatatcaagctctaccaaatggatgtaaagagcgccttcctaaatggtaagattagtgaactagtgtatgttgaacaacctcccggttttgaggaccccaaaagacctaaccatgtgttcaagctttctaaagctctctatgggcttaagcaagctcctcgcgcttggtatgaaaggcttagggatttcttgttttccaaagacttcaaaattgggaaggttgacactactctattcactaaaagaattggcaaagatttatttgtttgtcaaatctatgttgatgatattatttttggatctactaatgaattattttgtgaggagttcggaaaaatgatgtcaaaagaatttgaaatgtctatgataggagaattgagcttctttcttggccttcaaatcaaacaattgaaagatggaatttttataagtcaatcaaaatatttgaaggacatgctcaagaagtttggtttagaaaatgctaagcctatcaagactccaatggcaacaaatggtcatctagacttagatgaaggaggtactatggttgatcaaaaactttatcgttcaataattggtagtttgctttatattaccgcatctaggcccgatgttatgtttagtgtatgcatgtgtgctcgatttcaagcttctcctagagagattcacttgaaggccgctaaaagaattctaagatatttgaagtatactcccaatattggtctatggtatcccaaaggtgctcaatttgaattaattggatattcggattcggactatgcgggatgcaaagttgatagaaaaagcacctccgggtgttgtcaatttcttggtagatctattgtttcatggtcttctaagaaacaaaattcggttgctctatctaccgccgaggcggaatatatatcggccggaaattgttgcgctcaactattatggatgaaacaaaccttattggactatggaattattttcaagaatgtgcctcttatgtgtgataatgagagtgcggtaaaattagctaccaatccggtccaacactcaagaaccaagcatattgatatacgacatcactttttaagggatcatgttggcaagggagacatctctatttattccattggcaccgatgatcaattagcagacatttttacaaaacctttggatgaaacaagattttgttctctaagaagtgaaatgaatgtgatcgatatctcaaatgtggcttga

SEQ ID NO: 4572 - DNA, 5280 bp, Zea mays
  Clone ID: TF_ZM5061.C1.o1.fg
atggctagtaacaacaatgtgcacattgggaagccaccgcactttgatggaaacaattatgattattggaaaataagaatgtcaatgcatcttagagcaatgggtggaaaaatttggccaattgttagagatggattcgttgtattgaaggaagatgaaccatccgttagtgataatgagaatatcctcacaaatgatcaagccatgaatgtcttttatgatgctcttgatataaatgagttcaatcgtatcaagaatctcacaaccgctcatgagatttgggtaaaactaatggaaattcatgaaggaactacaattgtgaagagtgccaaactatatgtgtgcaaagggaagtttgagcaatttattatgaaagaagatgagagtgtatccgatatgttcaatcgattgaatgagattgtaaatgaactcaaaggacttggttttaatgtaccggatgtggatttcacacacaagttccttagatcacttccggagaaatatgagactattgtgacaatgctagtaaggagtgatctatctacaacctctccaaccgaagtattgggagaaattctcactcaagatatatttaagaagtcacaagccgatgctttaagtttggcaaagaaggtgaaaaatgaatctattgctctcaaagccaaggcctcaaaggcaattgaaaaggaagatagcaatgatgaagaaaatggaagtgagagtgatggtgacatggctttatttgtaaggaaattcaataaattcatgaagatgaaaaggggtcaacctagaagaggtcaaacatctagaagaaatgccttcaatgatagaaaatgttttgagtgtggggaacccggtcacattgccatgaattgtccaagcaagaagaagaagggcaaagatgaaagtgacaagaagaaaaagaaatactataacaagaagaaagatggcaaagcctacttagttgaatgggactcggatgatagctcggatgatgatgatgatgacacctcatccaagcttaatgccggaattgccatcaaggaagctccctcactcttctcatctccccattgtctcatggcaaagggagatgctaaggtaaaaatcatcaccgatttaaatgatgtaaatgatgatgatgatatcgatgatgttgatgatgatggctattcatatgatgatcttgttagaatgttaggtgaggccgatgactacatgcacaaagaaaaagaaaaatttaaggccttgaaggaattgtataaaaacctccaagtgtcttttgaggagctcaagacctctcacaatgacctcaaagaaaattgtgagaagcttgggaatgctcaaaaatcatctattgtgcatgaagttgaggtggtcactaaggatgttggagtcacttgtgacttacttgatagtcttacaagtgaaccactacctactaactctatttgtgataaatgcaaaatctctctcaatgataatattgctcttgatgaatcaaaaattattgttgagaatgaagtgttagtggatagaataagtactctaactcatgacctagaaaaggcatatggtggtcttggatatgttcccaagaaaggaaagaatgcttttgtaaagcaaaagacattgtttgtgaaagaatgtgacaaagtaaactacaaggcgggagggaatcattgggtgttggatagtggatgtactcaacacatgaccggggatatgaagatgtttacccaaatgagtgatgaagattgctcaaattatgatagtatcacatttggagataatcgtaaaggaaaggttaaaggtttgggtaaaattgctatttcaaatgatcattctatatcaaatgtgctattggttgagtctttaaattttaatttactttccgtagctcaattatgtgatttaggattttgttgcaattttacggttgaagatgttattatctctagtgttgatggtagcaatcttaaatttaaaggttttagacatgaaaatctttatcttgttgatttctcatctaatgaggcaaagctcacaacttgcttattttcaaaagcttcactaggttggttatggcatagaagacttggtcatgttgggatgaagcaactcaatcggttaaccaagcatgacttagttcgaggtttaaaagatgtgaagtttgaaaagaacaaattgtgtagctcttgtcaagccggtaagcaagtggcaaatactcatccaaataaaagtcaaatgtccactcatcgacctttggaattacttcacatggatttatttgggcccacatcttttgtaagtattggtggtaattcttattgtcttgtgattgtggatgactattcaagatttacttgggtttattttctacgagacaaatccaatgtgtttgaaacattcaagtcatttgctatattggctcaaaatcaatttgatttcgacatcaaaaaggttagaagtgacaatgggtcggaattcaaaaacgcaagaattgatcaatattgtgatgacaagggtatcaaacatgaattctcttccaaatataccccggaacaaaacggtattgttgaaagaaagaatagaactcttatcgatatggcaaggtctatgttagcggaatataatatatcggattcttattgggccgaggcaataaataccgcttgtcattcatcaaatagactatattgtcacaagctcttgaagaaaactccatatgaattgctcattggtagaaagccaaatatctcatattttagggtattcggttgcaaatgttatattttaagaaagggaagccggctttctaaatttgagaagaaatgtgatgagggttttcttcttggatattcatcaaatagtaaggcttatagagtcttcaacaaaactcatggtattattgaggaagcatatgatgttgaattcgatgaaacaaatgggtctcaagatgagagtgaaaatctcgatgatgttgggggaactcaattgataaatgcaatgaaaacaatggccattggtgaaataaaaccaaaagaagatgatgatgaaaatagtgtggttgtcattccctcatcttcaactataaatgaggaagatcaccaaagccaacaactcaatgaaaccattgatactcatgatcaaggtacttcaagacctccaattcctcctaatgcttcaacaagcaattatcaaacggtatcaagaattcatcattccattgtgaaggatcacccggttgatcaaattgtgggtgatattagtaagggtgttcaaactcgctctcgcatagcttcgttttgtgaacatttctcttttgtatcttgtgtggagcctaaccgtgtagatgaagctctacttgatgttgattgggtgaatgcaatgcatgaagaattaaataacttcgctcgaaatgaagtttgggagcttgttgagagaccaaagaaccacaatgttattggtacaaaatgggtatttcgcaacaagcacaatgaagatggtgtggtagtaagaaacaaggcaagattagttgcacaaggatatactcaaattgaaggattggattttggggagacatttgctcccgtagcaagattagaagcaatccggattctacttgcttatgcttgtgcacacaatatcaagctctaccaaatggatgtaaagagcgccttcctaaatggtaagattagtgaactagtgtatgttgaacaacctcccggttttgaggaccccaaaagacctaaccatgtgttcaagctttctaaagctctctatgggcttaagcaagctcctcgcgcttggtatgaaaggcttagggatttcttgctttccaaagacttcaaaattgggaaggttgacactactctattcactaaaagaattggcaaagatttatttgtctgtcaaatctatgttgatgatattatttttggatctactaatgaattattttgtgaggagttcggaaaaatgatgtcaaaagaatttgagatgtctatgataggagaattgagcttctttcttggccttcaaatcaaacaattgaaagatggaatttttataagtcaatcaaaatatttgaaggacatgctcaagaagtttggtttagaaaatgctaagcctatcaagactccaatggcaacaaatggtcatctagacttagatgaaggaggtactatagttgatcaaaaactttatcgttcaataattggtagtttgctttatattaccgcatctaggcccgatgttatgtttagtgtatgcatgtgtgctcgatttcaagcttctcctagagagattcacttgaaggccgctaaaagaattctaagatatttgaagtatactcccaatattggtctatggtatcccaaaggtgctcaatttgaattaattggatattcggattcggactatgcggggtgcaaagttgatagaaaaagcacctccggttgttgtcaatttcttggtagatctcttgtttcatggtcttctaagaaacaaaattcggttgctctatctaccgccgaggcggaatatatatcggccggaaattgttgtgctcaactattatggatgaaacaaaccttattggactatggaattattttcaagaacgtgcctctcatgtgtgataatgagagtgcggtaaaattggctaccaatccggtccaacactcaagaaccaagcatattgatatacggcatcacttcttaagagatcatgttggcaagggagatatctctatttattccattggcaccgatgatcaattagcggacatttttacaaaaccattggatgaaacaagattttgttctctaagaagtgaaatgaatgtgattgatatctctaataaagtgggcagagattggcaaaatgagtatcaggccgcggaccgtccgcccatggaccgcggaccgtccgcagcatcaggcaatggacagtccgagcagcctcgcagactgtctgagtctcgctttgacagcaactgggatgcgctgaactctgaattttctgactttcgtgatcaaattcacactaatgtcactgatcccatcatgtcaaggctgaataatatgcaacaaagttttcaagataacatgggtgctctctccagtcagtttgacaatctttctacaactgacaacctgcatgatataagtcagaggcagcagcagctccagcaggactttggccagttctcctccttgtttgacaccttcagcactcattattacaacatgcatcccccgccaagtgatcagtaa

SEQ ID NO: 4573 - DNA, 1395 bp, Zea mays
  Clone ID: TF_ZmC5918_2
tgggaccctcgaggccggccggggctttttcgcccaaaacacttcccagccctccacgcaccccgctgccgcggctcgaacttaaaccctagagccgccggcccggtcgcgctagcgacacaaatctcaaatcacccggagagaactcgctcgcgaaggctgaactcatggctcgcgtcttcgttgggaacctggatccgcgtgtcacggcgcgggagattgaggacgagttccgcacgtttggggttctgaagagtgtatgggttgctaggaaaccaccagggtttgccttcattgacttcgatgaccgcagggatgcacaagatgccattcgcgatttggatggtaagaatggttggagggttgagctgtcaaccaaagatggtggtggccgtggccgagaccgtaatggttctgatatgaagtgctatgagtgtggtgaagttggccactttgcacgtgaatgtcgcttacggattggttcgggagggctgggtagtggaaggcgtcgcagccgaagtcctagatatcgcagccggagccgaagtcgcagccggagcccaagacatcgaaggagcccaagctatggcagaaggagctacagcccacgagatcgttctcctaggaggcgaagttacagcaggtcgccaccgagatctcgtgcacggagtctcagcaggtcgccgccactgccaccaccgcctcctagaaataacagcatgtcaccacggggagcccgagaaatgagcagatcgtcaccaccacctcccaaaaataacagcagttcaccacgggaagcccgagaaatgagcagatcgccaccaccacctgccaaaaataaccgcagttcaccacgggaagcccgagaaatgagcagatcgccgccgccaccacctcccagaaataacagcaggtcaccaccgggagctcgagatgtgagcaggtcgccgccaccacctcctgatgccagaagaagctatagcagatccccagaacagcagccccagcacgagtccccatatgccaatgacgcctgagaatatttagctgctcaaagatgctggaaaatgctaaggggcccagcatgttttgcccatgcgcgtcggtacaacttataggatccagtctgagattttgctcgtgttttgggtttcccttggacacaccgctgctgataccattgtagagggaggagcataacgtttccgtttcgagtattgactttgggcacttatagctgtcaagacatgacctggttcttgttagatttatatcactagattgcttttgaattcggacgaagtgttaatcgtgggctatgttgagatatttgtctaccttttcaggacgctttcgaagaaacattttcctactaaaaaaaaaaaaaaagcggcc

SEQ ID NO: 4574 - DNA, 909 bp, Zea mays
  Clone ID: TF_ZmC5918_5
ttgggtacctcgaggccggccggcctttccgtccaaacacttcccagccctccacgcaccccgctgccgcggctcgaacataaaccctagagccgccggcccggtcgcgctagcgacacaaatctcaaatcacccggagagaactcgctcgcgaaggctgaactcatggctcgcgtcttcgttgggaacctggatccgcgtgtcacggcgcgggagattgaggacgagttccgcacgtttggggttctgaagagtgtatgggttgctaggaaaccaccagggtttgccttcattgacttcgatgaccgcagggatgcacaagatgccattcgcgatttggatggtaagaatggttggagggttgagctgtcaaccaaagatggtggtggccgtggccgagaccgtaatggttctgatatgaagtgctatgagtgtggtgaagttggccactttgcacgtgaatgtcgcttacggattggttcgggagggctgggtagtggaaggcgtcgcagccgaagtcctagatatcgcagccggagccgaagtcgcagccggagcccaagacatcgaaggagcccaagctatggcagaaggagctacagcccacgagatcgttctcctaggaggcgaagttacagcaggtcgccgccactgccaccaccgcctcctagaaataacagcatgtcaccacggggagcccgagaaatgagcagatcgtcaccaccacctcccaaaaataacagcagttcaccacgggaagcccgagaaatgagcagatcgccaccaccacctgccaaaaataaccgcagttcaccacgggaagcccgagaaatgagcagatcgccgccgccaccacctcccagaaataacagcaggtcaccaccgggagctcgagatgtgagcaggtcg

SEQ ID NO: 4575 - DNA, 1830 bp, Zea mays
  Clone ID: TF_ZM4269.C1.o9.fg
atgagccataagccaccgacatttgctagttctcctgatccactggacacagatgattggctgaagtccgtagagaagatgttgaacattgctcagtgcactgaccgggagaaggttttatatgcttctggacgtctgacaggccctgctgctgattggtgggattcatatactgctgcccacgatgttgctgacactaccacacgggcggagttcacgacgcagtttaagaaccatcatataccagctggactgatgaaaattaagaagaaggaattcctatcgctgaagcagggaagcatgtcagttagcaagtaccgcgacaagttcatccagttatccagatatgtgcctgatgaagttgctgaagatgagaggaaacaggagcattttattgaaggacttaatggacccctgtacaccccgacgaaattctcaggacagagtgcaggcactacttgctacaagtgtgggaagattggacattatgcaaatgtttgcccacagaggattgctactactccagttcagaataagcagcagactccaggatctggcaagggatactctattgctagggttaatcaagtcagcgttgatgctactcctgatggtgctgacatcgtacttggtatgttttacgttaatgcaattcctgcaaccatattatttgattctggtgctacacattcatttatgtctgctcgatatgccaacacaaatgagataccactgctaaatatgagaaaaccaatgatagtaattacacctaaagggcctgttgaggcaaatcaaatgacacgtagattgacattaacaattatggcaagagaatttggagctactgctataatattagaggcaaccagtatagatctgatccttggtatgtcatggttaagaaaggcaaaggccattatagcatgtggtaggggtacggtagaacttaccagccctaaaggagaaatatttcaagttcaaattacagtaaccacctcatccaaacgtgcaatgttctttatacccgaggagtttgttggcgacaacatccgtgtggttagggattttctggatgtctttccagaggagttaccagggatgccaccagatagggaagttgagtttgtaagagatcttttacctggaactgcccctatttctaaacggccatacatgatgtctgtagaagagttaaaggaactgaagaagcagttaaccgagttacaagaggctgggtacattcgttcgagttcctcaccttggagagcgccagttttgtttgtacagaagaaggatggatcacaaagaatgtgtgtggattatagatcccttaatgatgtcactatgaagaacaagtatctgttaccccgcattgaggatttatttgatcagatgagaggtgcaagggtattctcgaagattgatctccgatcgggttaccatcagatgaggattagaccatcggatattcccaagacaacattctcgacccgatatggattatatgagttcattgttatgtcatttggattaaccaatgcacaaacttattttatggatttgatgaataagtttagcaaatgcgagttttggattggcgaggtgccctttcttggacatatcatttctaatggagggatatcagtggatcctgctaaagtcaaggaaataatggcgtggggcgtacccactatagttacggagattcggagtttcttggaactagcaggatattattggagatttattgaaggattttctaagattgctaagcctatgacctcgcttctggagaagggaagagagtttaagtgggacgagaagtgctag

SEQ ID NO: 4576 - DNA, 3705 bp, Zea mays
  Clone ID: TF_ZM4411.C1.o3.fg
atgtcgggagaacacgccaagaaggagatggtgatcggcgagaagcccgccataagccacgggaaagctccatcgggagagtcacgcaacaagaagaaggaggaatcacctcctcacaagtcgcatcggagtggcgacaagaagaaaaagatgaagaaggtggtctactacgagaccgattcttcatcgccatccacctccggctccgacgcgtcgtccgtaacttctaagtgccatgagcgcaagaagtttagtaagatccccctacgctatccttgcatttccaaacgtactccattactttccgttccattaggcaaaccaccggttttttacggtgaagattataacatgtggagtgataaaatgaggcatcacctaacctcactccacactagtatttgggacgttgttgagtttggagtgcaggtaccatccgtaggggatgaagattatgattcggacgaagttgcccaaatccggcacttcaactcccaagctaccaccatactcctcgcctctctaagtcgagaggagtataacaaggtgcaagggttgaagagcgccaaggagatttgggacgtgctcaaaaccgtgcacgaaggagacgaggtgaccaagatcaccaagagggagacgatcaagggggagctcggtcgtttcatgctcaaccaaggagaagacccgcaagccatgtacaaccggctaaaaaccttggtgaatcaagtgcgcaaccttgggagcactaaatgggatgaccatgaaatggtcaaggttattcttagatcacttgtttttcttaaccctactcaagttcaattaattcgtggtgatccaagatataaactaatgtctcccgaggaagtgataggaaaatttgtgagctttgaattgatgatcaaaggctccaagaaaatcatcgagcaaggcgccacctcaacatccaaggtgcaacccgtcgcattcaaggcgacggaagaagaaaagaaagactctacaccgagtagggtccccatcgatgcctccaagctcgacaatgaggaaatggcgctcatcatcaagagcttccaccaaatcctcaaacaaagaagggggaaagactacaagccccgctccaagaaggtttgctacaactgtggtaagcccggtcattttatcgctaaatgtcctttgtatagtgatagtgacagggataacgacaagagggggaagaaggagaagaagagatattacaagaagaagggcggcgatgcccatgtttgccaggagtgggactccgacgagagctccaccgactcctcctccgacgaggacgctgccaacatcgccatcaacaaaggcctcctcttccccaacgtcggccacaagtgcctcatggcaaaggacggcaaaaagaagaaggtaaaatcaagatcatccactaagtatgcaacttctagtgatgaggataattctagtgatgatgaggacaacttgcttactctttttgccaatcttaacatacaacaaaaagagaaattaaatgaattgattagtgctattcatgagaagtatgaactcttggatagccaagaggacttccttattaaggaaaacaaaaagcatgttaagactaaaaatgcttatgctcaggagattgacatgttgaatgaatctcttgctagccttaagtttgagaatgataaattaattgctaaggctaaggaattagatgtttgcaatgtttctatttccaatcttagaaatgagaatgctattctacatgctaagattgttgaattaaatgattgcaaaccctctacatctactgttgagcatgtttctatttgtactagatgtagagacattaacattgatgctattcatgatcaccttgctatgattaaacaacaaaatgatcatatagctaaactagatgctaaaattgccgagcatgaattagagaatgaaaaatttaaatttcctcgtggcatgctttatagtgggagacgtcctggcattaaggatggtattggcttccaacagggagacaatgtcaagcttaatgcccctcctaaaagattgtctaattttgttaagggcaaagctcccatgcctcaggataacgagggttatattttgtatcctgctggcaaagtagttgccaaatatgttgggggcaaatacaagggctccaagacttgtatttgggtacccaaggccactggagctactccacatggatctattcggctcgatcgcttacataagcatcggcatgaagtttttggtagcaaatgctttattcttgttaaaagaggtagaaaatctaaatttgctcctaaggctgtagaaggctttttacttggttgtgattcaaacacaagggtatatagagtctttaacaagtccactggactagttgaagtttcttgtgacattgtgtttgatgagtctaacggctctcaagtagagcaagttgatcttgatgagctagatgatgaagaggctccgtgcatcgcgctaaggaacatgtccattggggatgtgtgtcctaaggaatccgaagagcctccacaagcacaagatcatcaaccatcttcctccatgaaagcatctccaccaacccaagatgaggatcaagctcaagaggatgaaaatgaagatcaagaagatgagccacctcaagaggaggacattgatcaagggggagatgccaatgatcaagacaaggaagatgatgaggatccaagaccgccacacccaagagtccaccaagcaatccaacgaaatcaccccatgaacaccatccttggcgacattcataaggggccacacagggtagaggaagcacttcaagattcggattgggtgctggcgatgcaagaggagcttaataacttcacgaggaatgaggtatggcatttagttccatgtcctaaccaaaatgttgtagcaaccaaatgggtcttccgcaacaagcaagatgagcatggtgtggtgacaaggaacaaggcacgacttgtgcccaaggggtattcacaagtcgaaggtttggattttggtgaaacctatgcacctgtagctaggcttgagtcaattcgtatattgcttgcctatgctacttaccatggttttaagctctatcaaatggacgtgaagattgccttcctcaatggaccaattaaagaagaggtctatgttgagcaacctccaggctttgaagatagtgagtatcctaaccatgtctacaaactctctaaggcgctttatgggctcaagcaagccccaagagcatggtatgaatgcctaagagattttcttatcactaatggcttcaaagtcggcaaggccgatcctacactctttactaaaacaaatgaaaatgatttgttttttagtaggatcatgattcaaaaattcgagatgtctatgatgggggagttgaagtattttctaggatttcaagtcaagcaactccaacagggcaccttcattagtcaaacgaagtacattcaagacatactcaccaagtttggaatgaaggatgccaagcccatcaagacacccatgagaaccaatgggcatctcgacctcgacatgggaggtaaatccgtagatcaaaaggaagagcacatcagggacttgtcagtttctggggagatccctggtgtcttgggcttcaaagaaacaaaactcagtagctctttctaccgccgaagctga

SEQ ID NO: 4577 - DNA, 2973 bp, Zea mays
  Clone ID: TF_ZmC4916_354
atggatcctaagggcaaggggattgtgatcaatgacaaggagaaggagtcattcgtcaacgagcccaaggatgacaagactaccgacttgggctcgggccacaaacgcaaagatgggaagaagaagaagacaagacgcatcaaggatatcgtctactacgacgacagcgatgagtccacttcttcccaaaaggacaacgacgacaacgactacgagagaaggaaaccggttaattcaaacttttcttttgactactctcgtattccgcaaagtacaaatgctcattcgctctccattccacttggcaaacctcctcactttgatggagaggactacggattttggagccacaaaatgcgtagtcacctattctctctccatccgagcatatgggagattgtggaaagtggaatgaaatttgatagctcggatagtcctatgtttatcaatgaacagattcatagaaatgcacaagctactactgtgttgttagcctccttgtgcagggacgagtatcataaggtgagcggcttggacaatgccaagcagatctgggacaccctcaggatctcacatgaggggaacgacgtcaccttactcaccaaaatggagttggtggagggcgagcttggaagattcacaatgatcaggggagaggagccaacccaaacatacaacaggctcaagacccttatcaacaagataaggagctacagaagcacacaatggacggaccacgacgtcgttcgtctaatgctaaggtcctttactgtacttgatccacatttggtgaacaatatctgtgaaaatcctaggtacaccaagatgtcgcccgaagaagttcttgggaaatttgtaagcgggcgaatgatgatcaaggaggcaagatatgtcgacgacgcgttgaacggtccaatccatgagcctcaacccattgctctcaaggcaacgaggagcaaggaggcgctacctagcaaggtggcgcaagttgaggcggccgggctcaatgatgaagagatggccctcatcatcaagcgcttcaagacggcgctaaagggtcgcaagggacagccaagcaagaccaagacaaaggggaagcgctcatgcttcaaatgtggtaaggttggtcattttattgctaactgtcctgacaatgatagtgaccaggaagaagggaacaagagggagaagaagaagaattataagaaggcaaaaggcgaggaacatcttggcaaggagtgggactcggattgttcgtcgtccgactccgacaacgaaggactcgccgccactgccttcaacaagtcatccctcttccccaacgagcatcacacttgcctcatggcaagggaaaagaagggtctagatagagccaaggtggataaaataaatgaattgattgatgctttgaatgataagaatagattgctagaaaagcaagaggatctcttatatgatgaacatgacaagtttgtagaagctaaaaaatcccttgctttagaaataaagaggaatgaaatgctttcttgtgaattgtctacatgccatgactctatttctagtttaaaaagcataaacgatgacttgactgctaagttagaaatagctaataaatcaacatcttgtgtagaacatgttgtggtttgcactaggtgtaaagattttaatattgatgcttgtagtgaacacctagtttcaatttctaaattgaatgatgaagtagctagtcttaatgcccaacttaagactagcaaaagcgaatttgataagttaaaatttgcaagggatgcctacacgattggtagacacccctcaattaaggatggacttggtttcaagagggaagccaagaacttaacaagccataaggctcccatccccgccaaggagaaagggaaggcccctatggctagtagtactaaaaggaaccatgcttttatgtaccatgatagaagacagtctaataagagttgtaatgcttatgatgcttttgactctcatgccatgtttgcttctagttcttcctatatgcatggtaaagatatgtctaggagacattttgttcatatgcctaggagaaatgttgttaatgttcctaggaatgttaatgaaccttctacaatatatcatgctttaaatgcttcctttgctatttgtagaaaggataggaagatagttgctagaaatataggggcaaaatgcaagggagacaaaacttgcatttgggtccctaagacaattgtgactaaccttgtaggacccaacaagagttgggtttatgcatctgggggttcaagctggattatcgacagcggatgcacaaaccatatgacgggggagaagaagatgttcacctcctatgtcaaaaacaaggattcccaagattcaataatattcggtgatgggaatcaaggcaaggataagtctgaaacccaagggaccctcaagcgcttcctaaggagagctcaaaatgagtttgagctcaaagtgaaaaagataaggagcgacaacgggtccgagttcaagaaccttcaagtggaggaatttcttgaggaggaggggatcaagcacgagttctccgctccctacacacctcagcaaaatggtgtggtagagaggaagaacaggacgctcatagatatggcgaggactatgcttggagaatttaagacccccgagtgcttttggtcggaagccgtgaacacagcttgccacgccatcaacagggtctaccttcaccgcctcctcaagaagacttcgtatgagctactaaccggtaacaaacccaatatgaagaagatgttccgacggccgctatacgaaccatggcgattggagaagtgcggccacaggaacaagatgaacgagatcaaccttcttcctcaacaacggtgcatcccccacctcaagatgatgaataggttcatcaaaaggagacgtgtgatcaagggggagcacaagatgttcacgtga

SEQ ID NO: 4578 - DNA, 4934 bp, Zea mays
  Clone ID: TF_ZmC4916_357
aaagagactaatcgcccgaagatatggatcctaagggaaaggggatggtggtcaacgacaatgagaaggagtccatcttcaacgagccaagggacgacaaagtcaatgactccggctcgagtcaaaagaagaaagacggaaagaagaagaggcacatcaggaaggttgtctactacgacagcgacgaatcttcctcttctcaaaaggacgacgaatacgaggaaaaaaagaaaacggttaactcgaacttttcttttgattgttctcgtattccgcataattccaatgctcatttgctttccattccacttggtaaacccccacactttgatggagaggactacggattttggagtcacaaaatgcgtagccacttgttctctcttcatccaagtatatgggagatagtagaaaatggaatgcaatttgatagttcggataactccatgtttatcaatgaacaaatccataaaaatgcacaagctactactattcttttagcatccttgtgtagggaagaatacaataaggtgagcggcttggacaacgccaagcagatttgggacaccctcaagatctcgcatgaggggaacgacgtcaccatgctcaccaagatggagttggtggaaggcgaactaggaaggttcgcaatgatcaggggagaagagccaactcaaacgtacaataggctcaagaccctggtcaacaagataagaagctatggaagcacgagatggacggaccacgacgttgtccggcatatgctaaggtccttcactgtccttgatcctcatcttgtaaactctattcgtgagaatcctaggtacatcaagatgacgcccgaggaaatactcgagaagtttgtaagcgggcgaatgatgatcaaggaggcgagatacgttgatgagtcgttaaatggcccaatccacgagcctcaaaccattgctctaaaagcaacaagtagtagggaggcactacctagcaaggtggcgcaagttgaggcggccggactaaatgaagatgaaatggccctcatcatcaagcgcttcaagacggcgctcaaaggtcacaaggagcatcccaacaagagcaagacgaaggggaagcgctcctgcttcaaatgtggtaaggttggtcactttattgctaactgtcctgataatgatggtgaccaggataaagaaaagaagagggaaaagaagaagacttacaagaaagcgaagggcgaggcacatcttggcaaagagtgggactcggattgctcttcatccgacgacaaaggacttgccgcctcggccttcaacaaatcatccctcttccccaacgagcatcacacctgcctgatggcaaaggaaaagaaggtatacactagggatactattacatatgcttcttcaagtgatgatgaatctagcgatgatgaaatagactatgctagtttattcaaaggtttagatagaactaaaattgataaaatcaatgagttaattgatgctttgaatgacaagaatagattattagaaaagcaagaggatcttttgtatgaagagcatgataaatttgtagatgtccaaaaatctcttgctttagaagttaaaaggaatgaaatgctttcttgtgaattatctacttgccatgagactatttctagtttaaaaagtgttaatgatgatttaaatgctaagctagaagtagcaaatagatccaattcttgtgaagaacatgtagtgatttgcaataggttcttaatgcccaacttaagactagcaaaaattattgacaaactaaaatttgcaagtgatgcctacactgttggtagacacccctcaattaaggatgggcttggctttaagagggaagccaagaacttaactagttataaggctcccatctccgccaaggataaagggaaggcccctatggctaatagtgttcaaaagaatcatgctttcatttatagtgatagaaaattctctagaaatgcttataggaattattcttatgattcatatgctatgcctgcttctagttcttctattgtgcatgatatgcctaggaaaaatattattcatcatatgcctaggagaaatgttgctcatgtacctaggaaaccaagtaatgaaccttctacaatttatcatgcttgcaatgcttcctttgcaatttgtagaaaggataagaaagtggttgctaggaaattaggggcaaaatgcaagggagataaagcttgcatttgggtccctaaggctattgtcactaaccttgtaggacccaacaagagttgggtttatgcatccgggggctcaagctggtttatcgacagcggatgcacaaaccacatgtcgggggagaagaagatgttcacctcctacgtcaagaacaaagattcccaagattcaatcatattcggtgacgagaatcaaggcaagatagaccttgtgcagcttgtcaagcaggataaaatagaaacccaagggaccgtcaagcgcttcctaaggagagctcaaaatgagtttgagctcaaggtgaagaagataaggagcgacaacggatccgagttcaagaaccttcaagtggaggagtaccttgaggaggaaggaatcaagcacgagttctccgctccctacacaccacagcaaaatggtgtggtagagaggaggaacaagacgctcattgacatgtcaaggacgatgcttggagagttcaagatccccgagcggttttggtcggaagccgtgaacacggcttgccacaccataaatcgggtctaccttcatcgcctcctcaagaagacgtcgtacgaacttctaaccggtaacaaacccaatgtttcatactttcgtgtatttgggagtaaatgctacattctagtgaagaaaggtaggaattctaaatttgcccccaaagctgtagaagggtttttgttaggttatgactcaaatacaaaggcgtatagggtcttcaacaaatcatcgggtttggttgaagtctctagcgacgttgtatttgatgagactaatggctctccaagagagaaagttgttaatcctaatgatgtagatgaatatgatgttccaacggacgcaattcgcaccatggcgattggagatgtgcgaccacaggaacaccaagagcaagatcaaccttcttcctcaacattggtgcaccccccaactcaagacgatgaacaggttcatcaagaagaggcgtgtgatcaaggaggagcacaagatgatcatgttatggatgaagaagcacctcaagcccctccaacccaagtccgagcgacgattcaaaggaatcatcccgtcgaccagatattgggtgatattagcaagggagtaactactcgctctagattagttaatttctgtgagcattgctcttttgtctcttctattgagcctttcagggtagaagatgccttgctagatccggattgggtgttggccatgcaggaggagctcaacaatttcaagagaaatgaattttggacactggtgccacgtcccaagcaaaacgttgtgggaaccaagtgggtgttccgcaacaaacaagatgagcacggggtggtgacaaggaacaaggcacgacttgtggcaaaaggttatgcccaagtcacaggtttggactttgaggagacttttgatcctgtggctaggctagagtcaattcgcatattgttagcctatgccgctcaccattctttcaggttgttccaaatggatgtgaagagcgctttcctcaacgggccaatcaaggaggaggtgtacgtagagcaaccccctagctttaaggatgaacggtaccccaaccacgtgtgcaagctctctaaggcgctctatggacttaagcaagccctaagagcatggtacgaatgccttagagactttttaatcgctaatgctttcaaggttgggaaagccgatccaactttattcactaagacttgtgatggtgacttatttgtgtgccaaatttatgtggatgacataatatttggttctactaaccaaaagtcttgtgaagagtttagcagggtgatgactcaaaagtttgaaatgtcgatgatgggcgagttgaactactttcttgggttccaagtgaagcaactcaaggacggcactttcatctcccaaacgaagtacacgcaagacttgatcaagcggtttgggatgaaggacgccaagcccgcaaagactccaatgggaactgacggacacgtcgccctcaacaaaggaggtaagtccgttgatcaaaaagcataccggtctatgataggttccttgctttacttatgtgctagtagaccggatattatgcttagtgtatgcatgtgtgctagatttcaatccgatccaagggagtgtcacttagtggtcgtgaagcgaattcttagatatttagtcgctacgccttgcttcgggatctggtatccaaaggggtctacctttgacttgattggatattcagactccgattatgctggatgtaaggttgataggaagagtacatcagggacgtgccaattcttaggaaggtccctggtgtcttggagttctaagaaacaaacttctgttgctctatccaccgctgaggccgagtatgttgccgcaggacagtgttgcgcgcaactactttggatgaggcaaaccctccgggactttggctacaatctaagcaaagtcctactcctatgtgataatgagagtgctatccgtatggcggataatcctgttgaacacagccgcacaaagcacatagacatctggcatcactttttgagagaccaccagcaaaagggagatatcgaagtgttttatgttagcaccgagaaccagctagccgatatctttacgaagcctctagatgagtcaaccttttgcaggctgcgtagtgagctaaatgtcttagattcgcggaactctgattga

SEQ ID NO: 4579 - DNA, 1275 bp, Zea mays
  Clone ID: TF_ZmC4916_412
atggatcctaaagggaaggggatggtgatcgacgacaaggagaaggaatccttcatcaatgagccaaaagacgacaagcccactgactcgggctcaagtcaaaagaagaaggatggaaagaagaagaggcgcatcaagaagattgtctactacgacagcgacgaatcttcctcttctcaaaaggacgacggatacaaggagaaaaagaaaacggttaactcgaacttttctttcgattattctcgtattccgcataattccaatgctcatttgctctccattccacatggtaaacctccacactttgatggagaggactatggattttggagtcacaaaatgcgtagccacttgttttctcttcatccaagtatatgggagatagtagaaaatgggatgcgatttgatagttcggataactccatgtttatcaatgaacaaatccataaaaatgcacaagctactactgttcttttagcatccttgtgcagggaagagtacaataaggtgagcggcttggacaacgccaagcagatttgggacaccctcaagatctcgcatgaggggaatgacgtcaccatgctcaccaagatggagttggtggaaggcgaactaggaaggttcgcaatgatcaggggagaggagccaactcaaacgtacaataggctcaagaccctggtcaacaagataagaagctatggaagcacgagatggacggaccacgacgtcgtccgacttatgctaaggtccttcactgtccttgatcctcatcttgtaaactctattcgtgagaatcctaggtacatcaagatgacgcccaaggaaatactcagaaaatttgtaagcgggcgaatgatgatcaaggaggcgagatacgttgatgaggcgttgaatggcccaatctacgagcctcaaactgttgctctcaaagcaacaagtaacagggagacgctacctagcaagcgcttcaagacggcgctcaaaggtcgcaaggagcaccccaacaagagcaagacgaaggggaagcgctcttgcttcaagtgtggtaaggttggtcactttattgctaactgtcctgataatgatagtgaccaagatcaagaaaagaagagggaaaagaagaagacttacaagaaagcgaaaggcgaggcacaccttggcaaagagtgggactcggattgctcttcaaacgacaatgaaggacttgccacctcggccttcaacaaatcatccctcttccccaacgagcatcacacctgcctcatggcaaagtaa

SEQ ID NO: 4580 - DNA, 3648 bp, Zea mays
  Clone ID: TF_ZM3638.C2.o1.fg
atggccctaggctcgggccacaaacgcaaagatgggaagaagaagaagacaagacgcatcaagaagatcgtctactacgacgatagcgatgagtccacttcttcccaaaaggacaacgacgacaacgactacgagagaaggaaaccggttaattcgaacttttcttttgactactctcgcattccgcaaagtacaaatgctcatttgctctccattccacttggcaaacctcctcactttgatggagaggactacggattttggagccacaaaatgcgtagtcacctattctctctccatccgagcatatgggagattgtggaaagtggaatgaaatttgatagctcggatagtcctatgtttatcaatgaacagattcatggaaatgcacaagctactactgtgttgttagcctccttgtgcagggacgagtatcataaggtgagcggcttggacaatgccaagcagatctgggacaccctcagaatctcacatgaggggaacgacgtcaccttactcacgaaaatggagttggtggagggcgagcttggaagattcgcaatgatcaggggagaggagccaacccaaacatacaaccggctcaagacccttatcaacaagataaggagctacggaagcacacgatggacggaccacgacgtcgttcgtctaatgctaaggtcttttactgtacttgatccacatttggtgaacaatatccgtgaaaatcctaggtacaccaagatgtcgcccgaagaagttcttgggaaatttgtaagcgggcgaatgatgatcaaggaggcaagatatgtcgacgacgcgttgaacggtccaatccatgagcctcaacccattgctctcaaggcaacgaggagcaaggaggcgctacctagcaagcgcttcaagacggcgctaaagggtcgcaaggggcagccaagcaagaccaagacaaaggggaagcgctcatgcttcaaatgtggtaaggttggtcattttattgctaattgtcccgacaatgatagtgaccaggaagaagggaacaagagggagaagaagaagaagaactataagaaggcaaaaggcgaggcacatcttggcaaggagtgggactcgaattgttcgtcgtccgactccgacaacgaaggactcgccgtcactgccttcaacaagtcatccctcttccgcaacgagcatcacacttgcctcatggcaagggaaaagaagggtctagatagaaccaaggtggataaaataaatgaattgattgatgctttgaatgataagaatagattgctagaaaagcaagaggatctcttatatgatgaacatgacaagtttgtagaagctcaaaaatcccttgctttagaaataaagaggaatgaaatgctttcttgtgaattgtctacatgtcatgactctatttctagtttaaaaagcataaacgatgaattgaatgctaagttagaaatagctaataaatcaacatcttgtgtagaacatgttgtggtttgcactaggtgtaaagattttaatgttgaagcttgtagtgaacacctagtttcaatttctaaattgaatgatgaagtggctagtcttcatgcccaacttaagactagcaaaagtgaatttgataagttaaaatttgcaagggatgcctacacgattggtagacacccctcaattaaggatggacttggtttcaagagggaagtcaaggacttaacaagccataaggctcccatctccgccaaggagaaaggaaaggcccctatggctagtagtgctagaaagaatcatgcttttatgtaccatgatagaagacagtctaataagagttgtaatgcttatgatgcttttgactctcatgccatgtttgcttctagttcttcctatatgcatggtaaagatatgtctaggagatattttgttcatatgcctaggagaaatgttgttaatgttcctaggaaagttaatgaaccttctacaatatatcatactttaaatgcttcctttgctatttgtagaaaggataggaagatagttgctagaaaattaggggcaaaatgcaagggagacaaaacttgcatttgggtccctaagacaattgtgactaaccttgtaggacccaacaagagttgggtttatgcatccgggggttcaagctggattatcgacagcggatgcacaaaccatatgacgggggagaagaagatgttcacctcctacgtcaaaaacaaggattcccaagattcaataatattcggtgatgggaatcaaggcaaggtaaaagggttagatgtgtctgtctttagaagaagtgatggttcattagcttttaagggtgtattagacgacaaactttacttagttgattttgcaaaagaggaagccggtctagatgcatgcttaattgctaagactagcatgggctggctgtggcatcgccgcttagcacatgtggggatgaagaaccttcacaagcttctaaagggagaacacgtgataggtttaactaatgtgcaattcgaaaaagatagaccttgtgcagcttgtcaagcaggcaaacaggtgggaagctctcatcacaccaaaaatgtgatgaccacatcaagacctttggagatgcttcacatggacctcttcggacccgtcgcctatctaagtataggaggaagtaagtatggtcttgttatagttgatgacttttcccgcttcacttgggtattctttttgcaggataaatctgaaacccaagggaccctcaagcgcttcctaaggagagctcaaaacgagtttgagctcaaggtgaaaaagataaggagcgacaatgggtccgagttcaagaaccttcaagtggaggagtaccttgaggaggaagggatcaagcacgagttctccgctccctacacaccacaacaaaatggtgtggtagagaggaagaacaggacgcttatagacatggcgaggacgatgcttggagagttcaagacccccgagcgcttttggtcggaagccgtgaacacggcttgccacgccatcaacagggtctaccttcatcgcctcctcaagaagacgtcgtatgagctactaaccggtaacaaacccaatgttttgtattttcgagtttttgggagtaaatgctacattctagtgaagaagggtaggaattcaaagtttgctcccaaagccgtagaagcgtttttgttaggttatgactcaaatacaaaggcgtatagagtcttcaacaaatcattgggtttggttgaagtctctagcgacgttgtatttgatgagactaatggctctccaagagagcaagttgttgattttgatgatgtagatgaagaagaagttccaacggccgcaatacgcaccatggcgattggagatgtgcggccacacgaacaaaatgagcgagatcaaccttcttcctcaacaatggtgcaacccccaactcaagatgatgaacaggaggcgtgtgatcaagggggagcacaagatgatcatgtaatggaggaagaagcgcaaccggcacctctaacccaagttcgagcgatgattcaaagggatcatcccgtcgaccaaattttgggtgatattagcaagggagtaactactcgatctcgattagttaacttttgtgagtga

SEQ ID NO: 4581 - DNA, 1164 bp, Zea mays
  Clone ID: TF_ZM4321.C3.o5.fg
atggatcctaagggaaaggggatggtggtcaacgacaatgagaaggagtccatcttcaacgagccaagggacgacaaagtcaatgactccggctcgagtcaaaagaagaaagatggaaagaagaagaggcgcatcaggaaggttgtctactacgacagcgacgaatcttcctcttctcaaaaggacgacgaatacgaggagaaaaagaaaacggttaattcgaacttttcttttgattactctcgttttccgcataattccaatgctcatttgctttctattccacttgggaagaatacaataaggtgggcatccttgtgcagggaagaatacaatgccaagcagatctgggacaccctcaagatctcaaatgaggggaacgacgtcaccatgctcactaagatggaattggtggaaggcgaactaggaaggttcacaatgattaggggagaggagccaacccaaacgtacaacaggctaaagaccctcgtcaacaaaataaggcgctatggaagcacgcgatggacggaccacgacgtcgtccgacttatgctaaggtctttcaccgtcattgatcctcatcttgttaactctattcgtgagaatcctaggtacaccaagatgacgcccgaggaaatacttggaaagtttgtaagcgggcggatgatgatcaaggaagcaagaatcgttgatgatgcgttgaatggcccaatccacgagcctcaacccattgctctcaaagcaacgaggagcagggagatgctacctagcaaggtggcgcaagttgagacggccgggcttaacgaggaagaaatggccctcatcattaagcgtttcaagacggcactcaaaggtcgcaaggagcatcccaacaagagcaagacgaagggaaagcgctcctgcttcaagtgtggtaaggttggtcactttattgctaattgtcccgataatgatagtgaccaggatcaagaaaagaagagggaaaagaagaagacctacaagaaggctaagggcgaggcacaccttggcaaggagtggaactcaaattgttcatcgtctgactctgacgacgaaggattcgccgcctcggccttcaacaaatcgtccctcttccccaacgagcatcacacatgccttatggcaaaggagaagaagaacatgtag

SEQ ID NO: 4582 - DNA, 1395 bp, Zea mays
  Clone ID: TF_ZM4355.C1.o9.fg
atggatcctaaggggaagggaatcgtgatcaatgataaggaggagtccttcgtcaacgagccgaaggatgacaagcctaccgactcgggctcgggtcacaaacgaaaggatgggaagaagaagaagacaaggcgcatcaaggagatcgtctactacgactacagcgacgagtccacttcttcccaaaaggacaacgacgacaacgactacaggaaaccgatctgggacaccctcaggatctcacatgaggggaacgacgtcaccttactcaccaaaatggagttggtggagggcgagcttggaagattcgcaatgatcaggggagaggagccaacccaaacatacaaccggctcaagaccctcatcaacaagataaggagctacggaagcacacgatggacgaaccacgacgtcgttcgtctaatgctaaggtcctttactgtacttgatccacatttggtgaacaatatccgtgaaaatcctaggtacaccaagatgtcgcccgaagaagttcttgggaaatttgtaagcgggcgaatgatgatcaaggaggcgagatatgtcgacgacgcgttgaacggtccaatccatgagcctcaacccattgctctcaaggcaacgaggagcaaggaggcgctacctagcaaggtggcgcaagttgaggcggccgggctcaatgatgaagagatgactctcatcatcaagcgcttcaagacggcgctaaagggtcgcaaggggcagccaagcaagaccaagacaaaggggaagcgctcatgcttcaaatgtggtaaggttggtcattttattgctaattgtcccgacaatgatagtgaccaggaacaagggaacaagagggagaagaagaactataagaaggcaaaaggcgaggcacatcttggcaaggagtgggactcggattgttcattgtctgactccgacaacgaaggactcgccgccactgccttcaacaagtcatccctcttccccaacgagcatcacacttgcctcatggcaagggaaaagaagggtctagatagaaccaaggtggataaaataaatgaattaattgatgctttgaatgataagaatagattgctagaaaagcaagaggatctcttatatgatgaacatgataagtttgtagaagctcaaaaatcccttgctttagaaataaagagaaatgaaatgctttcttgtgaattgtctacatgccatgactctatttctagtttaaaaagcataaacgatgacttgaatgctaagttagaaatagctaataaatcaacatcttgtgtagaacatgttgtggtttgcactaggtgtaaagattttaatgttgatgcttgtagtgaacacctagtttcaatttctaaattgaatgataaagtggtgtaa

SEQ ID NO: 4583 - DNA, 4398 bp, Zea mays
  Clone ID: TF_ZM4543.C1.o1.fg
atgacgcccgaggagatacttggaaagttcgtaagcgggcgaatgatgatcaaggaggcgagatatgttgatgaggcgttaaatggcccaatccatgagcctcaaaccattgctctaaaagcaacaagtagcagggaggcactacctagcaaggtggcgcaagttgaggcagccgggctaaatgaagatgaaatgaccctcatcatcaagcgcttcaagacggcgctcaaaggtcgcaaggagcatcccaacaggagcaagacaaaggggaagcgctcctgcttcaagtgtggtaaggttggtcactttattgctaactgtcctgataatgatagtgaccaggatcaagaaaagaagagggaaaataagaagacttacaagaaagcgaagggcgaggcacaccttggcaaagagtgggactcggattgctcttcatccgacgacgaaggacttgccgcctcggccttcaacaaatcatccctcttccccaacgagcatcacacctgcctcatagcaacggaaaagaagaatagattattagaaaagcaagaggatcttttgtacgaagagcatgataaatttgtagatgtccaaaaatctcttgctttagaagttaaaatgaatgaaatgctttcttgtgaattatctacttgccatgagactatttctagtttaaaaagtgttaatgatgatttaaatgctaagctagaagtagcaaataaatctagttcttgtgtagaacatgtagtgatttgcaataagtgtaaggactttaatgttgatgcctgtgttgagcaccttacttctattgcaaaactaaatggtgaagtggctagtcttaatgcccaacttaagactagcaaaaatgaatttgataaactaaaatttgcaagggatgcctacactgttggcagacacccctcaattaaggatgggcttggctttaagagggaagccaagaacttaacaagtcataaggctcccatctccgccaaggagaaagggaaggcccctatggctaatagtgttcaaaagaatcatgctttcatttatagtgatagaaaattctctagaaatgcttatagaaattattcttatgattcatatgctatgcctgcttctagtttctctattgtgcatgatatgcctaggaaaaatgttattcatcatatgcctagaaaaaatgttgttcatgtacctaggaaagcaagtaatgaaccttctacaatttatcatgcttgcaatgcttcctttgcaatttgtagaaaggataagaaagtgattgctaggaaattaggggcaaaatgcaagggagataaaacttgcatttgggtccctaaggctattgtcactaaccttgcaggacccaacaagagttgggtttatgcatccgggggctcaagctggattatcgacagcggatgcacaaaccacatgacaggggagaagaagatgttcacctcctacgtcaagaacaaggattcccaagattcaatcatattcggtgatgggaaccaaggcaaggttaaaggactaggaaaaatagcaatttcatccgagcattccatttctaatgtgtttttagtggaatcgctcggatataacttgttgtttgttagtcaattatgtaatatggggtataattgcttatttacaaatgtagatgtgtctgtctttagaaggagtgatggttcattagcttttaagggtgtactagacgataaactctatttagttgattttgcaaaggaggaggccggtctagatgcatgtttgattgctaagactagcatgggctggttgtggcatcgccgtctagcacatgtggggatgaagaaccttcacaaacttctaaagggagaacatgtgttaggactaacaaatgtgactttcgaaaaagatagaccttgtgcagcttgtcaagcaggtaagcaggtgggaagtgctcatcacagcaagaatgtaatgaccacatcaagacctctggagttacttcatatggacctcttcggacccgtcgcctacctaagcataggaggaaaaacccaagggaccctcaagcgcttcctaaggagagctcaaaatgagtttgagctcaagcaaaacggtgtggtagagaggaagaacaggacactcatcgacatggcgaggacgatgcttggagagttcaagacggccgagtggttttggtcggaagccgtgaacatggcttgccacgccataaaccgggtctaccttcatcgcctcctcaagaagacttcgtacaaactcctaaccagtaaaaaacccaatgtatcatactttcgtgtttttgggagcaactgttatattctagtgaagaaaggtagaaattctaagttcgctcccaaagctgtagaagggtttttgttaggttatgactcaaatacaaaggcatatagggtcttcaacaaatcatcgggtttggttgaagtctctagcgacgtcgtatttgatgagactaatggctctccaagagagcaagttgttgatcttgatgatgtagatgaagaagacgctccaacgaccgcaatacgcaccatggcaattggtgatgtgcggccacaggaacaaaaggagcaagatcaaccttcttcctcaacaatggtgcaacccccaactcaagacgatgaacaggttcatcaagaagaggcgtgtgatcaagggggagcacaagatgatcatgttatggaggaagaagcacaacatgcccctccaactcaagttcgagcgacgattcaaaggaatcatcccgtcgatcagatattgggtgatattagcaagggagtaactactcgctctagattagttaatttttgtgagcattactcttttgtctcttctattgagcctttcagggtagaagaggccttgctagatccggactgggtgttggccatgcaggaggagctcaacaatttcaagagaaatgaagtttggacattggtgccacgtcccaagcaaaacgttgtgggaaccaagtgggtgtttcgcaacaaacaagacgagcacggggtggtgacaaggaacaaggcacgacttgtggcaaaaggttatgcccaagtcgcaggtttggactttgaggagacttttgctcctgtggctaggctagagtcaattcgcatattgttagcctatgccgctcaccattctttcaggttgttccaaatggatgtgaagagtgctgtcctcaacgggccaatcaaggaggaggtatacgtagagcaaccccctggctttgaggatgaacggtaccccgaccacgtgtgtaagctctctaaggcgctctatggacttaagcaagccccaagagcatggtatgaatgccttagagactttttaattgataatgctttcaaggttgggaaagccgatccaactttattcactaagacgtgtaatggtgatttatttgtgtgccaaatttatgtcgatgacataatatttggttctaccaaccaaaagtcttgtaaagagtttagcagggtgatgactcaaaagtttgaaatgtcgatgatgggcgagttgaactacttccttggtttccaagtgaagcaactcaaggacatcactttcatctcccaaacgaagtacacgcaagacttgatcaagcggtttgggatgaaggacgccaagcccgcaaagactccaatgggaactgacggacacatcgacctcaacaaaggaggtaagtccgttgatcaaaaagcataccggtctatgataggttccttgctttacttatgtgctagtagaccggatattatgcttagtgtatacatgtgtgctagatttcaatccgatccaagggagtgtcacttagtggccgtgaagcgaagtcttagatatttagtcgctacgccttgcttcaggatctggtatccaaaggggtctacctttgacttaattggatattcagactccgattatgctggatgtaaggttgataggaagagtacatcagggacgtgccaattcttaggaaggtccctagtgtcttggagttctaagaaacaaactttcgttgccctatccaccgttgaggccgagtatgttgccgcaggtcagtgttgcacgcaactactttggatgaggcaaatcctccgggactttggctacaatctgagcaaagtctcactcctatgtgataatgagagtgcaatccgcatggcggataatcctattgaacccagccgcacaaagcacatagacatccgacatcactttttgagagaccaccagcaaaagggagatatcgaagtgttttatgttagcaccgagaaccagctagccgatatctttaccaagcctttagatgagaagaccttttgcaagctgcgtagtgagctaaatgtcttagattcgcggaacttggattga

SEQ ID NO: 4584 - DNA, 1533 bp, Zea mays
  Clone ID: TF_ZM4626.C1.o6.fg
atggcgcgctcgtcaaatattctatcgcatttggtaacattaaaggaattaatggaattaggaggcaaggtggcgtaccttgcaaaaccggctggctctggtaaaaaggctgctctcgggaactcaacggcggcgtacggctataattcaccggactgtccggtactctcaattggtatcggagccgttctcttcacaaaagggactaatcgcccgaagagatggatcctaagggaaaggggggtggtcaacgacaatgagaaggagtccatcttcaacgagccaagggacgacaaagtcaatgactccggcttgagtcaaaagcagaaagacggaaagaagaagaggcgcatcaggaaggttgtctactacgacagcgacgaatcttcctcttctcaaaaggacgacgaatacgaggagaaaaagaaaacggttaactcgaacttttcttttgattactctcgtattccgcataattctaatgctcatttgctttctattctacttggaaaacctcctcactttgatggagaggactacggattttggagtcacaaaatgcgtagtcatttgttctctcttcatccaagtatatgggagatagtagaaaacggaatgcaatttgatagttcagataattctatgtttatcaatgaacaaatccataagaatgcacaagctactactgttcttttagcatccttgtgcagggaagaatacaataaggtgagcggcctggacaatgccaagcagatctgggacaccctcaagatctcacatgagggaaacgacgtcaccatgctcaccaagatggagttggtggaaggcgaactaggaaggctcaagaccctcgtcaacaaaataaggagctatggaagcacgcgatggacggaccacgacgtcgtccgacttatgctaaggtccttcaccgtccttgatcctcatcttgttaactctattcgtgagaatccttggtacatcaagatgacgcccgaacaaatacttgggaagtttgtgagcgggcgaatgatgatcaaggaggcaagatacgttgatgaggcgctaaatggcccaatccatgagcctcaagccattgctctcaaggcaacaagtagcagggagacgctacctagcaaggtggcgcaaattgaggcggccgggctaaacgaggatgaaatggccctcatcatcaagcgcttcaagacggcgctcaaaggtcgcaaggagcatcccaacaaaagcaagatgaagggaaagcgctcctgcttcaagtgtggtaaggttggtcattttattgctaattgtcccgataatgacagtgaccaggatcaagaaaagaggagggaaaagaagaagacctacaagaaggctaagggcgaggcacaccttagcaaggagtgggactcggattgttcatcgtccgactccgacgacgaaggactcgccgcctcagccttcaacaagtcggctctcttccccaacgagcatcacacatgcctcatggcaaaggagaagaagcttaaagagtattaa

SEQ ID NO: 4585 - DNA, 1567 bp, Zea mays
  Clone ID: TF_ZM4884.C12.o1.fg
ggggctcaggctatttcctgagtacctctccttcgcattcggtttgccttctaaaaccgggtgtgacacgggctcgggccacaaacgcaaagatgggaagaagaagaagaagacaagacgcatcaaggagatcgtctactacgacgacagcgatgagtccacttcttcccaaaaagacaacgacgacaacgactacgagagaaggaaaccggttaattcgaacttttcttttgactactctcgtattccgcaaagtacaaatgctcatttgctctccattccacttggcaaacctcctcactttgatggagaggactacagattttggagccacaaaatgcgtagtcacctgttctctctccatccgagcatatgggagattgtggaaagtggaatgaaatttgatagcttggatagtcctatgtttatcaatgaacagattcatagaaatgcacaagctactattgtgttgttagcctctttgtgtagggacgagtatcataaggtgagcggcttggacaatgccaagcagatctgggacaccctcaggatctcacatgagggaaacgacgtcaccttactcaccaaaatggagttggtggagggcgagcttggaagattcgcaatgatcaggggagacgagccaacccaaacatacaaccggctcaagaccctcatcaataagataaggagctacggaagcacacgatggacggaccacaacgtcgttcgtctaatgctaagatcctttactgtacttgatccacatttggtgaacaatatccgtgaaaatcctaggtacaccaagatgtcacccgaagaagttcttggaaaatttgtaagcgggcgaatgatgatcaaggaggcaagatatgtcaacgacgcgttgaacggtccaatccatgagcctcaacccattgctctcaaggcaacgaggagcaaggaggcgctacctagcaagcgcttcaagacggcgctaaagggtcgcaaggggcagccaagcaagaccaagacaaaggggaagcgctcatgcttcaaatgtggtaaggttggtcattttattgctaattgccccgacaatgatagtgaccaggaacaagggaacaagagggagaagaagaagaactataagaaggcaaaaggcgaggcacatcttggcaaggagtgggactcgaattgttcgtcgttcgactccgacaacgaaggactcgccgccactgccttcaacaagtcatccctcttcccaaacgagcatcacacttgcctcatggcaagggaaaagaagggtctagatagaaccaaggtggataaaataaatgaattgattgatgctttgaatgataagaatagattgctagaaaagcaagaggatctcttatatgatgaacatgataagtttgtagaagctcaaaaatcccttgctttagaaataaagaggaatgaaatgctttcttgtgaattgtccacatgccatgactctatttctagtttaaaaagcataaacgatgacttgaatgctaagttagaaatagctaataaatcaacatcttgtgtagaacatgttgtg

SEQ ID NO: 4586 - DNA, 2058 bp, Zea mays
  Clone ID: TF_ZM4322.C3.o2.fg
atggatacccataggccaccacacttcgacggcactaacttcccatattatagtgctagaatggcttgttacctagaggccgttgatctaggtgtttggagagtcactcgtgacgggatgaaacccctcaagaatcccgagaaacccaccacgagtgaagaaaaagaaattcatttaaatgctagagccaaaaattgcttgtatgaatctcttagcatggatattttcaatcaagtatttaccctgaaaactgctaatgagatttggctaaaattgcatgagctccatgacggcacatccaatgtccgtgagcaaaaacattgcctagtcttaaatgagtataattcttttgctatgaaagatgatgagcttgttagagacatgtattctcgcttgaatctaattatcaatgagctcaattctattggcattaataagctaggtgatgcggacattgtgaggaagattatctccctgctaccacaacaaagatatgggagcatcatcaccatccttcacaacatggaggacttaagcaacatgaccccgaccattgtgattgggaaaatcgcggcctttgagatgtcgcgaaaaatgagtcggggagaggagccaacttcctcaagaccatatgcttttgcatgtgatgaaaggaagggcaaaaagaaggctcccactccaagttcctcaagtgaagaagaggaagaagaagaaagtgatgatgatgaagataatcaaccatgcacatcatcctccgaggacgaagaaacgatccgacgcgtcggaaaggtcgaggatcttctctttaacattgacaggaaaaagcaaaggaagagaggatgcttcgcatgtggggagaagggtcacttcagggacaactgtccaaatatggccaaacccaaaaaggagaggagcaaaggcaaggcgctaacaagtgttagaacttgggatgattcttcaagtgaagatgaacctccaaggacacgcagccaccggtcctcgtcacgatcatcacggtcatcacacaaatgccttatggcaagaggtaacaaaagcattccatcctctagtgatgaaagtagtagtaatgatgaaggtgagggaaagccctctctagatgagcttgcggaagccgtagaatttttccaggatgtttgcactaagcaaaaagctcaacttaaaactttgaaaaataagttggttagctctcaaaatgattacaaaggtttgctagaaaaatttgaaacttttgcaaacttaaatagtgagctatcaactaaaattgagctattagaatctagtgctccatccactgctaccgatgatagccttattaaaaagaatgaaaaacttaaggctaagttagctagctcccaagaagctattgaaaatttgctagagaaaatggaaattcttagcatacacaataatgagctaactactaagctagaaaacattggtagcaccccagcagcatctttagttgaaatacctgaaataattaagaaagatgcttctacttcctgctttgatttaattgatgattctaacccctgcaaccaagtcgttgttgagaatattgttgtaaagacatgttcggatgaggttgcaaaggaaaatgaacaattaaagcaagaagtggctcgccttggcaaggctttgtatgacaagaaaggcaaagccaaacaaatccgaccttcacaggataacaccactgcgggagtgaacaagcctatggagggagaaactgtgatttgtagactatgccacatggaaggccacaagtctttccaatgcaaggcgatgatcggggataaacaaaggcgaaagctcaagcaaaagccatcaagcaaaatctccaacacctacatcaaaaaggtgaacaaaaaggatgctacaccatatttgatcaagaagaaaaagaacggaaaggtgatagcaatcaaggccaacaagcaagccaacaaaggaaagggggccaaacgcatctgggtgccaaaggagataatttcaaccatgaaaagcaccaagaaggtttggatcccgaaagggaagtga

SEQ ID NO: 4587 - DNA, 4950 bp, Zea mays
  Clone ID: TF_ZmC951_403
tcatttctccccctttttggcatgaatcgccaaaaacggaaccgttagagccctagaagtagtttcttcccctcccgtgtcgaggtcgagatgcccattggttcccatgggtgtcttgatgggtttggcatccttcatcccaaacttggttagaatgtcttgagtgtactttgtttggctgatgaaggtgccctcttggagttgcttcacttggaatcctaagaaatacttcaactcccccatcatagacatctcgaatttctgtgtcatgatcctactaaactcttcacatgtagactcgttagtagacccaaatataatatcatcaacataaatttggcatacaaacaagtcattttcaagagttttagtaaagagtgtaggatcagcctttccaactttgaagccattagcaataaggaaatctctaaggcattcataccatgctcttggggcttgcttgagcccataaagcgccttagagagcttatagacatggttaggatacttactgtcttcaaagccgggaggttgctcaacatagacctcttccttgattggtccattgaggaaggcacttttcacgtccatttgataaagcttaaagccatggtaagtagcataggccaataatatgcgaattgactcaagcctagctacgggtgcataggtttcaccgaaatccaaaccttcaacttgggagtatcccttggccacaagtcgagctttgttccttgtcaccacaccatgctcatcttgcttgttgcggaagacccacttggttcctacaacattttggttaggacgtggaactaaatgccataccttattcctagtgaagttgttgagctcctcttgcatcgccaccacccaatccgaatcttggagtgcttcctctaccctgtgtggctcaatagaggaaacaaacgagtaatgttcacaaaaatgggcaacacgagatcgagtagttacccccttatgaatgtcaccgaggatggtgtcgacggggtgatctcgttgtattgcttggtggactcttgggtgtagcggcctttgttcctcatcctccttgttttcctcatttgcatctcccccttgatcaataccatcatcttgaggtggctcatttgcttgatcttctaccttatcaacttgagcttgatcctcaatttgagtcggtggagatgcttgcattgaggaggatggttgatcttgtgcaattggaggctcttcggattccttaggacacacatccccaatggacatgttccttagcgcgatgcatggagcctcttcttcacctatctcatcaagatcaacttgctctatttgagagccattagtctcatcaaacacaacgtcacatgagacttcaactagtccagtggacttgttaaagaccctatatgcccttgtgtttgagtcataaccaagtaaaaaaccttctacagtcttaggagcaaatttagattttctacctcttttaacaagtataaagcatttgctaccaaagactctaaaatatgaaatgttgggctttttaccggttaggagttcgtatgatgtcttcttgaggattcggtgtagatataaccggttgatggcgtagcaagcggtgttgaccgcctcggcccaaaaccgatccgaagtcttgtattcatcaagcatggttcttgccatgtccaatagagttctattcttcctctccactacaccattttgttgaggtgtgtagggagaagagaactcatgcttgatgccctcctcctcaaggaagccttcgatttgagagttcttgaactccgttccgttgtcgcttcttattttcttgatccttaaggcgaactcattttgagcccgtctcaagaatctctttaaggtctcttgggtttgagatttttccctgtctttctcaaaatgaacatttgttaatcctaaaatgtgttctccctttagaagcttgtgaagattcttcatcccaacatgggctagtcggcggtgccagagccaacccatgttagtcttagcaattaagcaagtgtcgagttcagctctatcaaaatctaccaagtatagctgaccctctaacactcccttaaatgctattgaatcatcacttcttctaaagacagtgacaccttgatttccatccccgaatgtgacagctcgttggggatcttggtttttctcatatgaggagaacatcttcttctcccctgtcatgtggtttgtgcacccgctgtcgagtatccaacttgagcccccggatgcataaacccaaactgttttgggtcctttggcattagaaacaagaactttgggtacccaaacacaagtctttgaccccttgtgtttgcccccaacaaacttggcaacgaccttgccggatttgttagtcaaaacataggatgcatcaaaagttttaaatgaaatgctatgttcatttgatgcattaggaattttcttcttaggcaacttggcatgggttggttgcctagagctagatgtctcacccttatacatgaaagcatgattagggccagagtgagacctcctagaatgaattctcctaatcttgctctcaggataaccggcaggatataaaatgtaaccctcgttatcctgaggcatgggagccttgcccttaacaaaattagacaatctcttaggaggggcactaagtttgacattgtctcccctttggaagccaatgccatccttgatgccagggcgtctcccactatagagcatacttctagcaaatttaaatttttcattttctaagttatgctcggcaatttttgcatctaatattgctatatgatcattttgttgtttaattaaggtcatgtgatcatgaatagcattaatatcaacatctctacatctagtacaaatggaaacatgctcaatactagatgtagagggtttgcatgaattaagttcaacgatcttagcacgcaagatatcattgttatctctaagatcggaaattgtaacattgcaagcatctatttctttagccttagcaattaaattttcattttctactctaaggctagcaagagacatattcaattcttcaatcctagcaagcaaatcattattatttttaggattgaaagttgagacaatgcaaacatgagaatcaaccttagtatttaaactagcattttcattcctaaggttgtcaatcatctcacggcaagtgcttagctcactagataatttttcacatttttctacttctagagcataagcctttttaaccttaacatgtttcttgttttctttaattagacaatcctcttgggagtccaaaaggtcatctttttcatgaatagcactaatcaattcatttaatttttctttttgctccatgttaagattggcaaagagaacacgcaaattatcctcctcatcactagcattatcgtcactagaagattcatatttagtggaggagttagatttaaccttcttccgtttgccgtcctttgccatgagacacttgtggccgacgttggggaagagaagtcccttggtgacggcgatgttggcggcgtcctcgtcgtcggaggagtcgcttgagctttcgtcggaatcccactcccgacaaacatgggcatcgccgcccttcttcttgtagtatctcttcttctcctttcttctccccttcttgtcgtcgcctcggtcaccgtcactagatacgggacatttagcaataaaatgaccgggcttaccacatttgtagcaaaccttcttggagcgggacttgtagtctttccccctcctttgtttgaggatttggcggaagctcttgatgacgagcgacatctcctcattgtcaagcttggaggcgtcgattggttgtctacttggtgtagactcctccttcttgtcctccgtcgccttgaatgcgacgggttgagcctcggatgtagatggatcatcaagctcgttgatcttcctcgagccttcgatcatgcactcaaaacttacaaaattcccgataacttcctcgggggtcattttagtatatctaggattaccacgaattaattgaacttgagtggggttaaggaaaatgagagatcttagaataaccttaaccatttcgtggtcgtcccacttgatgctcccgaggttgcgcacttggttcaccaaagtcttgagccggttgtacatgtgttgtggctcttcccctttgcgaagccggaaccgaccgagctccccctcgatcgtttcccgcttggtgatcttggtgagctcatctccttcgtgtgcggttttgagcacatcccaaacctccttggcgctcttcaacccttgaactttgttatactcctctctacttaaagaggcgaggagtattgttgtcgcttgagagttgaagtgctcgatttgggccacctcatcctcatcataatccttgtcccctacggatggtacctgtgcaccaaactcaacaacatcccatatacttttgtggagtgaggttagatgaaatcgcattaaatcactccacctagcataatcttcaccatcgaaagttggtggtttgcctaatgggacggaaagtaaaggtgcatttttagaaatgcgagggtaatgtagggggatcttactaaacttcttacgctcttggtgtttagaagttacggagggcgcatcggagtcggaggtcgatgttgatgaagtgtcggtctcgtagtagaccactttcctcatccttttgtgcttgtcccctctccgatgtggtttgtgggaggaagatctctccttcttctctttgtggtgcgaagaagatttcttctcctttcctttgtgggaggagctcttcttcttctccttcctcttggtgcgggactcttccgatgaagtgctcccgtggcttgtagtgggcttttcgccggtctccatctccttcttggcgggatctcccgacat

SEQ ID NO: 4588 - DNA, 1173 bp, Zea mays
  Clone ID: TF_ZM4325.C1.o21.fg
atggaggacttgagcaacatgaccctgaccattgtgattgggaaaaatgtggcttttgagatgtcgcaaaaaatgtgtcggggagtggagccaacttcctcaagaccatatgcttttacatgtgatgaaaggaagggcaaaaagaaggctcccactccaagttcctcaagtgaagaggaggaggaagaagaaagtgatgatgatgaagataatcaaccatgcacatcatcctccgaggacgtaaaaacaatccgacacgtcggaaaggtaatgaggatgatccgcaagattaatctaatgggtgtgcccctgcaggtcgaagatcttctctttaacattgataggaaaaagcaaaggaagagaggatgcttcgcatgtggggagaaggcccacttcagggacaactgtccaaatatggccaaacccaaaaaggagaggagcaaaggcaagacgctaacaagtgttagaacttgggatgattcttcaagtgaagatgaacctccaagtacacgcagccaccggtcctcatcacgctcatcacggtcatcacacaaatgccttatggcaagaggtaacaaaagcattccatcctcgagtgatgaaagtagtagtgatgatgaaggtgagggaaagccctctgtagatgagcttgcggaagccgtagaatttttccaggatgtctgcaccaagcaaaaagctcaacttaaaactttgaaaaataagttgattagctcccaaaatgattataaagaagtggctcgccttggcaaggctttgtatgacaagaaaggcaaagccaaacaaatccgacctccacaggataacaccactgcgggagtgaacaagcctatggagggagaaactgtgatttgtaggctatgccacaaggaaggccataagtctttccaatgcaaggcgatgaccggggataaacaaaggcaaaagctcaagcaaaagccatcaagcaaaatctccaacacctacatcaaaaaggtggacaaaaagactgctacaccatatttgatcaagaagaaaaaggatggaaaggtgatagcaagcaaggccaacaagcaagccaacaaaggaaagggggccaaacgtatctgggtgccaaaggaaataatttcaaccatgaaaagcaccaagaaggtttggatcccgaaagggaagtga

SEQ ID NO: 4589 - DNA, 3264 bp, Zea mays
  Clone ID: TF_ZM4409.C1.o5.fg
atgtcgcccaaagaaatacttggaaagttcgtaagcgggcggatgatgatcaaggaggcaagatacattgatgaggcgttgaatggtccaattcatgagcctcaagccatcgctctcaaggcaacaagtagcagggaggcgctacctagcaaggtggcgcaaattgaggccgttgggctaaatgaggatgaaatggccctcatcatcaagcgcttcaagacggcgctaaagggccgcaaggagcatcccaaaaagaacaagacgaagggaaagcgctcctgcttcaagtgcggtaaggttggtcactttgttgctaactgtcccgataatgatagtgaccaggaacaaggaaagaatgggaaaagagagaacaagaaggtttacaagaaggctaaaggcgaggcacaccttggaaaggagtgggattcggattgctcttcgtccgactccgacgacgaaggactcgctgccaccgccttcaacaaatatgaacacctagtttccatttctagattaaaggatgaagtggctagtcttaatgctcaacttaagactagcaaaagtgaatttgataaactaaaatttgcaagggatgcctacacgattggtagacacccctcaattaaggatggacttggctttaagagggaagccaagaacttaacaagtcataaggctcccatctctgccaagaagaaagggaaggcccctatggctaatagtgctaaaaagaaccatgctttcatgtaccatgataggagatattctaggaatgttcatagaagttatgatacttttgattctcatgccatgattgcttcaagttcttatattatgcatgatagaaatttggctagaaaaatgttgttaatgtacctaggaaaaaaggataagaaagtggttgctaggaaattaggggcaaaatgcaagggagacaaaacttgcatttgggttcctaagactattgtcactaaccttgtaggacccaacaagagttgggtttatgtatccgggggatcaagctggattatcgacagcggatgcacaaatcacatgacgggggagaagaagatgttcacctcctacgtcaagaataaagattcccaagattcattcatattcggtgacgagaatcaaggcaaggttaaaggattaggcaagattgccatctcaaatgagcactctatctccaatgtatttttagtagagtcgctaggttataatcttttgtcggttagtcaattatgtaatatgggatataattgcgtattcacaaatgtagatgtatctgtctttagaaggagtgatggttcattagcttttaagggtgtactagacgacaaactctatttagttgattttgcaaaggaggagctgtggcatcaccgtctagcacatgtggggatgaagaaccttcacaaacttctaaagggagaacatgtgttaggtctaacaaatgtgcatttcgaaaaagatagaccttgtgcagcttgtcaagcaggtaaacaagtgggaagtgctcatcacatcaagaacgtgatgactacttcaagacccctagagctgctgcatatggacctcttcggaccagtcgcctacctcagcatcgggggaaggaccctcaagcgcttcctaaggagagctcaaaatgagtttgagctcaaggtgaagaagataaggagcgacaacgggtctgagttcaagaaccttcaagtggaggaataccttgaggaggaaggaatcaagcacgagttctccgctctctacacaccacagcaaaatggtgtggaagagaggaagaacaggacgcttatagacatggcgaggacgatgcttggagaattcaagacgcccgagcagttttggtcggaagctgtgaacacggcttgccatgccataaactgggtctaccttcatcgcctcctcaagaagacgtcatacgagcttctaaccggtaacaaacccaacgtttcatattttcgagtttttgggagtaaatgctacattctggtgaagaaaggtagaaattcaaaatttgctcccaaatttgtagaagggtttttgttaggttatgactcaaatacaaaggcgtatagagtcttcaacaaatcatcgggtttggttgaagtctctagtgacgttgtatttgatgagactaatggctctccaagagagcaagttgagcttgatgatgtagatgaggaagatgttccaacggacgcgattcgtaccatggcgattggagacgtgcgaccgcaggaacacaaggaacaagagcagccttcttcctcaacgacggtgcacccccaacctaagatgatgaacagggtagaagaggccttgctagatccggactgggtgttggccatgcaggaagagctcaacaacttcaagcgtaatgaagtttggacagtggtgccgcgtcccaagcaaaatgttgtgggaaccaagtgggtattccgcaacaaacaggacgagcatggggtggtgacgaggaacaaggctcgacttgtggcaaaaggttatgcccaagtcgcaggtttggactttgaggagacttttgctcctgtagctaggctagagtcgattcgtattttgttagcctatgccgctcaccattctttcaggctgtaccaaatggatgttaagagcgctttcctcaacgggccaatcaaggaggaggtgtacgtggagcaaccccctggctttgaggatgaacggtaccccgaccatgtgtgtaagctctctaaggcgctctatggacttaagcaagccccaagagcatggtatgaatgccttagagactttttaattgctaatgctttcaaggttgggaaagccgatccaactcttttcactaagacatgtgatggtgacttatttgtgtgccaaatttatgtcgatgacataatatttggttctactaaccaaaagtcttatgaagagtttagcagggtgatgactcaaaaatttgaaatgtcgatgatgggcgagttgaactacttccttgggttccaagtgaagcaactcaaggactgtaccgacacgcgtacgaatgcgacgtggagtgcgtggagtacgccgaggccctcgccaaatccgaggccctcatcgccgacctggagagcctccaagggggcgccagatgcgaagcgccacaccggcaacttcgagccagctgagacggttaagtacgtccctctcgaccccagcaacgacgcctccaagcagatccggatcggctccaagctcgaccccaaatag

SEQ ID NO: 4590 - DNA, 466 bp, Zea mays
  Clone ID: TF_LIB4767-015-R1-K1-C4
cccgtccccctcgttctctctctcgttgcgacgactgtgtggagtaccgcccccgccccctcaccctcaccccccgacgccgacgccctaggcggctacgccaggtcccgagggacgggcccttcatcttcgtcagtctattcgccgggcgacgagcacccgccaggtttcgtaatgatttgtgcaacaattgtaagcgtcctgggcattttgctagagagtgtcctagcgtggctgtctgccatacctgcgggcttcctgggtaataactttgtattattctgcttgcacatattcatgctcacatgttattagttttaagattttgatcattcgttcaactgcactttgcttgtaatgcttaccatacttgtaatcattgtggcacaaccattctagcgaaaccttagagcgtctcccagagttttcaaaacccactcccaatctagattttttgggcatgctt

SEQ ID NO: 4591 - DNA, 622 bp, Zea mays
  Clone ID: TF_LIB3991-009-Q6-K6-E11
aattaattcgtgggaatcctagatatccactaatgacccccgaggaagttatcgggaattttgtgagttttgaatgcatgattaagggctccaagaagatcaacgagcttgacgagccttccacctccgaggcgcaaccggtggccttcaaggcaacggaggagaagaaggaggagtctacaccaagtagacaaccaattgacgcctccaagctcgacaacgaggagatggccctaatcatcaaaagctttcggcaaattctcaagcaacggaaggggaaggactacaaaccccgttccaagaaggtttgctacaagtgtggtaagcccggtcactttattgcaaaatgtcctatgtctagtgacagtgacaggggcgacgacaagaagggaagaagaaaggagaagaagaagtattacaagaagaagggcggcgatgcccatgtttgtcgggagtgggactccgacgaaagctcaagcgactcctcctccgacgaggacgccgccaacatcgccgtcaccgagggccttctcttccccaacgtcggccacaagtgtctcatggccaaggacggcaaaaagaagtaaaatcaaggtcctccactaaatatgaaacatctagt

SEQ ID NO: 4592 - DNA, 5001 bp, Zea mays
  Clone ID: TF_ZmC951_288
ttagagccctctttggtatttttctttctctttggtcataaatgaatgagttaagattataccaaagacgaagtcaggtccttttgcttttgagcttttactctctcccccaaggatgaagtccttttctttgatgctcatttctcccccaaagaatagagagttgctcggagtgatggtgaagtatgagttacggagtggaagcctttgtcttcgccgaagactccaatttcctttcaatatacctatgacttggtttgaaatagacttttgatcgacggatttacctcccgtgtcgaggtcgagatgcccattggttcccatgggtgtcttgatgggcttggcatccttcattccaaacttggttagaatgtcttgagtgtactttgtttggcaaatgaaggtgccctcttggagttgcttgacttggaatcctagaaaatacttcaactcccccatcatcgacatctcgaatttctgtgtcatgatcctactaaactcttcacatgtagactcgttagtagacccaaatataatatcatcaacataaatttggcatacaaacaagtcattttcaagagttttagtaaagagtgtaggatcggccttgccgactttgaagccattagaaataaggaaatctcttaggcattcataccatgctcttggggcttgcttgagcccataaagcgccttagagagcctatagacatggttagggtactcactgtcttcaaagccgggaggttgctcaacatagacctcttccttgattggtccgttgaggaaggcacttttcacgtccatttgatagagcttaaagccatggtaagtagcataggccaataatatgcgaattgactcaagcctagctacgggtgcataggtttcaccgaaatccaaaccttcgacttgggagtatcctttggccacaagtcgagctttgttccttgtcaccacaccatgctcgttttgcttgttgcggaagacccatttggttcctacaacattttggttaggacgtggaactaaatgccatacctcgttccttgtgaaattgttgagctcctcttgcattgccaccacccaatccaaatcttgaagtgcttcctctatcctgtgtggctcaatagaggaaacaaaagagtaatgttcacaaaaatgtgcaacacgagatcgagtggttacccccttatgaatgtcgccgaggatggtgtcgacggggtgatctcgttggattgcttggtggactcttgggtgtggcggccttggttcttcctcatcctccttttcttgatcaattgcatctcccccttgatcattgccatcatcttgaggtggctcatcttctttattttgcccttcatcaacttgagcttcatcctcattttgagttggtggagatgcttgcatggaggaggacggttggtcttgtgcatttggaggctctttggattccctaggacacacatccccaatggacatgttccttagcgctatgcatggagcctgttcttcacctatctcatcaagatcaacttgctctacttgagagccgttagtttcatcaaacacaacgtcacatgagacttcaactagtccagtggacttgttaaagacccgatatgcccttgtgtttgagtcataaccaagtaaaaagccttctacagttttaggagcaaatttagattttctacctcttttaacaagaataaagcatttgctaccaaaaactctaaaatatgaaatgttgggctttttaccggttaggagttcatatgatgtcttcttgaggattcggtgaagatataaccggttgatggcgtagcaggcggtgttgactgcttcggcccaaaaccggtccggtgtcttgtactcatcaagtatggttcttgccatgtccaatagagttcgattcttcctctccactacaccgttttgttgtggtgtgtagggagaagagaactcatgcttgatgccctcctcctcaaggaagctttcaatttgagagttcttgaactccgtcccgttgtcgcttcttattttcttgatccttaagccgaactcattttgagcccgtctcaagaacccctttaaagtctcttgggtttgagatttttccaagtatagctgaccctctaacactcccttaaaagctattgaatcatcacttcttctaaagacagtgacaccttgatttccatccccgaatgtgatagctcgttggggatcttggtttttctcatatgaggagaacatccttttctcccctgtcatgtggtttgtgcacccgctgtcgagtatccaacttgagcccccggatgcataaacccaaatggttttgggtcctttggcattagacacaagaactttgggtacccaaacacaagtccttgaccccttgtgcttgctcccaacatatttggcaactactttgccggatttgttagtcaacacataagaagcatcaaaagttttaaatgaaatggcatgatcatttgatgcattaggagttttctttctaggcaacttggcacgggttggttgcctagagctagatgtctcacccctatacataaaagcatgattagagccagagtgagacttcctagagtgaattctcctaattttgctctcgggataaccgacagggtacaaaatgtaaccctcgttatcctgaggcatgggagccttgcccttaacaaagttagataagttctttggaggggcattaagtttgacattgtctcccctttggaagccaatgccatccttgatgccagggcgtctcccattataaagcatgctacgagcaaatttaaatttctcattctctaggttgtgctcggcaattttagcatctaattttgctatatgatcattttgttgtttaattaaagccatatgatcaagaatagcattaacatcaacatctctacatctagtgcaaatagaaacatgctcaacattagatgtagagggtttgcaagatttaagttctacaaccttagcatgcaacatttcattcttagttctaaggtcggaaatagtagtgttgcaaacatcaaaatctctagccttagcaattaaattttcattctctaatctaaggctagcaagagatacattcaattcatcaatcttagcaagcaagtcaatattatcatctctaagattgggaattgaaacattacaaacatgtgaatcaaccttagcatttaaaatagcattttcatttctaaggttgtcaatcatctcacggcatgtgcttagctcactagacaatttttcacatttttctacttctagagcataagcctttttaaccttaacatgtttcttgttttctttaattagacaatcctcttgggagtccaaaaggtcatccttttcatgaatagcactaatcaattcatttagtttttctttttgctccatgttaagattggcaaagagaatacgcaaattatcctcctcatcactagcattatcatcactagacgattcatatttagtggaggagttggatttaaccttcttcttcttgccgtcctttgccatgaggcacttgtggccgacgtttgggaagagaagtcccttggtgacggcgatgttggcggcgtcctcgtcgtcggaggagtcgcttgagctctcgtcggagtcccactcgcgacaaacatgggcatcgccgcccttcttcctgtagtacctcttcttctcctttcttctccccttcttgtcgtcgcctcggtcactgtcactagacataggacatttagcaataaaatgaccgggcttaccacatttgtagcaaaccttcttggagcgggacttgtagtctttccccctcctttgtttgaggatttggcggaagctcttgatgacgagcgccatctcctcattgtcaagcttggaggcgtctattggttgtcgacttggtgtagactcctccttcttttcttccgtcgccttgaatgcaacgggttgagcttcggatgggtcgccaagctcgttgattttcctcgagccttctatcatgcactcaaaacttacaaaatgcccgataacttcctcgggggtcattttagtatatctaggattaccacgaatcaattgaacttgagtgggatttagaaaaatgagagatcttaaaataacatttaccacttcatggtcgtcccacttcttgctcctgaggttgcgcacttggtttaccaaagtcttgagccggttgtacatgtgttgtggctcctcccctttgtgaagccggaaccgaccgagctccccctcgatcgtttcctgcttggtgatcttggtgagctcatctccctcgtgcgcggttttgagtacatcccaaacctccttggcgttcttcaacccttgtactttgttatattcctctttacttagtgaggcgaggagaattgttgtggcttgtgagttgaagtgctcgatttgggctacctcatcctcatcatagttctcatcccctacggatggtacctgcgcaccaaactcaacaacatcccatatgcttttgtggagcgagattagatgaaatcgcattaaatcgctccacctagcgtaatcttcaccatcaaaagttggtggtttgcctagtgggacggaaagtaaaggtgtatgtttggaaatgcgagggtagcgtagggggatcttactatacttcttgcgctcttggcgcttagaagtgacggagggcgcatcggagtcggaggtcgatgttgatgaagtgtcggtctcgtagtagaccaccttcctcatccttttgtgcttgtcgcctttccgatgcggcttgtgggaagaagatttttccttcttctctttgtggtgagaagaagatttcttctccttccctttgttggaggagctcttcttcttctccctccttttggtgcgggactcttccgatgaagtgcttttgtggcttgtagtgggcttttcgccggtctccatctccttcttggcgtgatctcccgacat

SEQ ID NO: 4593 - DNA, 4578 bp, Zea mays
  Clone ID: TF_ZM3612.C9.o1.fg
atgaggaaggtggtctactacgagaccgacacttcatcaacatccatctccgactccgatgcgccgtccgtaacttctaagcgccaagagcgcaagaagtttagtaagatccccttacactattctcgtacacctagacatactccattactttccgttccattaggcaaaccgccaacttttgatggcgaagattatgctaggtggagtgatttaatgaaatttcatctaacctcactccacaaaagtatatggaatgttgttgagtttggagcacaggtaccatccataggggatgaggattatgacacggacgaagtggcccaaatcgagcacttcaactcccaagccacaaccatactcctcgcctctttaagcaaggaggaatacaacaaagtgcaagggttgaagaatgcaaaggagatttgggacctactcaagactgcgcacgagggtgatgaactcaccaagatcaccaagcgggaaacgatcgagggggagctcggtcgcttccgtcttcgccaaggggaggagccacaagatatgtacaaccggctcaaaaccttggtgaaccaagtgcgcaacctcgagagcaaaaagtgggacgaccacgaggtggttaaggttattctaagagctctcattttccttaaccccactcaagttcaattaattcgtggtaatcctagatacccactaatgacccccgaggaagttatcgggaattttgtgagctttgaatgtatgattaaaggatcaaagaagatcaacgagcttgacgaaccctccacgtccgaggcgcaaccggtggccttcaaggcgacggaggagaagaaggaggagtctacaccaagtagacaaccaattgacgcctccaagctcgacaatgaggagatggctttaatcatcaaaagctttcgccaaatcctcaagcaacggagggggaaggactacaaaccccgctccaagaaagtgtgctacaaatgtggtaagcccggtcattttattgcaaaatgtcctatgtctagtgacagtgacaggggcgacgacaagaagggaaagaggaaagaaaagaagaagtactacaagaagaagggcggcgatgcccatgtttgccgggagtgggactccgacgagagctccaccgactcctcctccgacgacgaggacgccgccaacatcgccatcaccaagggactcctcttccccaatgtcggccacaagtgcctcatggcaaaggacggcaaaaagaagaaggttaaatctaactcctccactaaatatgaatcttctagtgatgataatgctagtggtgaggaagataatttgcgtaccctttttgccgaacttaacatggaacaaaaggaaaaattaaatgagctaattagtgccatccatgaaaaggatgatctcttggactcccaagaggacttcctaatcaaggaaaataagaaacatgttaaggttaaaaatgcttatgctcttgaggtagaaaaatgtgaaaaattgtctagtgagctaagcacttgccatgagaccattaacaaccttaggaatgaaaatgctaaattaattgctaagattgattctcatgtttgtattgattctcatcctagaaatgataatgttgaattacttgctaggattgatgaattaaatgattctcttactagccttagaatagaaaatgaaaatttgattgctaaggctaaagattttgatatttgcaatactactatttccgaccttagaactaagaatgatatgttgcatgctaaggttgtagaactaaaatcttgcaaaccctctacatctaatgttgagcatgtttctatttgtactagatgtagagatattgatgttaatgctattcatgatcacatgtccttaattaaacaacaaaatgatcatatagcaaaactagatgctaaaattgccgagcataacttgaaaaatgaaaagtttaaatttgctagaagtatgctctataatgggagacgcccgggcatcaaggatggcattggcttccaaaggagagacaatgtcaaacttaatgccccttcaaagaatttatccaactttgttaagggcaaggctcccatgcctcaggataacgagggttacattttgtaccctgccagctatcctgagaacaaaattaggaggactcattctaggaagtctcactctggccctaaccatgcttttatgtataagggtgagacatctagctctaggcaaccaacccgtgccaagttgcctagaaagaaaactcctaatgcatcaaatgatcatgctatttcattcaaaacttttgatgcatcatatgtgcttactaacaaatccggtaaggtttatgcatccgggggctcaagttggatactcgacagcgggtgcacaaaccacatgacaggggagaaaaagatgttctcctcatatgagaaaaaccaagatccccaacgagctatcacattcggggatggaaatcaaggtgttactgtctttagaagaagtgacgattcaatagcatttaggggagtgttagagggtcagctatacttggacaaatctcatacccaagagaccttaaagggattcttgagacgggctcaaaatgagtttggcttaaggatcaagaaaattagaagcgacaatgggacggagttcaagaactctcaaattgaaggcttccttgaggaggagggcatcaagcatgagttctcttctccctacactccccaacaaaatggtgtagtggagaggaagaatcgaactctattggacatggcaagaaccatgcttgatgagtacaagacaccggatcagttttgggccgaggcggtcaacaccgcctgctacgccatcaaccagttatatcttcaccgaatcctcaagaagacatcctatgaactcctaaccggtaaaaagcccaatatttcatattttagagtttttggtagcaaatgctttattcttgttaagagaggtagaaaatcaaaatttgctcctaaatctgtagaaggctttttactaggatatgactcaaacacaagggcatatagagtctttaacaagtcctcaggactagttgaagtttcttgtgacgttgtgtttgatgaaactaatggctctcaagtagagcaagttgatcttgatgagataggtgaagaacaggctccgtgcatcgcgctaaggaacatgtccattagggatgtgtgtcctaaggaactcgaagagcctccacatacacaagatcaaccatcctcctccatgcaagcgtctccgccaacccaaaatgaggacgaggctcaagttgatgaaggagaagaccaaagagatgagccccctcaagatgacggcaacgatcaagggggagatgcaaatgatcaagacaaggaggatgaacaaccaaggccgccacacccaagagtccaccaagcaatccaacgagatcaccccatcgacaccatcctcggcgacattcataaggggggtagaggaagcactacaagattcggattgggtgatggcgatgcaagaggagctcaacaatttcacaaggaacgaggaaccaagtgggtcttccgcaacaaacaagacgagcatggtgtggtgacaaggaacaaagctcgactcgtggccatggggtattcacaagtcgaaggtttggattttggtgaaacctatgcacccgtagctaggcttgagtctattcgcatattattagcctatgctacttaccatggcttcaagctttatcaaatggacgtgaagagtgccttcctcaatggaccaatcaaggaggaggtctatgttgagcaacctcccggctttgaagatagtgagtaccctaaccatgtctataggctctctaaggcgctttatgggctcaagcaagccccaagagcatggtatgaatgccttagagattttcttattgctaatggcttcaaagtcggcaaagccgatcctactttattcactaagactcttgacaatgatttgtttgtatgccaaatttatgttgatgatatcatatttgggtctactaacgaatctacatgtgaagaatttagtaggatcatgacacaaaaattcgagatgtcgatgatgggggagttgaagtatttcctaggatttcaagtcaagcaactccaagagggcaccttcatttgtcaaacgaagtacactcaagacattctaaccaagtttggaatgaagaatgccaagcccatcatgacacccatgggaaccaatgggcatctcgacctcgacacgggaggtgcaaaaggttcacacttagccaataaaagaccgagtattgagttcaacaaaagggcaaaggagcaaccaaaggctcctctggtctggcgcaccggactgtccggtgtgccaccggacagtgtccggtgcaccagaggacttcagctcaaactcttcgccctcgggaatatccagagtcagcgcgccagtgtacaccggacagtgtccggtgctccgaagaaagacgcggctcaggaactcgccagtctcgggttttcactccagccgctccgctataattcaccgaactatccg

SEQ ID NO: 4594 - DNA, 5409 bp, Zea mays
  Clone ID: TF_ZM3649.C7.o1.fg
atgtcgggagatcacgccaagaaggagatggagaccggcgaaaagcccactacaagccacgagagcacttcatcggaagagtcccgcaccaaacggagggagaagaagaagagctcctccaacaaagggaaggagaagaaatcttcttctcaccacaaagagaagaaggaaaaatcttcttcccacaagccgcatcggaaaggcgacaagcacaagaggatgaggaaggtggtctactacgagaccgacacttcatcaacatcgacctccgactccgatgcgccctccgtcacttctaagcgccaagagcgcaagaagtatagtaagatccccctacgctaccctcgcatttccaaacatacacctttactttccgtcccgttaggcaaaccaccaacttttgatggtgaagattacgctaggtggagcgatttaatgcagtttcatctaatctcgctccacaaaggtatatgggatgttgttgagtttggtgtacaggtaccgtcgataggggatgagaactatgatgaggatgaggtagcccaaatcgagcacttcaactcacaagccacaacaattctcctcgcctcactaagtaaagaggaatataacaaagtacaagggttgaagaacgccaaggagatttgggatgtactcaaaaccgcgcacgagggagacgagctcaccaagatcaccaagcgggaaacgatcgagggggagctcggtcgattccggcttcacaaaggggaggagccacaacacatgtacaaccggctcaagactttggtaaaccaagtgcgcaacctcgggagcaagaagtgggacgaccacgaagtggtaaatgtaattttaagatctctcatttttcttaatcccactcaagttcaattgattcgtggcaatcctagatatactaaaatgacccccgaggaagttatcgggcattttgtaagttttgagtgcatgatagaaggctcgaggaaaatcaacgagcttggcgaaccatccgaagctcaaccagttgcattcaaggcgacggaagaaaagaaggaggagtctacaccaagtcgacaaccaatagacgcctccaagcttgacaatgaggagatggcgctcgtcatcaagagcttccgccaaatcctcaaacaaaggagggggaaagactacaaatcccgctccaagaaggtttgctacaaatgtggtaagcccggtcattttattgctaaatgtcctatgtctagtgacagtgaccgaggcgacgacaagaaggggagaagaaaggagaagaagaggtactacaggaagaagggcggcgatgcccatgtttgtcgggagtgggactccgacgagagctcaagcgactcctccgacgacgaggacgccgccaacatcgccgtcaccaagggacttctcttccccaacgtcggccacaagtgcctcatggcaaaggacggcaaaaagaagaaggttaaatccatctcctccactaaatatgaatcgtctagtgatgataatgctagtgatgaggaggataatttgcgtattctctttgccaatcttaacatggagcaaaaagaaaaactaaatgaattgattagtgctattcatgaaaaggatgaccttttggactcccaagaggattgtctaattaaagaaaacaagaaacatgttaaggttaaaaaggcttatgctctagaagtagaaaaatgtgaaaaattatctagtgagctaagcacatgccgtgagatgatagacaaccttagaaatgaaaatgctattttaaatgctaaggttgattcacatgtttgtaatgtttcaattcccaatcttagagatgataatattgacttgcttgctaagattgatgaattgaatgtatctcttgctagccttagattagaaaatgaaaatttgattgctaaggctaaggattttgatgtttgcaaagttacaattgccgatcttagagataaaaatgacatacttcatgctaagatcgttgaacttaattcttgcaaaccctctacatctaccattgagcatgtcactatttgtgctagatgtagagatattgatattaatgctattcatgatcacatgtcgttaattaaacaacaaaatgatcacatagctaaattagatgctaaaattgccgagcataatttagaaaatgaaaaatttaaatttgctagaagtatgctctataatgggagacgccctggcatcaaggatggcattggcttccaaaggggagacaatgtcaaacttaatgctcctcctaagaacttgtctaactttgttaagggcaaagctcccatgcctcaggataacgagggctacattttgtaccctgccggttatcccgagagcaaaattaggaaaattcattctaggaagtctcactctggccctaattatgcttatatgtataagggtgagacatctagttctaggcaaccaacccatgccaagttgcctaagaagaaaattcctaatgcatcaaatgaacatagcatttcatttaaaacttttgatgcttcttatgtgcttactaacaaatccggcaaggtcgttgccaagtttgttgggaacaaacacaagggctccaagacttgtgtttgggtacccaaagttcttgtatctaatgccaaaggacccaaaacagtttgggtttatgcatccgggggctcaagttggatactcgacagcgggtgcacaaaccacatgaccggggagaaaaggatgttctcctcatatgagaaaaaccaagatccccaacgagctatcacattcggggatggaaatcaaggtgtcactgtctttagaagaagtgatgattcaatagcatttaagggagtgttagagggtcagctatacttggaaaaatctcaaacccaagagaccttaaagggattcttgagatgggctcaaaatgagttcggcttgaggatcaagaaaattagaagcgataacgggacagagttcaagaactcacaaattgaaggctttcttgaggaggagggcatcaagcatgagttctcctctccctacacgccacaacaaaatggtgtagtggaaaggaagaatcgaactctattggacatggcaagaaccatgcttgatgagtacaagacaccggaccggttttgggccgaagcggtcaacaccgcctgctacgccatcaaccggttatatcttcatcgaatcctcaagaagacatcatatgaactcctaattggtaaaaagcccaacatttcatactttagagtttttggtagcaaatgctttattcttgttaaaagaggtagaaaatctaaatttgctcctaaaactgtagaaggctttttacttggttatgactcaaacacaagggcatatagggtctttaacaagtccactggactagttgaagtctcatgtgacgttgtgtttgatgaaactaacggctctcaagtagagcaagttgatcttgatgagataggtaatgaagaggctccacgcatcgcgctaaggaacatgtccattggggatgtgtgtcctaaggaatccgaagagcctccaaatgcacaagatcaaccatcctcctccatgcaagcatctccaccaactcaaaatgaggatgaagctcaagttgatgaagggcaaaatcaagaagatgagccacctcaagatgatagcaatgatcaagggggagatgaaattgatcaagaaaaggaggatgaggaagaaccaagaccgccacacccaagagtccaccaagcaatccaacgagatcaccccgtcgacaccatcctcggcgacattcataagggggtaaccactcgatctcgtgttgctcatttttgtgaacattactcttttgtttcctctattgagccacacaggatagaggaagcacttaaagattcggattgggtggtggcgatgcaagaggagctcaacaatttcacgaggaatgaggtatggcatttagttccacgtcctaaccaaaatgttgtaggaaccaaatgggtcttccgcaacaagcaagatgagcatggtgtggtgacaaggaacaaagcacgacttgtggccaagggatattcccaagtcgaaggtttggatttcggtgaaacctatgcacccgtagctaggcttgagtcaattcgcatattattagcctatgctacttaccatggctttaagctttatcaaatggacgtgaaaagtgctttcctcaacggaccaatcaaggaagaggtctatgttgagcaacctcccggctttgaagacagtgagtatcctaaccatgtttataggctctctaaggcgctttatgggctcaagcaagccccaagagcatggtatgaatgccttagagatttccttattgctaatggcttcaaagtcggaaaagccgatcctacattctttactaaaactcttgaaaatgacttgtttgtatgccaaatttatgttgatgatattatatttgggtctactaacgagtctacatgtgaagagtttagtaggatcatgacacagaaattcgagatgtcaatgatgggggagttgaagtattttctaggattccaagtcaagcaactccaagagggcaccttcattagccaaacgaagtacactcaagacattcttgctaagtttgggatgaaggatgccaaacccatcaagacacccatgggaactaatgggcatctcgacctcgacacgggaggtaagtccgtggatcaaaaggtataccggtcgatgattggttcactgctttatttatgtgcatctcgaccggacattatgctttccgtttgcatgtgtgcaagattccaatccgaccctaaggaatcacaccttacagccgtaaaacgaatcttgagatatttggcttatacacctaagtttgggctttggtaccctcggggatccacatttgatttgattggttattcggatgccgattgggcggggtgtaaaatcaataggaagagcacatcggggacttgccagttcttgggaagatccttggtgtcttgggcttcaaagaagcaaaattcggtcgctctttccaccgccgaagccgagtacattgccgcaggtcattgttgcgcgcaattgctttggatgaggcaaaccctgcgggactacggttacaaattaaccaaagtccctttgctatgtgataatgagagtgcaatcaaaatggccgacaatcccgtcgagcatagccgcactaagcacatagccattcggtatcattttcttagggatcaccaacaaaagggggatatcgagatttcttacattaatactaaagatcaattagccgatatctttaccaagccacttgatgaacaatcttttaccagacttaggcatgagctcaatattcttgattctagaaatttcttttgctag

SEQ ID NO: 4595 - DNA, 5772 bp, Zea mays
  Clone ID: TF_ZM4633.C8.o1.fg
atgtcgggagatcacgccaagaaggagatggagaccggcgaaaagcccactacaagccacgggagcacttcatcggaagagtcccgcaccaaaaggagggagaagaagaagagctcctccaacaaagggaaggagaagaaatcttcttctcatcacaaagagaagaaggaaaaatcttcttcccacaagccgcatcggaaaggcgacaagcacaagaggatgaggaaggtggtctactacgagaccgacacttcatcaacatcgacctccgactccgatgcgccctccgtcacttctaagcgccaagagcgcaagaagtatagtaagatccccctacgttaccctcgcatttccaaacatacacctttactttccgtcccattaggcaaaccaccaacatttgatggtgaagattacgctaggtggagcgatttaatgcgatttcatctaacctcgctccacaaaagcatatgggatgttgttgagtttggcgcgcaggtaccatccgtaggggatgaggactatgatgaggatgaagtggcccaaatcgagcacttcaactctcaagcaacaacaatactcctcgcctctctaagtagagaggagtataacaaagtacaagggttaaagagcgccaaggagatttgggatgtactcaaaaccgcgcacgagggagacgagctcaccaagatcaccaagcgggaaacgatcgagggggagctcgatcggttccggcttaacaaaggggaggagccacaacacatgtacaaccggctcaagactttggtaaaccaagtgcgcaacctcgggagcaagaagtgggacgaccacgaagtggtaaatgttattttaagatctctcatttttctaaatcccactcaagttcaattgattcgtggtaatcctagatatactaaaatgacccccgaggaagttatcgggcattttgtaagttttgagtgcatgatagaaggctcgaggaaaatcaacgagcttggcgagccatccgaagctcaacccgttgcattcaaggcgacggaagaaaagaaggaggagtctacaccaagccgacaaccaatagacgcctccaagcttgacaatgaggagatggcgctcgtcatcaagagcttccgccaaatcctcaaacaaaggagggggaaagactacaagtcccgctccaagaaggtttgctacaaatgtggtaagcccggtcattttattgctaaatgtcccatgtctagtgacagtgaccgaggcgacgacaagaaggggagaagaaaggagaagaaaaggtactacaagaggaagggcggcgatgcccatgtttgtcgggaatgggattccgacgaaagctcaagcgactcctccgacgacgaggacgccgccaacatcgccgtcaccaagggactcctcttccccaacgtcggccacaagtgcctcatggcaaaggacggcaaacggaaaaaggttaaatctaactcctccactaaatatgaatcttctagtgatgaaaatgctagtgatgaggaggataatttgcgtattctctttgccaatcttaacatggagcaaaaagaaaaactaaatgaattgattagtgctattcatgaaaaggatgaccttttggactcccaagaggattgtctaattaaagaaaacaagaaacatgttaaggttaaaaaggcttatgctctagaagtagaaaaatgtgaaaaattatctagtgagctaagcacttgccgtgaaataattgacaaccttaggaatgaaaatgctattttaaatgctaaggttgattctcatgtttgtgatgtttcaatttccactcctagagataataatgatgatttgcttgctaggattgaagaattgaacatttctcttgctagccttagagtagaaaatgaaaagttgattactaaggctaaagaactagatgtttgcaatgttacaatttctgaccttagaactaaaaatgatatgttgcatactaaggttgtagaattaaaatcttgcaaaccctctacatctattgttgagcatgtatctatttgtactagatgtagaaatgttgatattgatgctattcatgatcacatgattttaattaagcaacaaaatgatcatatagctaaactagatgctaaaattgccgagcacaacttagaaaatgagaaatttaaatttgctcgtagcatgctttataatgggagacgccctggcatcaaggatggcattggcttccaaaggggagacaatgtcaaacttaatgcccctcctaagaacttgtctaactttgttaagggcaaggctcccatgcctcaggataacgagggttacattttgtaccctgccggttatcccgagagtaaaattaggagaattcactctaggaagtctcactctggccctaaccatgcttttatgtataagggtgagacatctagctctaggcaaccaacccatgccaagttgcctagaaagaaaactcctagtgcatcaaatgatcatactatttcatttaaaacttttgatgcttcttatgttttgacaaacaaatccggcaaggtcgttgccaagtttgttgggggcaagcacaagggatcaaagacttgtgtttgggtacccaaagttcttgtttctaatgccaaaggacccaaaacagtttgggtttatgcatccgggggctcaagttggatactcgacagcgggtgcacaaaccacatgaccggggagaaaaggatgttctcctcatatgagaaaaaccaagatccccaacgagctatcacattcggggatggaaatcaaggtgtcactgtctttagaagaagtgatgattcaatagcatttaagggtgtgttagagggtcagctatacttagtggattttgatagagctgaactcgacacatgcttaattgctaagactaacatgggttggctctggcaccgccgactagcccatgttggaatgaagaatcttcacaagcttctaaagggagagcacattttaggattaacaaatgttcattttgagaaagacaggatttgtagcgcatgccaggcggggaagcaagttggagtccatcacccacacaagaacatcatgacgaccgacaggccgcttgagctactccacatggatctattcggcccgattgcttacataagcatcggcgggagtaagtattgtcttgttattgtggatgattattctcgcttcacttgggtattctttttacaggaaaaatctcaaacccaagagaccttaaagggattcttgagacgagctcaaaatgagttcggcttaaggatcaagaaaataagaagcgacaacgggacggagttcaagaactctcaaattgaaggcttccttgaggaggagggcatcaagcatgagttctcctctccctacacgccacaacaaaatggtgtagtggagaggaagaatcgaactctattggacatggcaagaaccatgcttgatgagtacaagacaccggaccggttttgggccgaagcggtcaacaccgcctgctacgccatcaaccggttatatcttcaccgaatcctcaagaagacatcctatgaactcctaaccggtaaaaagcccaacatttcatattttagagtttttggtagcaaatgttttattcttgttaaaagaggaagaaaatctaaatttgctcctaaaactgtagaaggctttttacttggttataactcaaacacaagggcatatagggtctttaacaagtccactggactagttgaggtctcatgtgacgttgtgtttgatgaaactaacggctctcaagtagagcaagttgatcttaatgagataggtgaagaacaggctccatgcatcgcgctaaggaacatgtccatcggggatgtgtgtcctaaggaatccgaagagcctccaagtacacaagatcaaccatcctcctccatgcaagcatctccaccaactcaaaatgaggatgaggctcaaaatgatgaagagcaaaatcaagaagacgagccacctcaagatgatagcaatgatcaagggggagatacaaatgatcaagaaaaggaggatgaggaagaaccaagaccgccacacccaagagtccaccaagcaatccaacgagatcaccccgtcgacaccatcctcggcgacattcataagggggtaactactcgatctcgggttgctcatttttgtgaacattactcttttgtttcctctattgagccacacagggtagaggaagctctccaagattcggattgggtggtggcgatgcaagaggagctcaacaatttcacgaggaatgaggtctggcatttagttccacgtcctaaccaaaatgttgtaggaaccaaatgggtcttccgcaacaagcaagatgagcatggtgtggtgacaaggaacaaagctcgactcgtggccaaagggtattcacaagtcgaaggtttggattttggtgaaacctatgcacccgtagctaggcttgagtcaattcgcatattactggcctatgctacttaccatggctttaagctctatcaaatggacgtgaaaagtgccttcctcaacggaccaatcaaggaagaggtctatgttgagcaacctcccggctttgaagacagtgagtaccctaaccatgtctataggctctctaaggcgctttatgggctcaagcaagccccaagagcatggtatgaatgcctaagagatttccttattgctaatggcttcaaagttggcaaggtcgatcctacactctttactaaaactcttgagaatgacttgtttgtatgccaaatttatgttgatgatattatatttgggtctactaacgagtctacatgtgaagagtttagtaggatcatgacacagaaattcgagatgtcgatgatgggggagttgaagtattttctaggattccaagtcaagcaactccaagagggcaccttcatttgccaaacgaagtacactcaagacattctaaccaagtttgggatgaaggatgccaaacccatcaagacacccatgggaactaatgggcatctcgacctcgacacgggaggtaagtccgtggatcaaaaggtataccggtcgatgattggttcattgctttatttatgtgcatctcgaccggacattatgctttccgtttgcatgtgtgcaagattccaatccgaccctaaggaatcacaccttacggccgtaaaacgaattttgagatatttggcttatacacctaagtttgggctttggtaccctcggggatccacatttgatttgattggttattcggatgccgattgggcggggtgcaaaattaataggaagagcacatcagggacttgccagttcttgggaagatccttggtgtcttgggcttcaaagaagcaaaattcggtcgctctttccaccgccgaagccgagtacattgccgcaggacattgttgcgcgcaattgctttggatgaggcaaaccctgcgggactacggttacaaattaaccaaagtccctttgctatgtgataatgagagtgcaatcaaaatggccgacaatcccgtcgagcatagccgcactaagcacatagccattcggtatcattttcttagggatcaccaacaaaagggggatatcgagatttcttacattaatactaaagatcaattagccgatatctttaccaagccacttgatgaacaatcttttaccagacttaggcatgagctcaatattcttgattctagaaatttcttttgctag

SEQ ID NO: 4596 - DNA, 1041 bp, Zea mays
  Clone ID: TF_ZM4643.C4.o1.fg
atggatcctaagggaaaggggatggtggtcaacgacaaggagaaggagtccttcttcaacgagcctagagatgacaagcccactaactctggctcaagtcacaagaagaaggacgggaagaagaaaaggcgcatcaagaagatcgtctactacgacagcgacgaatcttcctcttcaccaagagacgacgacgacgagaaaaagaaaccgcaaattcataagaatgcacaagctaccactgttttgctagcttcgttgtgcagggatgaatacaacaaggtgagcggcttggacaacgccaagcaaatttgggataccctcaagatctctcatgagggtaatgatgccaccatgatcaccaagatggagttggtggaaggcgagctgggaaggttcgcaatgatcaggggagaagagccaacacaaacatacaataggctcaagaccctggtcaacaagattaggagttatgggagcacaagatggatggaccacgacgtcgtccgacttatgctaaggtacaccaagatgacgctcgaagagattcttggaaagtttgtgagcgggcgcatgatggtgaaggaggcccgatatgtggacgacgctctaaatggtccactccccgtccacgagcctcaaactattgccctcaaggcaaccagcagcagggagatgctaccaagcaaggtggcacaagttgaggcgaccgggctaaacgaagatgagatggctctcatcatcaagcgtttcaagaccgcattaaagggacgcaacgagtaccccaacaagaataaagaaaagggaaagcgctcctgcttcaaatgtggtaagataggtcattttattgctcaatgtcccgataatgaaaatgaccagggggaagaaagacatgggaagaaggagaagaagaaaagctataggaaggctaaaggcgaggcacatcttggcaaggaatgggactcggactgctcgtcatccgactccgatgatgaaggattggcagcctcggccttcaacaaatcttctctcttccccaactaa

SEQ ID NO: 4597 - DNA, 5670 bp, Zea mays
  Clone ID: TF_ZM4672.C3.o1.fg
atgtcgggagatcacgccaagaaggagatggagaccggcgaaaagcccactacaagccacgggagcacttcatcggaagagtcccgcaccaaaaggagggagaagaagaagagctcctccaacaaagggaaggagaagaaatcttcttctcatcacaaagagaagaaggaaaaatcttcttcccacaagccgcatcggaaaggcgacaagcacaagaggatgaggaaggtggtctactacgagaccgacacttcatcaacatcgacctccgactccgatgcgccctccgtcacttctaagcgccaagagcgcaagaagtatagtaagatccccctacgctaccctcgcatttccaaacatacacctttactttccgtcccactaggcaaaccaccaacttttgatggtgaagattacgctaggtggagcgatttaatgcgatttcatctaatctcgctccacaaaagcatatgggatgttgttgagtttggtgcgcaggtaccatccgtaggggatgagaactatgatgaggatgagttagcccaaatcgagcacttcaactcacaagccacaacaattctcctcgcctcactaagtaaagaggaatataacaaagtacaagggttgaagaacgccaaggaggtttgggatgtactcaaaaccgcgcacgagggagatgagctcaccaagatcaccaagcgggaaacgatcgagggggagctcggtcggttccggcttaacaaaggggaggagccacaacacatgtacaaccggctcaagactttggtaaaccaagtgcgcaacctcgggagcaagaagtgggacgaccacgaagtggtaaatgttattttaagatctctcatttttctaaatctcactcaagttcaattgattcgtggtaatcctagatatactaaaatgacccccgaggaagttatcgggcattttgtaagttttgagtgcatgatagaaggctcgaggaaaatcaacgagcttggcgacccatccgaagctcaacccgttgcattcaaggcgacggaagaaaagaaggaggagtctacaccaattcgacaaccaatagacgcctccaagcttgacaatgaggagatggcgctcgtcatcaagagcttccgccaaatcctcaaacaaaggagggggaaagactacaagtcccgctccaagaaggtttgctacaaatgtggtaagcccggtcattttattgctaaatgtcctatgtctagtgacagtgaccgaggcgacgacaagaaggggagaagaaaggagaagaagaggtactacaggaagaagggcggcgatgcccatgtttgtcgcgagtgggactccaacgagagctcaagcgactcctccgacgacgaggacgccgccaacatcgccgtcaccaagggacttctcttccccaacgtcggccacaagtgcctcatggcaaaggacggcaaaaagaagaaggttaaatccaactcctccactaaatatgaatcgtctagtgatgataatgccagtgatgaggaggataatttgcgtattctctttgccaatcttaacatggagcaaaaagaaaaactaaatgaattgattagtgctattcatgaaaaggatgaccttttggactcccaagaggattgtctaattaaagaaaacaagaaacatgttaaggttaaaaaggcttatgctctagaagtagaaaaatgtgaaaaattgtctagtgagctaagcacttgccgtgagatgattgacaaccttagaaatgaaaatgctattttaaatgctaaggttgattcacatgtttgtaatgtttcaattcccaatcttagagatgataacattgacttgcttgctaagattgatgaattgaatgcatctcttgctaggcttagattagagaatgaaaatttaattgctaaggctaaagattttgatgtttgcaatgctactatttccgaccttagaactaagaatgaaatgttgcatgctaaggttgtagaacttaaatcttgcaaaccctctacatctaatgttgagcatgtttctatttgcactagatgtagagatattgatgttaatgctattcttgatcatatggctttaattaaacaacaaaatgatcatatagcaaaattagatgctaaaattgccgagcacaacctagaaaatgagaaatttaaatttgctcgtagcatgctttataatgggagacgccctggcattaaggatggcattggcttccaaaggggagacaatgtcaaacttaatgctcctccaaagaacttatctaactttgttaagggcaaggctcccatgcctcaggataacgagggttacattttgtaccctgccggctatcctgagagcaaaattagaaagattcattctaggaagtctcactctggccctaatcatgcttatatgtataagggtgagacatctagctctaggcaaccaacccatgctaagttgcctaagaagaaaattcctaatgcatcaaatgatcatgccatttcatttaaaacttttgatgcatcttatgtgcttactagcaaatccggcaaggtttatgcatccgggggctcaagttggatactcgacagcgggtgcacaaaccatatgactggggagaaaagaatgttctcctcatatgagaaaaaccaagatccccaacgagctatcacattcggggatggaaatcaaggtgtcactgtctttagaagaagtgatgattcaatagcatttaagggagtgttagagggtcagctatacttggtagattttgatagagctgaactcgacacttgcttaattgctaagactaacatgggttggttctggcatcgccgactagcccatgttgggatgaagaatcttcataagcttctaaagggagagcacattttaggattaacaaatgttcattttgagaaagacaggatttgtagcgcatgccaggcggggaagcaagttggagtccatcatccacacaagaacatcatgacgaccgacaggccgcttgagctactccacatggatctattcggcccgattgcctacataagcatcggcgagagtaagtattgtcttgtaatagtggatgattattctcgcttcacttgggtattctttttacaggaaaaatctcaaacccaagagactttaaagggattcttgagacgagctcaaaatgagttcggcttaaggatcaagaaaataagaagcgacaatgggacgaagttcaagaactctcaaattgaaggcttccttgaggaagagggcatcaagcatgagttctcttctccctacacacctcaacaaaatggtgtagtggagaggaagaatcgaactctattggacatggcaagaaccatgcttgatgagtacaagacaccggaccggttttgggtcgaagcagtcaacaccgcctgctacgccatcaaccggttatatcttcaccgaatcctcaagaagacatcctacgaactcctaaccggtaaaaagcccaacatttcatattttagagttttcggtagcaaatgctttattcttgttaaaagaggtagaaaatctaaatttgctcctaaaactgtagaaggttttttacttggttatgactcaaacacaagggcatatagggtctttaacaagtccactggactagttgaagtctcatgtgacgttgtgtttgatgaaactaacggctctcaagtagagcaagttgatcttgatgagataggtaatgaagaggctccatgcatcgcgctaaggaacatgtccattggggatgtgtgtcctaaggaatccgaagagcctccaaatgcacaagatcagccatcctcctccatgcaagcatctccaccaactcaaaatgaggaagaggctcaagttgatgaagggcaaaatcaggaagatgagccacctcaagatgatagcaatgatcaagggggagatgcaattgatcaagaaaaggaagatgaggacgaaccaaggccgccacacccaagagtccaccaagcaatccaacgagatcaccccgtcgacaccatcctcggcgatattcataagggggtaactactcgatctcgggttgctcatttttgtgaacattactcttttgtttcctctattgagccacacagggtagaggaagctctccaagattcggattgggtggtggcgatgcaagaggagctcaacaacttcactagaaatgaggtatggcatttagttccacgtcctaatcaaaatgttgtaggaaccaaatgggtcttccgcaacaagcaagatgagcatggtgtggtgacaaggaacaaagctcgacttgtggccaagggatactcccaagttgaaggtttggatttcggtgaaacctatgcacccgtagctaggcttgagtcaattcgcatattattagcctatgctacttaccatggctttaagctttatcaaatggacgtgaaaagtgccttcctaaatggaccgatcaaggaagaggtctatgttgagcaacctcccggctttgaagacagtaagtaccctaaccatgtttataggctctctaaggcgctttatgggctcaagcaagccccaagagcatggtatgaatgcctaagagatttccttattgctaatgacttcaaagtcggcaaggccgatcctacactctttactaaaactcttgaaaatgacttgtttgtatgccaaatttatgttgatgatattatatttgggtctactaacgagtctacatgtgaagagtttagtaggatcatgacacagaaattcgagatgtcgatgatgggggagttgaagtattttctaggattccaagtcaagcaactccaagagggcaccttcattagccaaacgaagtacactcaagacattctaaccaagtttgggatgaaggatgccaaacccatcaagacacccatgggaaccaatgggcatctcgacctcgacacgggaggtaagtccgtggatcaaaaggtataccggtcgatgattggttcattgctttatttatgtgcatctcgaccggacattatgctttccgtttgcatgtgtgcaagattccaatccgaccctaaggaatcccaccttacgaccgtaaaacgaatcttgagatatttggcttacacacctaagtttgggctttggtaccctcggggatccacatttgatttgattggttattcggatgccgattgggcggggtgcaaaattaataggaagagcacatcggggacttgccagttcttgggaagatccttggtgtcttgggcttcaaagaagcaaaattcggtcgctctttccaccgccgaagccgagtacattgccgcaggtcattgttgcgcgcaattgctatggatgaggcaaaccctgcgggactatggttacaaattaaccaaagtccctttgctatgtgataatgagagtgcaatcaaaatggccgacaatcccgtcgaacatagccgcactaagcacatagccattcggtatcattttcttagggatcaccaacaaaagggggatatcgagatttcttacattaatactaaagatcaattagccgatatttttaccaagccacttgatgaacaatcttttaccagacttaggcatgagctcaatattcttgattctagaaatttcttttgctag

SEQ ID NO: 4598 - DNA, 1815 bp, Zea mays
  Clone ID: TF_ZM4685.C2.o1.fg
atgtcgggaggatccgccaagagggagatggaaacagacacaagccgcgggaaggctccatcaagggagtccggcgccaaaggaagggaggactcacctccccacgtcaagtcgcaccggagtggcgataagaagaagaaaatgaagaaagtggtctactacaagaccgattcttcgtcgccctccacctccggctccaacgcaccgtctgtcacttctaagcgccatgagcacaagaagtttagggatgaggtgaccaagatcaccaagcaggagacgatcgagggggagcttggtcgattcgtcctcaaccaaggagaggagccacaagccatgtacaatcggctcaagaccttggtcaaccaagtgcgcaacctcgggagcacaaaatgggatgaccatgaaatggtcaaggaggttatagggaagtttgtgagctttgagttgatgatcaaaggctccaaacaaatcatcgagcaaggcggcacctccacaactgaggtgcaacccgtcgcattcaaagcgacggaagaaaagaaagaagagtctacatcaagtaggctccccatcgacgcctctaagctcgacaacgaggaaatggcgcccatcatcaagagcttccgccaaatcctcaagcaaaggagggggaaggattacataccccgctccaagaaagtgtgctacaaatgtggtaagcccggtcattttatcgctaaatgccctatgtcgagtgatagtgacagggacaacgacaagagggggaataagaagagatattacaagaaaaagggcggcgatgcccacatatgtcgagaatgggacttcgacgagagcaccaccggctcctcctccaacgaggacgccgccaacatcgccgtcaacaagggcctcctcttccccaacgacggccacaagtgcctcatggcaaaggacgacaaaaagaagaaggtaaaaactagagcctccactaaatatacaacatctagtgatgagggtagttctagtgaagatgaggatgatttgcttagtctttttgccaaccttaacatgcaacaaaaggaaaaactaaatgaattgataggtgccattcatgagaaggatgaactcttggatagccaagaggaattccttattaaggaaaataaaaaatatgttaagataaaggatgcttgtgctcaggaagtagaaaaaaatgaaaatttgactaaggagcttagcatttgccatgacaccatttccaaccttagaaatgagaacgctaaactagatgctaaaattgccgagcatgaactagagaatgaaaattttaaatttgctcgtagcatgctttataatgggagacgccctagcattaaggatggcattggtttccaacagggaagcaatgtcaagcttaatgcccctaagaaattgtcaaactttgtaaagggcaaggctcccatggctcgggataacgagggttacattttatatcctgctggttatcctgagcataagattaggagaattcattctaggaagtctcattctggttctcatcatgcttttatgtataagaatgagacatctagttctaaacattctacccatgttaaaatgcctaaaaagaaaactcatgctgcatcaaatgagccaattatttcatttcagacttttgatgcatcttatgtgctgactaacaaatcaggcaaagtagttgccaaatatgttggggccaaacacaagggatcaaagacttgtgtttgggtgcccaaggtgcttgtctctaacatcaaaggacccaagactatttgggtacctaagaacaaggtctaa

SEQ ID NO: 4599 - DNA, 1891 bp, Zea mays
  Clone ID: TF_ZM4878.C9.o1.fg
atgacccccgaggaagttatcgggcattttgtaagttttgagtgcatgatagaaggctcgaggaaaatcaacgagcttggcgacccatccgaagctcaacccgttgcattcaaggcgacggaagaaaagaaggaggagtctacaccaagtcgacaaccaatagacgcctccaagcttgacaatgaggagatggcgctcgtcatcaagagcttccgccaaatcctcaaacaaaggagggggaaagactacaagtcccgctccaagaaggtttgctacaaatgtggtaagcccggtcattttattgctaaatgtcctatgtctagtgacagtgaccgaggcgacgacaagaaggggagaagaaaggagaagaagaggtactacaggaagaagggcggcgatgcccatgtttgtcgcgagtgggactccgacgagagctcaagcgactcctccgacgacgaggacgccgccaacatcgccgtcaccaagggacttctcttcccaaacgtcggccacaagtgcctcatggcaaaggacggcaagaagaagaaggttaaatccaactcctccactaaatatgaatcgtctagtgatgataatgctagtgatgaggaggataatttgcgtattctctttgccaatcttaacatggagcaaaaagaaaaactaaatgaattgattagtgctattcatgaaaaggatgaccttttggactcccaagaggattgtctaattaaagaaaacaagaaacatgttaaggttaaaaaggcttatgctctagaagtagaaaaatgtgaaaaattgtctagtgagctaagcacatgccgtgagatgattgacaaccttagaaatgaaaatgctattttaaatgctaaggttgattcacatgtttgtaatgtttcaattcccaatcttagagatgataatattgacttgcttgctaagattgatgaattgaatgtatctcttgctagccttagattagagaatgaaaatttaattgctaaggctagagattttgatgtttgcaacactactatttccgaccttagaactaagaatgaaatgttgcatgctaaggttgtagaacttaaatcttgcaaaccctctacatctaatgttgagcatgtttctatttgcactagatgtagagatgttgatgttaatgctattcttgatcatatggctttaattaaacaacaaaatgatcatatagcaaaattagatgctaaaattgccgagcacaacctagagaatgagaaatttaaatttgctcgtagcatgctttataatgggagacgccctggcatcaaggatggcattggcttccaaaggggagacaatgtcaaacttaatgcccctccaaagaacttatctaactttgttaagggcaaggctcccatgcctcaggataacgagggttacattttgtaccctgtcggttatcccgagagcaaaattaggagaattcactctaggaagtctcactctggctctaatcatgcttttatgtataggggtgagacatctagctctaggcaaccaacccgtgccaagttgcctagaaagaaaactcctaatgcatcaaatgatcatgccatttcatttaaaacttttgatgcttcttatgtgttgactaacaaatccggcaaagtagttgccaaatatgttgggagcaagcacaaggggtcaaggacttgtgtttgggtacccaaagttcttgtgtctaatgccaaaggacccaaaaccatttgggtttatgcatccgggggctcaagttggatactcgacagcgggtgcacaaaccacatgacaggggagaaaaggatgttctcctcatatgagaaaaaccaagatccccaacgagctatcacattcggggatggaaatcaag

SEQ ID NO: 4600 - DNA, 5790 bp, Zea mays
  Clone ID: TF_ZM4944.C2.o1.fg
atgtcgggagatcacgccaagaaggagatggagaccggcgaaaagcccactacaagctacgggagcacttcatcggaagagtcccgcaccaaaaggagggagaagaagaagagctcctccaacaaagggaaggagaagaaatcttcttctcaccacaaagagaagaaggaaaaatcttcttcccacaagccgcatcggaaaggcgacaagcacaagaggatgaggaaggtggtctactacgagaccgacacttcatcaacttctacctccgactccgatgcgccctccgtcacttctaagcgccaagagcgcaagaagtatagtaagatccccctacgctaccctcgcattcctaaacacacacctttactttccgtcccattaggcaaaccaccaacttttaatggtgaagattatgctatgtggagtaatttgatgcgatttcatctaacctctctccacaaaagaatatgggatgttgttgagtatggtgtacaggtaccatcaataggggatgaggactatgacacggacgaagtggcccaaatcgagcacttcaactcccaagccgcaaccatcctccttgcctccctaagcaaggaggaatacaacaaagtacaaggattgaagaacgccaaggagatttgggacctactcaagacggcgcacgagggtgatgaactcaccaagatcaccaagcgggaaacgatcgagggggagctcggtcgcttccgtcttcgccaaggggaggagccacaagacatgtacaaccggctcaagaccttggtgaatcaagtgcgcaacctcgggagtacaaagtgggatgaccacgaagtggttaaggttattctaagagctcttattttccttaaccccacacaagttcaattaattcgtggtaatccaagatatccactaatgacccccgaggaagtcatcgggaattttgttagttttgaatgcatgattaagggctccaagaagatcaacgagcttgacgagccctccacatccgaggcgcaaccggtggcctttaaggcaacggaggagaagaaggaggagtctacaccaagtagacaaccaattgacgcctccaagctcgacaatgaggagatggccctaatcatcaaaagctttaggcaaatcctcaagcaacggaaggggaaggactacaaacctcgttccaagaaggtttgctacaagtgtggtaagcccggtcacttcattgcaaaatgtcctatgtctagtgacagtgacaggggcgacgacaagaagggaagaagaaaggagaagaagaaatactacaagaagaagggcggcgatgcccatgtttgtcgggagtgggactccgacgaaagctcaagcgactcctccgacgacgaggacgccgccaacatcgccgtcaccaagggtcttctcttccccaacgtcggccacaagtgtctcatggccaaggacggcaaaaagaaggtaaaatcaaggtcctccaccaaatatgaaacatctagtgatgaggatgatgataaaaatgaggaggataacttgcgcattctttttgctaaccttaacatggaacaaaaggaaaaattaaatgaactaattagtgccatccatgaaaaggatgatctcttggactcccaagaggacttcctaatcaaggagaataagaaacatgttaaggttaaaaatgcttacgctctacaagttgaaaaatgtgaaaaattgtctagtgagctaagcacttgccgtgagatgattgacaaccttagaaatgaaaatgctattttaaatgctaaggttgattcacatgtttgtaatgtttcaattcccaatcttaaaaatgataacgttgacttgcttgctaagattgatgaattgaatgcatctcttgctagccttagattagagaatgaaaatttaattgctaaggctaaaaattttgatgtttgcaatgctactatttccgaccttagaactaagaatgaaatgttgcatgctaaggttgtagaacttaaatcttgcaaaccctctacatctaatgttgagcatgtttctatttgcactagatgtagagatattaatattgaggctatccatgatcacctagccttaattaaaaaacaaaatgatcatatagctaaactagatgctaaaattgccgagcacaacttagaaaatgagaaatttaaatttgctcgtagcatgctttataatgggagacgccctggcatcaaggatggcattggcttccaaaggggagacaatgtcaaacttaatgcccctcctaagaacttgtctaactttgttaagggcaaagctcccatgcctcaggataacgagggttacattttataccctgcaggctatcctgagagcaaaattaggaagattcattctaggaagtctcactctggccctaaccatgctttcatgtataagggtgagacatctagtcctaggcaaccaacccgtgccaagttgcctaagaagaaaattcctaatgcatcaaatgatcatgccatttcatttaaaacttttgatgcatcttatgtgcttactagcaaatccggcaaagtagttgccaaatttgttgggggcaaacacaagggctccaagacttgtgtttgggtacccaaagttcttgtatctaatgccaaaggacccaaaacagtttgggtttatgcatccgggggctcaagttggatactcgacagcgggtgcacaaaccacatgaccggggagaaaaggatgttctcctcatatgagaaaaacaaagatccccaacgagctattacatttggggatggaaatcaagggttggtcaaaggtgtcactgtctttagaagaagtgatgattcaatagcatttaagggtgtgttagagggtcagctatacttagtagattttgatagagctgagctcgacacatgtttaattgctaagactaacatgggttggctctggcaccgccgactagcccatgttgggatgaagaatcttcataagcttctaaagggagagcacattttaggactaaccaatgttcattttgagaaagacaggatttgtagcgcatgccaagcagggaagcaagttggcactcatcatccacacaagaacataatgacgactgacaggccactggagctgctacacatggatctattcggcccgatcgcttacataagcatcggcgggagtaagtactgtctagttattgtggatgattattctcgcttcacttgggtattctttttacaggaaaaatctcaaacccaagagaccttaaagggattcttgagacgagctcaaaatgagttcggcttaaggatcaagaaaataagaagcgacaatgggacggagttcaaaaactctcaaattgaaagcttccttgaggaggagggcatcaagcatgagttctcttctccctacacgccacaacaaaacggtgtagtggagaggaagaatcgaactctattggacatggcaagaaccatgcttgatgagtacaagacaccggaccggttttgggccgaagcggtcaacaccgcctgctacgccatcaaccggttatatcttcaccgaatcctcaagaagacaccatatgaactcctaaccggtaaaaagcccaacatttcatattttagagtttttggtagcaaatgcttcattctcattaaaagaggtagaaaatctaaatttgctcctaaaactgtagaaggctttttacttggttatgattcaaacacaagggcatatagggtctttaacaagtccactggactagttgaagtctcttgtgacgttgtgtttgatgaaactaacggctctcaagtagagcaagttgatcttgatgagataggtgaagaacaggctccatgcatcgcactaaggaacatgtccatcggggatgtgtgtcctaaggaatccgaagagcctccaagtacacaagatcaaccatcctcctccatgcaagcatctccaccaactcaaaatgaggatgaggctcaaaatgatgaagagcaaaatcaagaagacgagccacctcaagatgatagcaatgatcaagggggagatacaaatgatcaagaaaaggaggatgaggaagaaccaagaccgccacacccaagagtccaccaagcaatccaacgagatcaccccgtcgacaccatcctcggcgacattcataagggggtaactactcgatctcgggttgctcatttttgtgaacattactcttttgtttcctctattgagccacacaggatagaggaagctctccaagattcggattgggtggtggcgatgcaagaggagctcaacaatttcacgaggaatgaggtatggcatttagttccacgtcctaaccaaaatgttgtaggaaccaaatgggtcttccgcaacaagcaagatgagcatggtgtggtgacaaggaacaaagctcgactcgtggccaaagggtattcacaagtcgaaggtttggattttggtgaaacctatgcacccgtagctaggcttgagtcaattcgcatattattggcctatgctacttaccatggctttaagctctatcaaatggacgtgaaaagtgccttcctcaacggaccaatcaaggaagaggtctatgttgagcaacctcccggctttgaagacagtgagtaccctaaccatgtctataggctctctaaggcgctttatgggctcaagcaagccccaagagcatggtatgaatgcctaagagatttccttattgctaatggcttcaaagttggcaaggccgatcctacactctttactaaaactcttgaaaatgacttgtttgtatgccaaatttatgttgatgatattatatttgggtctactaacgagtctacatgtgaagagtttagtaggatcatgacacagaaattcgagatgtcgatgatgggggagttgaagtattttctaggattccaagtcaagcaactccaagagggcaccttcattagccaaacgaagtacactcaagacattcttgctaagtttgggatgaaggatgccaaacccatcaagacacccatgggaaccaatgggcatctcgacctcgacacgggaggtaagtccgtggatcaaaaggtataccggtcgatgattggttcattgctttatttatgtgcatctcgaccggacattatgctttccgtttgcatgtgtgcaagatttcaagccgaccctaaggaatcacaccttacggccgtaaaacgaatcttgagatatttggcttatactcctaagtttgggctttggtaccctcggggatccacatttgatttaattggttattcggatgccgattgggcggggtgcaaaattaataggaagagcacatcagggacttgccagttcttgggaagatccttggtgtcttgggcttcaaagaagcaaaattcggtcgctctttccaccgccgaagccgagtacattgccgcaggacattgttgcgcgcaattgctttggatgaggcaaaccctgcgggactacggttacaaattaaccaaagtccctttgctatgtgataatgagagtgcaatcaaaatggccgacaatcccgtcgagcatagccgcactaagcatatagccattcggtatcattttcttagggatcaccaacaaaagggggatatcgagatttcttacattaatactaaagatcaattagccgatatctttaccaagccacttgatgaacaatcttttaccagacttaggcatgagctcaatattcttgattctagaaatttcttttgctaa

SEQ ID NO: 4601 - DNA, 5823 bp, Zea mays
  Clone ID: TF_ZM4954.C4.o1.fg
atgtcgggagatcacgccaagaaggagatggagaccggcgacaagcccactacaagccaagggagcacctcatcggaagagtcccgcaccaagaaaagggagaagaagaagaactcctccaaacggaaggagaaaagatcttcctcttctcaccacaaggagaagaaggaaaaatcttcttctcacaagccgcatcggagtggggacaagcacaagaggatgaggaaggtggtctactacgagaccgacacttcatcgacatctacctccggctccgacgcggcgtccgtcacttctaaacgccaagagcgtaagaagtatagtaagattcccctacgctatcctcgtgttcctaaacatacacctctactttccgtcccattaggtaaaccaccaacttttaatggtgaagattatgctatgtggagtaatttaatgcgatttcatctaacctctctccacaagagtatatgggatgttgttgagtatggtgtacaggtaccatctataggggatgaggactatgacacggacgaagtgtcccaaatcgagcacttcaactcccaagccgcaaccatcctccttgcctccctaagcaaggaggaatacaacaaagtacaaggattgaagaacgccaaggagatttgggacctactcaagacggcgcacgagggtgatgaactcaccaagatcaccaagcgggaaacgatcgagggggagctcggtcgcttccgtcttcgccaaggggaggagccacaagacatgtacaaccggctcaagaccttggtgaaccaagtgcgcaacctcgggagtacaaagtgggatgaccacgaagtggttaaggttattctaagagctcttattttccttaaccccacacaagttcaattaattcgtggtaatccaagatatccactaatgacccccgaggaagtcatcgggaattttgttagttttgaatgcatgattaagggctccaagaagatcaacgagcttgacgagccctccacatccgaggcgcaaccggtggcctttaaggcaacggaggagaagaaggaggagtctacaccaagtagacaaccaattgacgcctccaagctcgacaatgaggagatggccctaatcatcaaaagctttaggcaaatcctcaagcaacggaaggggaaggactacaaacctcgttccaagaaggtttgctacaagtgtggtaagcccggtcactttattgcaaaatgtcctatgtctagtgacagtgacaggggcgacgacaagaagggaagaagaaaggagaagaagaagtattacaagaagaagggcggcgatgcccatgtttgtcgggagtgggactccgacgaaagctcaagcgactcctccgacgacgaggacgccgccaacatcgccgtcaccaaaggccttctcttccccaacgtcggccacaagtgtctcatggccaaggacggcaaaaagaaggtaaaatcaaggtcctccactaaatatgaaacatctagtgatgaggatgatgataaaaatgaggaggataacttgcgcattctctttgctaaccttaacatggaacaaaaggaaaaattaaatgaactaattagtgccatccatgaaaaggatgatctcttggactcccaagaggacttcctaatcaaggagaataagaaacatgttaaggttaaaaatgcttacgctctacaagttgaaaaatgtgaaaaattgtctagtgagctaagcacttgccgtgagatgattgacaaccttagaaatgaaaatgctattttaaatgctaaggttgattcacatgtttgtaatgtttcaattcccaatcttagaaatgataacgttgacttgcttgctaagattgatgaattgaatgcatcacttgctagccttagattagagaatgaaaatttaattgctaaggctaaaaattttgatgtttgcaatgctactatttccgaccttagaactaagaatgaaatgttgcatgctaaggttgtagaacttaaatcttgcaaaacctctacatctaatgttgagcatgtttctatttgcactagatgtagagatattaatattgatgctatccatgatcacctagccttaattaaaaaacaaaatgatcatatagctaaactagatgctaaaattgccgagcacaacttagaaaatgagaaatttaaatttgctcgtagcatgctttataatgggagacgccctggcatcaaggatggcattggcttccaaaggggagacaatgtcaaacttaatgcccctcctaagaacttgtctaactttgttaagggcaaagctcccatgcctcaggataacgagggttacattttataccctgcaggctatcctgaaagcaaaattaggaagattcattctaggaagtctcactctggccctaaccatgctttcatgtataagggtgagacatctagttctaggcaaccaacccgtgccaagttgcctaagaaggaaattcctaatgcatcaaatgatcatgccatttcatttaaaacttttgatgcatcttatgtgcttactagcaaatccggcaaagtagttgccaaatttgttgggggcaaacacaagcattccaagacttgtgtttgggtacccaaagttcttgtatctaatgccaaaggacccaaaacagtttgggtttatgcatccgggggctcaagttggatactcgacagcgggtgcacaaaccacatgaccggggagaaaaggatgttctcctcatatgagaaaaacaaagatccccaacgagctatcacattcggggatggaaatcaagggttggtcaaaggtttgggtaaaattgctatttcacctgaccattccatttccaatgtttttcttgttgattcattagattacaacttgctttctgtttcccaattatgtcaaatgggctacaactgtctttttactgatatatgtgtcactgtctttagaagaagtgatgattcaatagcatttaagggtgtgttagagggtcagctatacttagtagattttgatagagctgagctcgacacatgtttaattgctaagacaaacatgggttggctctggcaccgccgactagcccatgttgggatgaagaatcttcataagcttctaaagggagagcacattttaggactaaccaatgttcattttgagaaagacaggatttgtagcgcatgccaagcagggaagcaagttggcactcatcatccacacaagaacataatgacgactgacaggccactggagctcctacacatggatctattcggcccgatcgcttacataagcatcggcgggagtaagtactgtctagttattgtggatgattattctcgcttcacttgggtattctttttacaggaaaaatctcaaacccaagagaccttaaagggattcttgagacgagctcaaaatgagtttggcttaaggatcaagaaaataagaagcgacaatgggacggagttcaagaactctcaaattgaaagcttccttgaggaggagggcatcaagcatgagttctcttctccctacacgccacaacaaaacggtgtagtggagaggaagaatcgaactctattggacatggcaagaaccatgcttgatgagtacaagactccggaccggttttgggccgaagcggtcaacaccgcctgttacgccatcaaccggttatatcttcaccgaatcctcaagaagacatcatatgaactcataaccgaaggttttttacttggttatgactcaaacacaagggcatatagggtctttaacaagtccactggactagttgaagtctcttgtgacgttgtgtttgatgaaactaacgactctcaagtagagcaagttgatcttgatgagataggtgaagaacaggctccatgcatcgcgctaaggaacatgtccatcggggatgtgtgtcctaaggaatccgaagagcctccaagtacacaagatcaaccatcctcctccatgcaagcatctccaccaactcaaaatgaggatgaggctcaaaatgatgaagagcaaaatcaagaagacgagccacctcaagatgatagcaatgatcaagggggagatacaaatgatgaagaaaaggaggatgaggaagaaccaagaccgccacacccaagagtccaccaagcaatccaacgagatcaccccgtcgacaccatcctcggcgacattcataagggggtaactacacgatctcgggttgctcatttttgtgaacattactcttttgtttcctctattgagccacacagggtagaggaagctctccaagattcggattgggtggtggcgatgcaagaggagctcaacaatttcacgagaaacgaggtatggcatttagttccacgtcctaaccaaaatgttgtaggaaccaaatgggtcttccgcaacaagcaagatgagcatggtgtggtgacaaggaacaaagctcgactcgtggccaaagggtattcacaagtcgaaggtttggattttggtgaaacctatgcacccgtagctaggcttgagtcaattcgcatattattggcctatgctactcaccatggctttaagctctatcaaatggacgtgaaaagtgccttcctcaatggaccaatcaaggaagaggtctatgttgagcaacctcccggctttgaagacagtgagtatcctaaccatgtttataggctctctaaggcgctttatgggctcaagcaagccccaagagcatggtatgaatgccttagagatttccttattgcaaatggcttcaaagtcggcaaggccgatcctacactctttactaaaactcttgaaaatgacttgtttgtatgccaaatttatgttgatgatattatatttgggtctactaacgagtctacatgtgaagagtttagtaggatcatgacacagaaattcgagatgtcgatgatgggggagttgaagtattttctaggattccaagtcaagcaactccgagagggcaccttcattagccaaacgaagtacactcaagacattcttgctaagtttgggatgaaggatgccaaacccatcaagacacccatgggaactaatgggcatctcgacctcgacacgggaggtaagtccgtggatcaaaaggtataccggtcgatgattggttcattgctttatttatgtgcatctcgaccggacattatgctttccgtttgcatgtgtgcaagatttcaagccgaccctaaggaatcacaccttacggccgtaaaacgaatcttgagatatttggcttatactcctaagtttgggctttggtaccctcggggatccacatttgatttaattggttattcggatgccgattgggcggggtgcaaaattaataggaagagcacatcagggacttgccagttcttgggaagatccttggtgtcttgggcttcaaagaagcaaaattcggtcgctctttccaccgccgaagccgagtacattgccgcaggacattgttgcgcgcaattgctttggatgaggcaaaccctgcgggactacggttacaaattaaccaaagtccctttgctatgtgataatgagagtgcaatcaaaatggccgacaatcccgtcgagcatagccgcactaagcacatagccattcggtatcattttcttagggatcaccaacaaaagggggatatcgagatttcttacattaatactaaagatcaattagccgatatctttaccaagccacttgatgaacaatcttttaccagacttaggcatgagctcaatattcttgattctagaaatttcttttgctag

SEQ ID NO: 4602 - DNA, 5731 bp, Zea mays
  unsure (1)..(5731): unsure at all n locations
  Clone ID: TF_ZmC119_1758
atcccgtggttcggccgagaccaacgcttgcctactccacgttgtggcgtcccaacagacgagggttgcaatcaacccctctcaagcggtccaaagacccacttgaataccacggtgttttgcttgctttttctcaatcccgtttgcgaggaatctccacaacttggagcctctcgcccttacactttaagatcacaaagaaacacggagcaagggagggattagcagcacactcaagaaatcacagcaacaccacgcacacaagtcacaacgagagctcacaatacaactcaatgagttcaccactcaactagagctccaattgctatcgcaaagaatcaaaggcgcggaatcgatatcttggtgcttaggaatgttgtaggaatgcttggtatgctcctccatgcgcctaggggtcccttttatagccccaaggaagctaggagccgntgagagcaatctaggaaggctgatcttgccttctgtcgactggcgcaccggacagtccggtgcacaccggacatgtccggtgcccgatttctttccataaatggcacagtcgaccgttggcagccagagagccgttggcgcaccggacatgtccggtgcacaccggacagtccggtgcctccttctagccgntgnctcggccacgtgtcccacgcagatcgcgcggccgaccgttggcccgaccgaccgttggctcaccggacagtccggtgcacaccggacagtccggcgaattatagccgtacgtcgccggtgaattcccgagagcggtcagttcgcttgagccagcctggcgcaccggacactgtccggtgcttcaccggacagtccggtgctcccagactgagcagacttggcttagcaaagccatctcattttcaattggatttttcctgtttccagcacttagacacaatacattagtccataaaataatgtactaagtctgagaaacatacctttattcttgatttgtactttgtccaccacatgggcatagatcaacacaaaaacacttgtgttggcactcaatcaccaaaatacttagaaatggcccaaggacacatttccctttcaatctccccctttttggtgatttatgccaacacaacataaagcaactagaacaagtgcaatatcacttcaaataaaaactcaattttattttgattcagttttggcatatatggatcatcctttgccaccacttggtttgtttttgcaaatcaaactcaaaatcctatctctaagtcaaatccacttgtagagacataaagagaggttttccaaagaaaattgattcaatattccaaaaactccccctatttcccataatcaatacttctccccacaagaggccaacttttgacaaaagagacaacaaaagagatttgacaaaccaaaagctctattctactgttttcaaaatctctcaagtggtagctgatccatttatcactttggcctttattttctccccctttggcatcaagcaccaaaacgggatcaatcttggccctttaatcccattgcctcaccaaaatcttcaattaagagtacaaaggcaataagatcatagagatgaacttggaataagttaccctctcatcggagtgcagtggaagtcttgcatggtccaagttcacctttccctttcattccacttcgagactaaatcaagcagactcaagcaaatggttagtctcaaagggtcaagttgtaacacatctccccctaaacatgtgcatcactttgcaacggacttgtgaggtccagggagtgtttgtacaacttgagcaccataataagcaacaaaatgcagaatgaacctcctttgttgaggtcggtgtgcccgtcggtccccatcggagtcttggcgggtttggcgtccttcatcccaaaccgctttagcagatcttgcgtgtacttcgtttgggagatgaaggtgccgtccttgagttgcttcacttggaacccaaggaagtagttcaactcgcccatcatcgacatctcgaatttctgcgtcatcaccctgctaaactcttcacaagaatggtcggggtaccgttcatcctcgaagccagggggttgctccacgtacacctcctccttgattggcccgttgaggaaagcgctcttcacatccatttggaacaacctgttcatcgtcttgagttgggggttgcaccattgttgaggaagatgattgatctcgttcaccttgttcctgtggccgcacttctccaatcgccatggttcgtatagcggccgtcggaacatcttcttcatctacatcatcaagatcaacaacttgctctcttggagagccattagtctcatcaaatacaacgttgctagagacttcaaccaaacccgatgatttgttgaagaccctatatgcctttgtatttgagtcataacctaacaaaaacccttctacagctttgggagcaaacttagaattcctacctttcttcactagaatgtaacatttgctcccaaatacacgaaagtaagacacattgggtttgttaccggttagaagctcatatgaagtcttcttgaggaggcgatgaaggtagacccggtttatggcgtggcaagccgtgctcacggcttccgtccaaaaccgttcgggcgtcttgaattcaccaagcatcgtcctcgccatgtctagtagcgtcatgttcttcctctctaccacaccgttttgctgtggtgtatagggagcggagaactcgtgcttgattccttcctcctcaagatactcctccacttgaaggttcttgaactcggacccattgtcgcttcttatcttcttcactttgagttcaaactcgttttgggctctccttaggaagcacttgagggtccttcctcctatgcttagataggtgacgggtccaaagaggtccatatgaagtaactccaggggtcttgatgttgtcatcacatttttggcatgatgagagcttcccacctgtttacctgcttgacaagctgcacaaggtctatctttttcgaaagttagattagttagacctatcacgtgttctccctttagaagcttgtgaaggttcttcatccccacatgtgctaaacggcgatgccacagccagcccatgctagtcttagcaattaagcatgcatctagaccggcctcctcttttgcaaaatcaactaaataaagtttgccgtctagtacacccttaaaagctaatgaaccatcacttcttctaaagacagacacatctacatttgtgaataaatagttatatcccatattacaaagttgactcacagacaacaaggtatatccaagtgactcaactaagaacacattagaaatagagtgctcggatgaaataacaatttttcctaaccctttcaccttgccttggttcccatcaccgaatatgattgaaccttggggatccttgttcttgacgtaggaagagaacatcttcttttcccccgtcatgtggtttgtgcatccgctgtcgataatccagcttgagcccccggatgcatacaccttcttatcctttctacaaatagcaaaggaagcattgcaagcataataaattgtagaaggttcattcattactttcctatgaacaatatttcttctaggcatatgatgaacaacatttttcctagccaaatttctatcatgcataatagaagaactagaagcaatcatggcatgagaatcaaaagcatcataacttctataaatgttcctagaatgtttcttatcatgatacatgaaagcatggttcttttgagcactactagccataggggccttccctttctccttggcagagatggaagccttatgacttgttaagttcttgacttccctcttgaagccaagaccatccttaactgaggggtgtctaccaatcgtgtaggcatcccttgcaaattttagtttgtcaaattcactcttgctagtcttaagttgggcattaagactagccacttcatcattcaatttagaaattgaaactaggtgttcactgcaagcatcaacattaaaatctttacacctattgcaaactacaacatgttctacacaagatgttgatttattagctatttctaacttagcactcaaatcatcatttatgctctttaagctagaaatagagtcatgacatgtagacaattcacaagaaagcatttcattccttttaatttctaaagcaagggatttttgtgcctctacaaacttatcatgttcttcatacaaaagatcctcttgcttttctaataacctattcttatcattcaatgcatcaattaattcattaatcttgtcaaccttagttctatctaggcctttgaataaacatgaatagtctatttcatcatcgctagattcttcatcacttgaggaagcgtaagtactagtattatgagtgcttaccttcttttcccttgccatgaggcaggtgtgatgctcgttggggaagagggccgacttgttgaaggcggtggcggtgagtccttcgttgtcggagtcggacgacgaacaatccgagtcccactcctttccaaggtgtccctcgcccttagccttcttgtaagccttcttcttttccctcttgttcccttgttcctggtcactatcattatcgggacaattagcgataaaatgaccaatcttaccacatttgaagcatgagcgcttccccttcgtcttggtcttgttgggatgctccttgcgaccccttagcgccgtcttgctaggtagcgcctccttgctcctcgttgctttgagagcaatggtttgaggctcttggattgggccattcaacgcatcatcaacgtatctagcctccttgatcatcatccgcccgcttatgaactttccaagtatctccttgggcgtcatcttggtgtacctaggattctcacaaatattgttcacaagatgtggatcaaggacagtaaaagaccttagcattaggcggacgacgtcgtggtccgtccatcgcgtgcttccatagctccttattttgttgacgagggtcttgagccggttgtacgtttgggttggctcctcgcccctgatcattgcgaatctcccaagttcgccctccaccaactccatcttggtgagcatggtgacgtcgttcccctcatgtgagattttgagggtgtcccaaatctgcttggcgttatccaagccgcttaccttatggtattcatccctgcacaatgaagctagaagaacagtagtagcttgtgcatttttgtgaatttgctcattaatgaacatgggactatccgtgctatcaaagtgcattccattttctactatctcccatatacttggatggagagagaacaagtggctacgcattttgtgactccaaaatctgtagtcctctccatcaaagtgggggggtttaccgaggggaatggaaagcaaatgagcattggaactttgtggaatatgagaataatcaaaggaaaattttgaattaaccgtcttctttttctcgtagtcgttgtcatcatccttttgggaggaggaagattcgtcgctgtcgtagtagactatctccttgatgcgccttgttttcttcttcctcccgtcttttcttttgtggcccgagcctgagtcagtaggcttgtcatcctttggatcattgacgaaggactccttctccttatcattgaccaccatccccttgcccttaggatccat

SEQ ID NO: 4603 - DNA, 4225 bp, Zea mays
  Clone ID: TF_ZmC119_990
aaaaaaggcagcttaaagcatatctcctcctacatgtgtgatgcacatgaacccatccttcgaaagtccagggagtgattgtcccctttgaaccccacaaatacataacaaaatgcataaaggaacatgatcaaagcataccgcacatgtatgctacaaatcaatccaagttccgcgaatctaagacatttagctcactacgcagcctgcaaaaggtcttctcatctagaggcttggtaaagatatcggctagctggttctcggtgctaacatgaaacacttcgatatcccccttttgccggtggtctctcaaaaagtgatgccggatgtctatgtgctttgtgcggctgtgttcaacaggattatccgctatgcggatagcactctcattatcacataggagtgggactttgctcagattgtagccaaagtccctgagggtttgcctcatccaaagtagttgcgcgcaacactgtcctgcggcaacatactcggcctcagcggtggatagggcaacggaggtttgtttcttagaactccatgacaccagggaccttcctaagaattggcatgtccccgatgtactcttcctatcgaccttacatccagcatagtcggagtctcctttgttgaggtcggtgtgtccgtcggttcccattggagtctttgcgggcttggcgtccttcatcccaaaccgcttgatcaagtcttgcgtgtacttcgttagggagatgaaggttccatccttgagttgcttcacttggaatccaaggaaatagcttaactcgcccatcatcgacatctcaaacttttgagtcattaccctgctaaactcttcacaagacttttggttagtagaaccaaatattatgtcatcgacataaatttggcacacaaaaagatcaccatcacatgtcttagtaaaaagagttggatcggctttcccaaccttgaaagcattagcaattaaaaagtctctaaggcattcataccatgctcttggggcttgcttaagtccatagagcgccttagagagcttacacacgtggtcggggtaccgttcatcctcaaagccagggggttgctccacatacacctcctccttgattggcccgttgaggaaagcgctcttcacatccatttggaacaacctgcgacttgggcataaccttttgccaagtctagccttgttccttgtcaccaccccgtgctcgtcttgtttgttgcggaatacccacttggttcccacaacatttttcttgggacgaggcacaagtgtccaaacttcatttctcttgaagttgttgagctcctcttgcatggccaacaaccagtccggatctagcaaggcctcttctaccctgaaaggctcgatagaagagacaaaagagtaatgctcacaaaaattgactaatcgagaccgagtagttactcccttgctaatgtcacccaatatttggtcgacgggatgattcctttgaatcgtcgctcgaacttgggttggaggtgccggttgtgcttcttcctccattaaatgatcatcttgtgctcccccttgatcacatgcctcctcttgatgaacctgtttatcttcttgagttgggggatgcaccattgttgaggaagaaggttgatcttgctccttttgttccagtggcctcacatctccaatcgccatggtgcgtattgcggccgttggaatgtcttcttcatctacatcatcaagatcaagaacttgctctcttggagagccattagtctcatcaaatacaacgtcgctagagacttcaaccaaacccgatgatttgttgaagactctatacgcctttgtatttgagtcataacctaacaaaaacccttctacagctttgggagcaaactttgaatttctacccttctttacttgaatgtagcatttactcccaaaaactcggaaatacgaaacattgagtttgttaccggttagaagctcatacgaagtcttcttgaggagtcggtgaaggtagacccggttgatggcgtggcaagccgtgttcacgacttccgaccaaaaccgctcgggggtcttgaactctccaagcatcatcctcgccatgtctatgagcgtcctgttcttcctctctaccacaccattttcctgtggtgtgtagggagcggagaacttgtgcttgatcccttcctcctcaaggtactcctccacttgaagattcttgaactcagacccattgtcgctccttatcttcttcaccttgagctcaaactcgttttgagctctccttaggaagcgcttgagggtcccttgggtttcagatttatcggataacaaattatatccaagcgactcaactaagaatacattagaaatagagtgctcatttgagattgcaatcttgcctaagcctttaaccttgccttgattcccatcaccgaatatgattgagtcttgggaatctttgttcttgacgtaggaggtgaacatctgcttttcccccgtcatgtggtttgtgcatccgctgtcaataatccagcttgatcccccagatgcataaacccaactcttgttgggtcctacaaggttagtgacaatatccttagggacccaaatgcaagttttatctcccttgcattttgcccctaattttctagcaactatcttcctatcctttctataaatagcaaaggaagcatttaaggcatgataaattgtagaaggttcactatttgttttcctaggcacatgagcaacatttcttctaggcatgtgattaataacatttctcctagctaaatttctatcatgtataatagaagaactagaagcaaccatggcatgagaaaacgtatcataacttctatacccatttctagaatgtctcctatcatgatacatgaaggcatggttcttttgagcactactagccatagaggccttccctttctccttggcggagatggaagccttatggcttgttaagttcttgacttccctcttgaagccaagaccatccttaattgaggggtgtctaccaattgtgtaggcatccctagcaaattttagcttgtcaaattcactcttgctagtcttaagttgggcattaagactagccacttcatcatttaattttgaaatgcaaactaggtgttcactacaagcatcaacattaaaatctttgcacctattgcaaatcataatatgttctacacaagagttaggtttacttgatacttctagtttagcatttaaatcattattagcactttttaaagtagaaatggtttcatgacaagtagatagttcataagaaagcatttcattccttttaacttctagagcaagagaattttgtgcactaacaaacttatcgtgctcttcatataaaaggtcctcttgtttttctaataacctattcttatcattcaaggcatcaattaattcattgattttatcaactttggttctatctagtcccttcttctcctttgccatgaggcatgtgtgatgctcgttggggaagagggatgacttgttgaaggcggtggcggcgagtccttcattgtcggagtcggacgaggagcaatccgagttccactcctttccaagatgtgcctcgccctttgccttcttgtagttcttcttcttttcccactttccactctttttttcctggtcactatcattatcgggacaattagctataaaatgaccaatcttaccacatttgaagcaggagcgcttccccttcgttttgttcctgttggggtgctccttgcgaccctttagcgccgtcttgaatctcttgatgatgagggccatctcttcatcattaagcacggccgactcaacttgtgccaccttgctaggtagtgcctccttgcttcttgttgctttgagagcaacggtttgaggctcgtggattgggccattcaatgcatcatccacgtatctcgcctccttgatcatcatccgcccgcttacaaatttcccaaggatttcttcgggcgacatcttggtgtacctgggattttcacgaatattgtttaccagatgtggatcaagtacagtaaaggaccgtagcattaggcggacgaagtcgtggtccgtccatctcgtgcttccgtagctccttattttgttgacgagggtcttgagccggttgtacgtttgggttggctcctcgcccctgatcatagcgaatctcccaagttcgccctccaccaactccat

SEQ ID NO: 4604 - DNA, 1867 bp, Zea mays
  Clone ID: TF_ZmC13103_7
atggatcctaaagggaagggaatcgtgatcaacgacaaggagaaggagttcttcgtcaacgagccaagggatgacaagtccaacgactcgggctcgggccacagccgcaaagatgggaagaagaagaagacaagacgcatcaaggagatcgtctactacgacagcgatgagtctacttcctcccaaaaggacgacgaccacaacgaatacgagagaaagaaaccggcaacgaggagcaaggaggcgctaccgagcaaggtggcgcaagttgaggcggccgggctaaataatgaggagatggccctcatcattaagcgcttcaagacggtgcttaaaggtcgcaagggacagccaagcaagaccaagacaaaggagaagcgctcgtgcttcaaatgtggtaagattggtcatttcattgctaactgtcccgataatgaaagtgaccaggaaaaggggaacaaaagggagaagaagaagcattacaagaaggccaagggcgaggcacatatcggaaaggagtgggattcagattgctcctcctccgactccgacaatgaaggactcgccgccaccgccttcaacaagtcatccctcttccccaacgagcgtcacacttgcctcatggcaagggagaagaaagtttatgcatccgggggttcaagctggattatcgacagcggatgcacaaaccatatgacgggggagaagaagatgttcacctcctacgtcaagaataaggattcccaagattcaattatattcggtgatgggaatcaaggcaaggataagtctgaaacccaagggaccctcaagcgcttcctcaggagagctcaaaatgagtttgagctcaaggtgaagaagataaggagcgacaacgggtccgagttcaagaaccttcaagtggaggagttccttgaggaggaaaggatcaagcacgagttctccgctccctacacaccacagcaaaatggtgtggtagagaggaagaacaggacgctaatcgatatggcgaggacgatgcttggagaattcaagacccccgagcgtttttggtcggaagccgtgaacacggcttgccacgccatcaacagggtctaccttcatcgcctcctcaagaagacttcgtatgagctactaaccgataacaaacccaatatgaagaagatgttccgacggccgctatacgaaccatggcgattggagaagtgcggccacaggaacaagatgaacgagatcaaccttcatcctcaacaacggtgcatcccccaactcaagacgatgaacaggttcatcaaaaggaggcgtgtgatcaagggggagcacaagatgatcatgtgatgggggaagaagcgcaaccggcacctccaacccaagttcgagcgatgattcaaagggatcatcccgtcgaccaaattctgggtgacattagcaagggagtaactactcggtctcgattagttaatttttgtgaacattactcctttgcctcttctattgagcctttcagggtagaagaggccttgctagatccggactgggtgttggccatgcaagaggagctcaacaacttcaagaggaatgaagtttggacgccggtgcctcgtcctaagcaaaatgttgtgggaaccaagtgggtgttccgcaacaaacaagacgagcacggagtggtgacaaggaacaaggctcgacttgtggcaaaaggttatgcccaagtcgcaggtttggactttgaggagacttttgctcccgtggctaggctagaatccattcgtatcttgctagcatatgccgctcaccattctttcaggttgttccaaatggatgtgaagagcgctttcctcaacgggccaataaaggaggaggtgta

SEQ ID NO: 4605 - DNA, 8172 bp, Zea mays
  Clone ID: TF_ZmC29741_1
tcaatccaggttccgcgaatctaagacatttagctcactacgcaacctgcaaaaggtattatcatttaaaggcttggtagagatatcggttagtttcttatcgggactaacatgaaacactttcatatttcccttttgcttgtggtctcccataaagttatgcctaatgtctatgtgcttcgtgtggctttgttcattcgtagtatccgtcatgcggataacactctccttatcacagaggagtgggactttgctcagattgtagccaaagtccctgagggtttgcctcatccaaagtagttgcgcgcaacactgtcctacggcaacatactcggcctcagcggtggatagggcaacgaaagtttgtttcttagagttccatgacaccagggaccttcctaagaattggcacgtccccgatgtactcttcctatcgaccttacatccagcatagtcggaatctgaatatccaattaggtcaaaggtagacccctttggataccagagcccgaagcaaggcgtagcaactaaatatctaaggattcgcttcactgccactaagtgacactccttaggatcggattgaaatctagcacacatgcatacgcttagcataatatccggtctactagcacataaataaagtaaagaccctatcattgaccggtatgcttagcgttctacccggtttccacctttgttgaggtcggtgtgtccgtcggttcccatcggcgtctttgcgggcttggcgtccttcatcccaaaccgctttagcaagtcttgcgtgtacttcgtttgggagatgaaggtgccgtccttgagttgcttcacttggaacccaaggaagtagttcaactcgcccatcatcgacatctcgaatttctgcgtcatcaccctgctaaattcttcacaagactttttattagtagaaccaaatattatgtcatcgacataaatttggcacacaaaaagatcaccgtcacaagtcttagtgaaaagagttggatcggctttcccaaccttgaaagcattaccaattaagaaatctctaaggcattcataccatgctcttggggcttgcttaagtccatagagcgccttagagagcttacacacgtggtcggggtaccgttcatcctcgaagccagggggttgttctacgtacacctcttccttgattggcccgttgaggaaagcgctcttcacatccatttggaacaacctgaaagaatggtgagcggcatatgctagcaagatacgaattgattctagcctagccacaggagcaaacgtctcctcaaagtccaaacctgcgacttgggcataaccttttgccacaagtcgagccttgttcctcgtcaccaccccgtgctcgtcctgtttgttgcggaacacccacttggttcccacaacgttttgcttgggatgaggcaccagtgtccaaacttcattacgcttgaagttgttgagctcctcttgcatggccaacacccagtccggatctagcaaggcctcttctaccctgaaaggctcaatagaggagacaaaggaataatgctcacaaaaattaactaatcgagatcgagtagttactcccttgctaatatcacccagaatttggtcgacgggatgatccctttggatcatcgctcgaacttgggttggaggtgccggttgagtttcttcctccatcacatgatcatcttgtgctccccctcgatcacacgcctcctgttgatgaacctgttcatcgtcttgagttgggggatgcaccatagttgaggaagaaggttgatcttgctccttttgttcctgtggtcgtacatcaccaatcgccatggttcgtgtagcggccgtcggaacatcttcttcatctacatcatcaagatcaacaacttgctctcttggagagccattagtctcatcaaatacaacgtcgctagagacttcaaccaaacccgatgatttgttgaagaccctatacgcctttgtatttgagtcataacctaacaaaaacccttctatagctttgggagcaaatttggaattcctacccttcttcactagaatgtagcatttactcccaaatacacgaaagtacgatacattgggtttgttaccagttagcagctcatatgaggtcttcttgaggaggcggtgaaggtagaccctgttgatggcgtggcaagccgtgttcacggcttccgaccaaaagcactcgggggtcttgaactctccaagcatagtcctcgccatatctatgagcgtcatgttctttctctctaccacaccattttgctgaggtgtgtatggagcggagaactcgtgcttgatcccctcctcctcaaggaactcctccacttgaagattcttgaattcggacccgttgtcgctccttatcttctttaccttgagctcaaactcattttgagctctcctgaggaagcgcttgagggtcccttgggtttcagacttatcctgcaaaaagaacacccaagtgaagcgggaaaagtcatcaacaataactagaccatacttacttcctcctatgctcagataggcgacgggtccgaagaggtccatatgcagcagctccagaggtcttgaagtggtcatcacattcttgctgtgatgtgctcctcccacttgtttacctgcttgacaagctgcacaaggtctatctttttcgaattgcacgttagtcaaacctatcacgtgttctccctttagaagcttgtgaaggttcttcatccccacatgtgctaagcggcgatgccacagccagcccatgctagtcttagcgattaagcatgcatctagaccggcctcctcttttgcaaaatcaactaaataaagtttgtcgtctagtacacccttaaatgctagtgaaccatcacttcttctaaatacagacacatccttgcattttgcccctaatttcctagcaactatcttcctatcctttctacaaatagcaaaggaagcatttaaagcatgataaattgtagaaggaccattcataactttcctagcagcatgaacaacattctttctcggaacatgaattccatttttcctaagtatttctctatcctttatataggttgcaatggaagtatacaaagcacagtcaagtgaatcaaaagtattacatcttttatgagactgtcttctatcattgtacataaaaacatgattcatattagtactactagccacaagggccttcccattctcattggtagaaatcacatcattatgacttgtagagttcttggcttccctcttgaagccaagcccatccttaattgaggtgtgtctaccaatcgtgtaggcatccctagcaaattttagtttatcaaaatcacttttgctagccttaagttgggcattaagactagccatttcatcatttaactttgcaatagaagctatgtgttcactacaagcatcaatatcaaagtctttacatctattgcaaataacaacattttctacacaagttgttgatttactagctatttctatcttagcattcaaatcgtcattaatgctccttaagctagaaatcgtctcatggcaagaagataattcacagaaaagcatttcatttcttttaacttctaaagcatgagatttttgtgcttctacaaatttgtcatgttcttcatacaacaaatcttcttgtttttctaaaagcctattcttatcattcaaggcatcaattaactcattaattttatctaccttgattctatctaggcccttcttctcccttgccataaggcatgtgtgacgctcgttggggaagagggatgacttgttgaaggcggtggcggcgagtccttcattgtcggagtcggaggaggagcaatccgagtcccactcctttcctagatgtgcctcgcccttggccttcttgtaatttttcttcttttccctcttgctcccgtgttcctggtcactttcattatcgggacagttagcaataaaatgaccaatcttaccgcatttgaagcatgagcgcttccccttggctttgatcttgcttggctgtcccttgcgacctttaagcgccatcttgaatctcttgatgatgagggccatctcttcatcattaagtctggcggcctcaatttgtgctaccttgctgggtaacgcctccttgctccttgttgccttgagggcaacgggttgaggctcattgattggaccgtttagagcgtcgtccacatacctcgcttccttgatcatcattcgcccgcttacgaattttccaaggacttcttcgggcgacattttggtgtacctgggattctcacgaatgttattcaccaaatgaggatcaagaacggtaaaggaccttagcatcaatcggacgacgtcgtggtccgtccatcgcgtgcttccgtagctccttattttgttgataagggtcttgagccggttgtatgtttgtgtcggctcctcgccccttatcatcgcgaatcgtccaagctcgccctccaccaactccatcttggtgagcaaggtgacgtcgttcccctcatgtgaaatcttgagggtgtcccagatctgcttggtgttatccaagccactcactttgtgatattcatccctgcacaatgaagctagaagaacagtagtagtttgtgcattcttatgaatttgctcgttaatgaacaagggactatcagaactatcaaagtgcattccactctctacaatctcccatatactaggatgaagagaaaacaagtgactacgcattttgtgactccaaaatccgtagtcctctccatcaaaatgaggaggtttaccaagtggaatagataataaatgagcatttgcactttgaggaatacaagagtagtcaaaagaaaagttcgaattgaccggtttccttctctcgtagtcgttgtggttgtcgtccttttgggagaaagtagactcatcgctgtcgtcgtagtagacgatctccttgatgcgtcttgtcttcttcttcttcccatctttgcgtctgtggcccgagcccgagtcgttggacttgtcatcaatctccccctttttggtgattgatgccaaaacaaacaagtgttcattacaaaaataaagtactgaataataaacgttctccccctttttggcaccaagaaccaaaaagagagagagagaaacgccaatccaaggatcaccagtggggaggaggatgatgaggagcgaagaggtgttgcgccaggtcggaggcaaagtgttcctctccagactgggccggaggaggagcactgccagacgggtcctggggcggagggtaagaggacgattggcccggatccccgtgatatgggggagggtcaaactgctccggatcatcaaaataagtttcttcttcttcgacgtcatcggctgatgaaaaaggtaccccatacgcctgctggtaccactcgttgacatctggaggagggggtgaagaggtacatcaggagaacgaggggcgaagggagtacccaaagcggaagcttgacgacgaaggttgtcgtcggtctcccgctgacgtcgagccacctcatggacatctgcagcaatatttcggcacatggagaagaaggccgcaaacccgtgggccaggcggacacccatcccacggccacgacctcgaccacgaccacgaccacgtggtgtgggagatccgcggccaggggaagggcgcgaggcaccaccagcagcagcagcagcaccagcaccggcagacggaccagcagatgtatgaccacgagaactggagggggctttcctgaggcgcccagctggattgttgggatcaatccagaaaggggtgtatgactgatgtcgggtgcctttctcaaatctgaattgggtcacgacctcaatcatcttcataatgaatggagcatgaagacaccccttcaaaggaaagcaggctgcatgaataatttcctgccatatcatgtcaaagacattaaccctttctgagctgtttggtttcataaaagagagcaagaccttgctctccccaaggatgttcatctgatttcccccttttggaatgagggtcatcctgcagagggagttgatataatgataatacttatgaatgttggttgactcccaatactttccagactcagacagatgaaggtccttggcttcatctcttgtgggctgccggaaatcatgaatcttgatcttgtctccagatatatcgttgtcagaaaaaccaagaatgtgagcaaaacgacgatagctcaccttgtaccaactaccttcaatgaagaagttcagataggggtagttgtaatgactctccacgccagcaagctttatccagagagtggagtagaattgagcaatcacttcatcattccaatcatattggaatgtcatgatgttcttcatttgcttccttccacaggccctcagtgcctgtgacatttctgggtccccaatcgcttcacaaccttcccagttaatatatcgttgatgaaggatgggttgatgcttcttgggaagaatgactgaattatagaaatccacgtggtgaagagtccaaaagcgatttccatcgatcctgacatcgcgaatacgcaatacaggattttggaaacgaagatcttggagaagagcagaccctccactggcagtgaagtcagtgactggctcattgccagtacactgagcctctgcacgatggaggaccaagccgcgaatcacaggagcttgggccgggggaagatcaacttcatcgtccttcccaccatcatcatcacttgcaggctcccatgcctgcggattcgtcgcaggtcgagaccgaccggaaggagtccgggaagtccgaccgcgagcactttgagaccctgaggcctcagcacccggcatgacattgccgcttccgcgccctcgcttggatcgagagcgaggtggggtatcaccatggatttcctggtcatccgaggagtcggattcgaccaccgacgggttccttcgacgcaccattctaagaaataagaaatagaacctcgatccgaagatggggtcaagatctcccaacgaaatagaggaagatggtggaaacacgccgggaagaacggatctccaaccacacttccaaaagggtgagggctcgagagagtttggagtggagagaggagagaatgagatggcggcggcggaaccaaaatctctaagggtttgcttcatccatagcaactgtgcacaacatgccccagctgctatgtattcagcttctgcagtggagagtgcaacacaattttgtttcttggaactccatgacactaaggaccgcccaaggaattggcaagtcccagtagtgctttttcgatctactttgcaatcggtataatcttcctcatttaggtcgagatgtccatttgatgacattggagtcttggcgtgctttgctttttccatgccaaacttcttgagcatatcttgagtatatttagtttggcatagaaaggtaccttccttgagttgtttgacttgaaatcccaggaagtatttaagctcgcccatcatagacatctcaaacctgttcgtcattactttgctaaactcttcacaaaatttttcattagtactaccaaatataatgtcatcaacatatatttggcacacaaataattcattatcaacttttcgagtaaacaaagtagagtcagcttttcctattgtaaatccatttttaattaaaaaatctttaagacagtcataccaagctctaggggcttgtttaagcccgtagagtgccttgtgaagaagataaacatgatttggcttctttgggtcttcgaagcccggtggttgctccacatatactctttcttgtagtggtccatttagaaaagcgctcttgacatccatttgatatagcttgaaatcatggttagtagcataggcaattaatattctaattgattctaaccttgctaccggcgcatatgtttcaccaaaatcaagtccttccacttgagtatagccttgggcaaccaaccttgccttgtttcttgtaacaacgccattttcatcttgcttgttcctaaagacccatttagtttcaatcacattttgtttgggtctttggactaaggaccagacttcattcctagtgaagttgttcaactcctcttgcat

SEQ ID NO: 4606 - DNA, 6303 bp, Zea mays
  Clone ID: TF_ZmC29741_2
ctaagacccaagcctaagattctttgcgggcttggcgtccttcatcccaaaccgctttagcaagtcttgcgtgtacttcgtttgggagatgaaggtgccgtccttgagttgcttcacttggaacccaaggaagtagttcaactcgcccatcatcgacatctcgaatttctgcgtcatcacccagctaaactcttcacaagacttttgattagtagaaccaaatattatgtcatcgacataaatttggcatacaaagagatcaccatcgcaagtcttagtgaaaagagttggattagctttcccaaccttgaaagcattagcaattaaaaagtctctaaggcattcataccatgctcttggggcttgcttaagtccatagagcgccttagagagcttacacacgtggtcggggtaccattcatcctcgaagccagggggttgctctacgtacacctcctccttgatcggcccgttgaggaaagcgctctttacatccatttggaacaacttgaaagaatggtgagcggcatatgctagcaaaatacgaatagattctagcctagccacaggagcaaaggtctcctcaaagtccaaacctgcgacttgggcataaccttttgccacaagtcgagccttgttccttgtcaccaccccgtgctcgtcctgcttgttgcggaacacccacttggtttccacaacattttgattgggacgcggcaccagtgtccaaacttcattacgcttgaagttgttgagctcctcctgcatggccaacacccagtccggatctagcaaggcctcttctacctcccttgctaatatcacccaatatttggtcgatgggatgcttcctttgaatcgtcgctcgaacttggttggaggtgccggttgtgcttcttcctccatcacatgatcatcttgtgctcccccttgatcacacgcctcctcctgatgaacctgttcatcgtcttgagttggaggatgcaccatcgttgaggaagaaggttgatcttgctccaattgttcctgtggtcgcacatcgccaatcgccatggtgcgcattgcggccgttggaacgtcttcttcatctacatcatcaagatcaacaacttgctctcttggagagccattagtttcatcaaatacaacgtcgctagagacttcaaccaaacccaatgatttgttgaagaccctatacgcctttgtatttgaatcataacctaataaaaacccttctacggctttgggagcaaatttagaagttgtacctttcttcacaagaatataacacttgctcccaaatacacgaaagtaagacacattgggtttgttaccggttagcagctcatacgaagtcctcttgaggaggcggtgaaggtagacccggttgatggcgtggcaagccgtgttcacggcttccgaccaaaagcgctcgggggtcttgaactctccaagcatcgtcctcgccatatcgatgagcgtcctgttcttcctctctaccgcaccattttgctgtggtgtgtagggagcggagaattcgtgcttgatcccttcctcctcaaggaactcctccacttgaaggttcttgaactcggacccgttgtcgctccttatcttcttcatcttgagctcaaactcattttgagctctccttaggaagcgcttgagggtcccttgggtttcagatttatcctgtaaaaggaatacccaagtgaagcgggaaaaatcattgactataacaagaccatacttacttcctccgatgcttagataggcgacgggtccgaagaggtccatatgaagcatctccaaaggtcttgatgtggtcatcacatttttggtgtgatgagagcttcccacctgtttccctgcttgacaagctacacaaggtctatctttttcgaaatgcacgttagttagacctatcacgtgttctccctttagaagcttgcgaaggttcttcatccccacatgtgctaagcggcgatgccacagccagcccatgctagtcttagcaattaagcatgcatctagaccggcctcttcttttgcaaaatcaaccaaataaagtttgccgtctagtacacccttaaaagctagtgaaccatcacaccttctaaagacagacacatctaaccctttcaccttgccttggttcccatcaccgaatattattgaatcttggggatccttgttcttgatgtaggaagagaacatcctcttttcccccgtcatgtggtttgtgcatccgctgtcgataatccagcttgtacccccggatgcataaaccttcttaccctttctacaaatagcaaaggaagcattgcaagcataataaattgtagaaggttcatttattttcctaggaacattaacaacatttctcctaggcatatgatgaacaacatttctaccatgcatataggaagaactagaagcaaacatgtcatgagaatcaaaagcatcataacttctataggcattcctagaatgtctcctatcatgatacatgaaagcatggttctttttagcactactagccataggtgccttccctttctccttggcggagatgggagccttatggcttgttaagttcttggcttccctcttgaagccaagtccatccttaattgagaggtgtctaccaatagtgtaggcatcccttgcaaattttaacttatcaaattcacttttgctagtcttaagttgggcattaagactagccacttcatcatttaactttgcaatagacactaggtgttcactacaagcatccacattaaaatctttacacctagtgcaaatcacaacatgctctacacaagatgttaatttactagatttttctaacttagcattcaaatcatcatttatgctctttaagctagaaattgtctcatggcaagtagatagttcacaagaaagcatttcatttcttttaacttctaaagcatgagatttttgtgcctctacaaatttatcatgttcttcatacaacaaatcctcttgcttttctagtaacctattcttatcattcaaggcatcaattaactcattaattttgccaattttaattctatctaaacctttaaataaactagaatagtctatttcatcgtcatcactagaatcatcatcacttgaagaagcataagtggtatcccgagtatataccttcttctccttcgccatgaggcatgtgtggtgctcgtttgggaagagggatgacttgttgaaggcggtggcggcgagtccttcattgtcggagtcagaataggagcaatctgaatcccactcctttccgagatgtgcctcgcccttggccttcttgtaattcttcttcttttctcttttgttccctttttcctggtcactatcattatcgggacagttagcaataaaatgaccaatcttaccacatttgaagcatgatcgcttcgcctttgtcttggtcttgtttggctgtcccttgcgaccctttagcgccgtcttgaagcacttgattatgagggtcatctcttcatcattgagccctgccgcctcaacttgcgccaccttgctaggtagcgcctccttgcttctcgttgccttgagagcaacgggttgaggctcattgattggaccattcaacgcatcgtccacgtatctcgcctccttgatcatcattcgcccgcttacgaacttcccaagaacttcttcgggcgacatcttggtgtacctaggattttcacgaatattgttcaccagatgtggatcaagtacagtaaaggaccttagcattaggcggacgacgtcgtggtccgtccatcgcgtgcttccgtagctccttattttgttgacaagggtcttgagccggttgtacgtttgggttggctcctcgccccttatcatcgcgaatctcccaagttcgccttccaccaactccattttggtgagcatggtgacgtcgttcccctcataagagatcttgagggtgtcccagatctgcttggcattgtccaagccgctcaccttattgtattcatccctgcacaatgaagctagaagaacagtagtcgcttgtgcatttttgtggatttgctcgttaatgaacatgggactatcagtactatcaaatttcattctactctcaactatctcccatatgctcggatggagagagaacaagtgactacgcattttatgactccaaaatccgtagtcctctccatcaaagtgaggaggtttgccaagtggaatggagagcaaatgagcatttgtactttgcggaatacgagagtaatcgaaagaaaagtttgaattgaccgtttttcgtttctcgtagtcgtagtcgtccttttgggaagaagtggactcgtcgatgtcgtcatagtagacgatctccttgatgcgccttgtcttcttcttcttcccatctttccatttatggcccgagcctgagtcggtaggcttgtcatccttcagctcgttgacgaaggactccttctccgtacaccgccgtcgaagtcccgagagcagtgagttcgccagagccagcctggcgcaccggacagtccggtgcacccagactgagcagactttggctgtacaaagccatctcttttccaattcgatttttccttttgacttggtttgcactttgtccaccactttgcatagattaacacaaaagcacttgtgttggcactcaatcaccaaaatacttagaaatggcccaagggcacatttccctttcaaggtcacgttattatgccttaaggattttgggatgagaccattagggtggttggagtttgactctttggtatcggtgacaacaaggatgacgatggtgtccttctcttcactaactgtgtagtgatagatcggataccatgtgtctatgtatgatgaaattgtgtacgatgaacatcggttcacgtgtcgacccgttctcttatttatatatgcggtgtgaaaggggacttcaatcaaagattgttgccttctctgatctaggcacatgtaaggtttttgactcagccttttgaccgagctgaatgagatgaacttgaaaggtacagacccagtgctcatgatgtcggcgtggaccttgtactcctccgcgtacacgaatgaggtcacggccagggggagagccgcgtatatatagacattattgggggctgttggtcggcttgcctgtacaacagcaatgtgcagaagggtgccgtgcattccaatggccagcgaggcgatcagcatgatgaccgggcctatcaggaacttgaggagcatggagagcgaggcgacggtgtacccgcacggcacgaaccgtgactgccgcgctatgaacgtccctgaagcgaacatgctcagcccaactgcggttgtgtagatgatgaacagagagtcgctaacaatcttcggcatcgagaatccaatcttgaatgccatgagagaccagatgaggccaaggaaactggcataggtgttcggaatctggagaagcttcttcgtggccatccagacgacgtgcatcaccggcggctggacatccacggccaccaccacctgcttgttagcatctccatcgtcctctgggctcatctccttcgtggccgccgcgggcatcaacgacgacgcaacgaccgcctccgccgccggcgccggcgccacctccgtgatctcaatgttgacgaccacctggtggtggtggtggctacggtcggcggcggcatgacgatggacactactgcttccgccgttttcgtcgtcgacgacgcgctcgcccgccgtcgccggcacggctgggctgatcctggcgctgccgtcccgcgccgccatgaactcgtagaggaagatgacgacgttgtaccagatgcagaactgcatgacgacgatctgcttcatgagcccgcccgacacgggcccgtacatgccgtccaggagcggcacgcccatgatgatggtgttgggcagcgacgccaccgagaagttggtcaccacccacttgatcggcgactccgctccctgaaccacctgccgcttccctcggcctccgcggcgcctgctgaggtgggaccagaacgcccaggccgtgagcgccagcagcacgacggccttctgcagcgtgtcggcggcgatgaggcgctcgttcatgtggtacgggtcgttggtggacaccatgtggaagatgagcaccggcacggcgtacagcgccacgaagtggttgatccccgcgcactgctcgtcggagaaggctttgagccaccgcacggacgcgtagcccagcaccgccgacgtgtacagcggcgccat

SEQ ID NO: 4607 - DNA, 2874 bp, Zea mays
  Clone ID: TF_ZmC29741_31
tcaccccccctctaggcgactttcaacatgttctccctttagaagtttatgaatgttctttatcccaacatgtgctagacgacaatgccacagccagcccatgctagtcttagcaattaagcatgcatctagatcggcctcctccttcgaaaaatcaactaaatagagtttgtcgtctagtacacccttaaaagctaatgaaccataactccttctaaagacagacacatctacatttataaatagacaattataacccatattacatagttgactgacagacgataagttgtatctgagcgattcaactaagaacacattggatatggaatgctcggatgaaatagctatctttcctagtcctttaaccttgccttggttcccatctccgaagatgatcgaatcttgggaatccttgttcttgacgtaggaggtgaacatcttcttctcccccgtcatatggtttgtgcatccgctatcaataatccagcttgaacccccggatgcataaacccaactcatgttgggtcctacaaggttagcacaaatatccttagggacccaaatgcaagttttgtctcccttgcatcttgcccctaattttctagcaattatcttcctatcctttctacaaatagcaaaggaagcatttaaagcatgatattttgtggaaggttcattaactttcctaggaacattaatcatatttctcctaggcatattatgaacaacatttttcctactaacatttctatcatgcacataggaagaactagaagcaaccatggcatgagaatcaaaagcatcatatgcattataactccgataagcatttctagattgtctcctatcatgatacaaaaaggcatagttccttttagtactattagccataggggccttccctttctccttggcggagatgggagccttatggcttgttaagttcttgacttccctcttgaagccaagcccatcgttaattgaggggtgtctaccaaccgtgtaggcatccctagcaaattttagtttctcaaaatcacttttgctagtcttaagttgggcattaagactagctacctcttcatttaatttagaaatgcaagctaggtgttcactataagcatcaatgttaatatctttacacctagtgcacgctacaacattttctacacaagaggtggatttactagcaatctctaacttagcattcaaatcatcattaatgctccttaatttaaaaattgtctcatggcaagaagataattcacaagaaagcatttcatttcttttaacttctagagcataagatttttgtgcctctacaaatttgtcatgctcttcatacaaaaggtcctcttgtttttctaagagtctatctttttcattcaaggcatcaatcaattcattaattttatctactttagttctatccaatcccttgaacaaactagagtaatctatttcatcatcactagactcatcatcactggaggaatcataagtgacattgttttgattacataccttcttctcccttgccataaggcatgtgtgacgctcgttggggaagagggatgacttgttgaaggcagtggcggcgagtccttcattgtcggagtcggaggaggagcaatctgaatcccactcctttccgatatgtgcctcacccttggccttcttgtaatgcttcttcttttccctcttactcccgtgttcctggtcactatcattgtcgggacagttagcaataaaatgaccaatcttaccacatttgaagcatgagcgcttctcctttgtcttggtcttgcttggttgtcccttgcgacctttaagcgccgtcttgaagcgcttaatgatgagggccatctcctcattatttagcccggccgcctcaacttgcgccaccttgcttggtagcgcctccttgctccttgttgccttgagagcaatgggttgaggctcatgaataggaccgttcaacgcgtcgtccacgtatcttgcctccttgatcatcattcgcccgcttacgaacttcccaagaacttcttcgggcgacattttggtgtacctgggattctcacgaatattattcaccaaatgaggatcaagaacggtaaaggaccttagcattaggcggacgacgtcgtggtccgtccatcgcgtgcttccatagctccttatcttgttgacaagggtcttgagccggttgtacgtttgggttggctcctccccccttatcatcgcgaatctcccaagttcgccctccaccaactccatcttggtgagcatggtgacgtcgttgccctcgtgagagatcttgagggtgtcccatatctgcttggcattgtccaagccgctcaccttattgtattcttccctacacaaagatgctaagagaacagtagtagcttgtgcatttctatggatttgttcatttataagcatagggctatccgagctatcaaatttcattccattctctacaatttcccatatgcttggatggagagagaataagtgactacgcattttgtgactccaaaatccgtagtcctccccatcgaagtgtggaggtttgccaagaggaatggaaagcagatgcgaattcgaattatgtggaatacgagaataatcaaatgaaaagttcgaattgaccgtcttcctgtagtcgttgtcgtcgtccttttgggaagaggaagattcgtcgctgtcgtagtagacaatctccttgatgcgccttgtcttcttcttcttcccatcttttcgtctatggcccgggcccgagtcgttggacttgtcatccttaggttcgttgacgaaggactccttctccttgtcgttgatcacgattcccttccccttaggatccat

SEQ ID NO: 4608 - DNA, 1999 bp, Zea mays
  Clone ID: TF_ZmC29741_45
tagccataggggccttccctttctccttggcggagatgggagccttatggcttgttaagtccttggcttccctcttgaagccaagtccatccttaattgaggggtgtctaccaatcgtgtaggcatcccttgcaaattttagcttgtcaaattcattcttgctagtcttaagttgggcattaagactagccaattcatcattcaatttggaaattgaaactagatgttcactacaggcatcaatgtcaaaatctttacacctattgcaaatcataacatgttctacacaagagttagatttactagctatttctagcttagcattcaaatcatcatttatgctccttaagctagaaattgtctcatggcaagaagatagttcacaagaaagcatttcatttcttttaacttctaaagcatgagatttttgtgcctctacaaatttgtcatgctcttcatataaaaggtcctcttgtttctctaaaagtctatccttttcattcaaggcatcaatcaattcattaatcttatctattttagttctatccaatcccttgaacaaactagagtaatccatttcttcatcactggactcatcatcactagaagaatcataagtggcattgtttcgagtacataacttcttttccttcgccatgaggcatgtgtggcgctcgttggggaagagggatgacttgttgaaggcggtggcggcgagtccttcattgtcggagtcggatgacgaacaatctgagtcccactccttgccaaggtgtgcctcgcccttagcctttttgtatgtcttcttcttctccctcttgtttccctgttcctggtcactatcattatcggggcagttagcgataaaatgaccaatcttaccacacttgaagcacgagcgcttcccctttgtcttggtcttgcttggctgccccttgtgaccctttagcgtcgtcttggagcgcttgatgatgagagccatctcttcatcatttagccctgccgcctcaacttgtgccaccttgctaggtagcgcctccttgcttcttgttgccttgagagcaaagggttgaggctcattgattggaccattcaatgcgtcgtccacgtatctcgcctcattgatcatcattcgcccgctcacgaacttcccaagaacttcttcgggcgacatcttggtgtacctaggattttcatgaatattgttcaccagatgtggatcaagtacagtaaaggaccttagcattaggcgaacgacgtcgtggtccgtccatcgcgtgcttccatagctccttattttgttgatgtgggtcttgagccggttgtatgtttgggttggctcttcgccccttatcattgcaaatctcccgagctcgccctctaccaactccatcttggtttgcaaggtgacgttgttcccctcatgagagatcttgagggtgtcccagatctgcttggcattgtccaagccgctcaccttatgatagtcgtccctgcacaaagaggctaacaacacagtagtagcttgtgcatttttatgaatctgttcattaataaatataggactatccgagctatcaaatttcattccattctcaacaatctcccatatacttggatggagagagaacatgtgactacgcattttgtgactccaaaatccgtagtcctccccatcaaagtgtggaggtttgccaagagggatggaaagcaaatgtgcatttgagctgtgcggaatacgagagtaatcaaaagaaaagttcgtattaaccatctttcttttgtcgtagtcgttgtcgtcgttgttcttttgggaagaagtggactcatcgctgtcatcatagtagacgatctctttgatgcgtattgtcttcttcttcttcccatctttgcgtttgtggcccgagcccgagtcggtaggcttgtcatcattaggctcgttgacgaaggactccttctccttatcattgatcacaattccctttcccttaggatccat

SEQ ID NO: 4609 - DNA, 1356 bp, Zea mays
  Clone ID: TF_ZmC29741_65
cttcttctcccttgccatgaggcatgtgtgacgctcgttggggaagagggatgacttgttgaaggcggtggcggcgagtccttcattgtcggagtcggaggaggagcaatccgaatcccactcctttccgatatgtgcctcgcccttggccttcctgtaatgcttcttcttctccctcttgctcccctgttcctggtcactttcattgtcgggacagttagcaatgaaatgaccaatcttaccgcatttgaagcacgagcgcttccccttggccttggtcttgcttggctgtcccttgcgtcctttaagcgccgtcttgaagcgcttaatgatgagggccatctcctcattatttagcccggccgcctcaacttgcgccaccttgctcggtagcgcctccttgctcctcgttgccttgagagcaaggggttgcggctcgtggatcggaccgttcaaggcgtcgtccacgtatcttgcctccttgatcatcattcgcccgcttacgaacttccccagtacttcttcgggcgacatcttggtgtacctaggattttcacgaatattgttcaccaaatgaggatcaagaacggtaaaggaccttagcattaggcggacgacgtcgtgatccgtccatcgcgtgcttccgtagctccttattttgttgataagggtcttgagccggttgtatgtttgagttggctcctcgccccttatcattgcgaaccgtccaagctcgccctccaccaactccatcttggtgagcaaggtgacatcattcccctcatgagagatcttgagggtgtcccagatctgcttggcattgtccaagccgctcaccttatggtactcgtccctgcacaaagaggctagcaacacagtagtagcttgtgcatttttatgaatctgttcattaataaacatgggactatccgcactatcaaagtgcattccactttctacaatctcccatatgctaggatggagagagaacaagtgactacgcattttgtgactccaaaatccgtagtcctctccatcaaaatgaggaggtttaccaagtggaatagataataaatgagcatgagtactttgaggaatacgagagtaatcaaaagaaaagttcgaattgaccggtttctttctctcgtattcgttgtggtcgtcgtccttttgggaggaagtagactcatcgctgtcgtagtagacgatctccttgatgcgtcttgtcttcttcttcttcccatctttgcgtctgtggcccgagcccgagtcgttggacttgtcaccccttggctcgttgacgaaggactccttctccttgtcgttgatcacgattcccttccctttaggatccat

SEQ ID NO: 4610 - DNA, 5439 bp, Zea mays
  Clone ID: TF_ZmC4916_370
atggatcctaagggaaaggggatggtggtcgacaacaacgagaaggagtctatcttcaacgagctgaagaatgacaagtctaccgacttggggtcaagccacaagcgcaaagatgggaagaagaagaagacaaggcgcatcaaggagatcgtctactacgacagcgacgaatcctcttcttcccaaaaggacgacgaccacaacgactacgagagaagaaaaccggttaattcgaacttttcttttgactactctcgtattccgcaaagttcaaattcgcatttgctccccattccacttggcaagccccctcactttgatggagaggactacggattttggagccacaaaatgcgtactcacttgttctctctccatcctagcatatgggagattgtagaaagtggaatgcaatttgatagctcggatagccctatgtttatcaatgaacagattcataaaaatgcacaagctactactgtgttgctagcctctttgtgcagggacgagtacaataaagtgagcggcttggacaatgccaagcaaatatgggacaccctaaagatttctcacgaagggaacgacatcaccatgctcactaaaatggagttggtggagggtgagcttggaaggtttgcgatgataaggggcgaggagccaacccaaacatacaaccggctcaagacccttatcaacaaaataaggagctatggaagcacgatatggacggaccatgacgtcgtccgactattactaaggtcctttaccattcttgatcctcatttggtgaataatattcgtgagaatcccaggtacaccaaaatgtcgcccgaagaagtcctaggaaaattcgtcagcgggcgaatgatgatcaaggaagcaaggtacgtggacgacgccttgaatggaccgatcaacgagccgcaaccttttgctctcaaagcaacaagaagcaaggaggcgctacctagcaaggtggcccaaattgaggcggccggacttaatgatgaagagatggctctcatcattaaatgcttcaagacggtactaaagggtcacaaggggcagccaagcaagaccaagacaaaggggaagcgctcatgcttcaagtgcggtaagattggtcattttatcgctaactgccccgataatgatagtgaccaggaacagggaaacaagagggaaaagaagaagaattacaagaaggcaaagggcgaggcgcatctaggcaaggagtgggactcggactgctcctcttccgactccgacaatgaaggactcgccgccaccgccttcaacaaatcaaccctcttcccaaacgagcgtcacacatgccttatggcaagggagaagaaggtatgtactcggaactctacctatgcttcttcaagtgaggacgaatctagtgatgaggatgaagtagattactcgtgtttgtttaagggcctagatagaaccaaagtagacaaaattaatgaattgattgatgccctgaatgagaagaacatacttttagaaaagcaagaggatttgttgtatgaagaacatgataaatttgtagaagctcaaaaatcccttgcattagaaattaaaaggaatgaaatgcttgcttgtgagttgtccacatgccatgattcaatttctaaattaaagagcattaatgatgacttaaatgctaaactagtagaagcacataaatccaactcttgtgttgaacatgttgaaatttgcactaggtgtaaggatgttgatattaatgcttgtagtgaacacttagtttccatttcaaaattgaatgatgaattagctagtcttaatgcccaacttaagactagcaagagtgaatttgaaaaactaaaatttgcaagggatgcctacactattggtagacacccctcaattaaggatgggcttggcttcaagagggaagccaagagcttaacaagccataagactcccatctccaccaaggagaaagggaaggctcctatggctaatagtgttaagaagaatcatgctttcatgtactatgataggagatattctagaaatgcttttagaggtcataatgtttttgattcacatgcttatgactcttatgctatgactgcttctagttctcatgttatgcatggtagaaatgtgcttagaaaaaatgttgttcatcaaatgcctaggagaaatgttgttcataatgctcctaggaaagtagtgaatgaaccttctacaatttattgtgctttaaatgcttcctttgctatttgtagaaaggataagaaaattgttgctaggaagttaggggcaaaatgcaagggagacaaagcttgcatttgggtccctaaggatatttgcactaaccttgtaggacccaacatgagttgggtttatgcatccgggggttcaagctggattatcgacagcggatgcacaaaccatatgacgggggagaagaagatgttcacctcctacgtcaaaaataaggattcccaagattcaattgtattcggtgatgggaatcaaggcaaggtaaaagggttagttgagtctcttggttacaatttgctatctgttagtcaactatgcaatatgggatataattgtctgtttacaaatgtagatgtgtctgtctttagaagaagtgatggttcactagcttttaagggtgtattagacggcaaactttatttagttgattttgcaaaagaggaggccggtctagatgcatgcttaatagctaagactagcatgggttggctgtggcatcgccgcttagcacatgtggggatgaagaaccttcacaagcttctaaagggagaacacgtgataggattaactaatgtgcaattcgaaaaagatagaccttgtgcagcttgtcaggcaggtaaacaagtgggaggagcacatcacagcaagaatgtgatgaccacatcaagacccctggagctgctacatatggacctcttcggacctgtcgcctatctaagcatagggggaagtaagtatggtctggttattgttgatgacttttcccgcttcacttgggtgttctttttgcaggataagtctgaaacccaagggaccctcaagcgcttcctcaagagagctcaaaatgagtttgagctcaaggtgaagaagataaggagcgacaacgggtccgaattcaagaatcttcaagtggaggagtttcttgaggaggaggggatcaagcacgagttctctgctccctacacacctcagcaaaatggtgtggtagagaggaagaacaggacgctcatcgatatggcaaggaccatgcttggagagttcaagacccccgagcgcttttggtcggaagccgtgaacacggcttgccacgccatcaacagggtctaccttcaccgcctcctcaagaagacgtcatacgagcttttaaccggtaacaaacccaatgtatcgtattttcgtgtatttgggagtaaatgctacattctagtgaagaagggtagaaattctaagtttgctcccaaagctgtagaagggtttttattaggttatgattcaaatacaaaggcgtacagggtcttcaacaaatcatcgggtttggttgaagtctctagcgacgttgtatttgatgagactaatggctctccaagagagcaagttgttgattgtgatgacgtagatgaagaagatgttccgacggccgctatacgaaccatggcgattggagaagtgcggccacaggaacaagatgaacgagatcaaccttcttcctcaacaacggtgcatcccccaactcaagacaatgaacaggttcatcaaaaggaggcatgtgttcaagggggagcacaagatgatcacgtgatggaggaagaagcgcaaccggcacctccaacccaagttcgagcggtgattcaaagggatcatcccgtcgaccaaattttgggtgacattagcaagggagtaactactcgatctcgactagttaatttttgtgagcattactcctttgtctcttctattgagcctttcagggtagaggaggccttgctagatccggattgggtattggccatgcaggaggaactcaataacttcaagcgcaatgaagtttggacactagtgcctcgtcccaagcaaaatgttgtgggaaccaagtgggtgttccgcaacaaacaggacgagcacggggtggtgacgaggaacaaggctcgacttgtggcaaaaggttatgcccaagtcacaggtttggactttcaggagacgtttgctcctgtggctaggctagaatcaattcgtatcttgctagcatatgccgctcaccattctttcaggttgtaccaaatggatgtgaagagcgctttcctcaatgggccaatcaaggaggaggtgtacgtggagcaaccccctggcttcgaggatgaacgataccccgaccacgttgggaaagccgatccaactcttttcactaagacttgtgacggtgatctttttgtgtgccaaatttatgtcgatgacataatatttggttctactaaccaaaagtcttgtgaagagtttagcagggttatgacgcagaaattcgagatgtcaatgatgggcgagttgaactacttccttgggttccaagtgaagcaactcaaggacggcaccttcatctcccaaacgaagtacacgcaagatttgctgaagcggtttgggatgaaggacgccaagcctgcaaagacgccaatgggaaccgacggacacaccgacctcaacaaaggtggtaagtccgttgatcaaaaagcataccggtccatgataggctctttgctttatttatgtgctagtagaccagatattatgtttagcgtatgcatgtgtgctagatttcaatccgatcctaaggagtgtcacttagtggccgtgaagcggattcttagatatttagttgctacgccttgcttcgggatctggtatccaaaggggtcgaactttgacttgattggatattcagattccgactatgctggttgtaaggtcgataggaagagcacatcggggacgtgccaattcttaggaaggtccctggtgtcgtggaactctaagaaacaaacttctgttgccctatccaccgctgaggccgaatatgttgccgcaggacagtgttgtgcgcaactactttggatgaggcaaaccctccgggactttggctacaatctgagcaaagtcccactcctatgtgacaatgagagtgctatccgcatggcggaaaatcctgttgaacacagccgcacaaagcacattgacatccggcatcactttttgagagaccaccagcaaaagggagatatcgaagtgtttcatgttagcaccgagaaccagctagccgatatctttaccaagcctttagatgagaagaccttttgcaggctgcgtagtgagctaaatgtcttagattcgcggaacttggattga

SEQ ID NO: 4611 - DNA, 3540 bp, Zea mays
  Clone ID: TF_ZmC4916_384
atggatcctaagggcaaggggattgtgatcaaagcgacaaggagcaaggaggcactacctagcaaggtggcgcaagttgagacagccgggcttaatgaagaagaaatggcccttatcatcaagcggttcaagacggcgctaaagggtcgtaaggagcaccccaacaagaacaagacgaaggggaagcgctcctgcttcaaatgtggtaagattggtcattttatcgctaattgtcccgacaatgatagtgaccaggaaaagaagagtggaaagtgggaaaataagaagaattacaagaaggcgaagggcgaggcacatcttggaaaggagtgggattcagattgctcctcatccgactccgacaacgaaggactcgccgccaccgccttcaacaagtcatccctcttccccaacgagcatcacacttgcctcatggcaagggaaaagaagggcctagatagaaccaaggttgataaaattaatgaattaattgatgccttgaatgataagaataggttattagaaaagcaagaggatcttttgtatgaagaacatgataagtttgtagaggcacaaaaatcccttgctttagaaattaaaaggaatgaaatgctttcttgtgaactatctacttgtcatgaaaccatttctactttaaaaggtgctaatgatgatttaaatgctaaactagaagtagcaattaaatctaactcttgtgtagaacatgttatgatttgcaatagggatgcctacatgattggtagacacccctcaattaaggatggtcttggcttcaagagggaagttaagaacttaacaagccataaggcttccatctccgccaaggagaaagggaaggcccctatgggtagtagtgctcaaaagaaccatgccttcatgtatcatgataggagacattctagaaatggttatagaagttatgatacttttgattctcatgccatgattgcttctagttcttctattatgcatgatagaaatttagctaggagaaatgttgttcatgtgcctaggaaaacaaatagtgaaccttctacaatttatcatgctttaaatgcttcctttgctatttatagaaatgataggaagatagttgctagaaaattaggggcaaaatgcaagggagataaaacttgcatttgggtccctaaggatattgtcactaaccttgtaggacccaacaagagttgggtttatgcatccgggggctcaagctggattatcgacagcggatgcacaaaccacatgacgggggaaaagaggatgttctcttcctacgttaagaacagggattcccaagattcaatcatattcggtgatgggaatcaaggcaaggttaaaggcttaggcaagattgcaatctcaaatgagcactctatttctaatgtattcttagtagagtcacttggatataatttgttatccataagtcaattatgtaatatgggatataattgtctattcacaaatatagatgtgtctgtctttagaagaagtgatggttcattagcttttaagggtgtattagacgacaaactctatttagttgattttgcaaaagaggaggataaatctgaaacccaagggaccctcaagcgcttcctaaggagagctcaaaacgagtttgagctcaaggtgaagaagataaggagcgacaatgggtccgaattcaagaaccttcaagtggaggagtatcttgaggaggaaggaatcaagcacgagttctccgctccctacacaccacagctaaatggtgtggtagagaggaagaacaggacacttatagacatggcgaggacggtgcttggagagttcaagacccccgagcgcttttggtcggaagccgtgaacacggcttgccacgccatcaaccgggtctaccttcatcgcctcctcaagaagacttcgtatgagcttctaactggtaacaaacccaatgtatcttactttcgtgtatttgggagcaagtgttatattctagtgaagaagggtagaaattctaagtttgctcccaaagctgtagaagggtttttgttaggttatgactcaaatacaaaggcgtatagggtcttcaacaaatcatcgggtttggttgaagtctctagcgacgttgtatttgatgagactaatggctctccaagagagcaagttgttgatcttgatgatgtagatgaagaagatgttccaacggccgcaatacgcaccatggcgattggagatcctttcagggtagaagaggccttgctagatccggactgggtgttggccatgcaagaggagctcaacaacttcaagagaaatgaagtttgcacactggtgcctcgtcccaagcaaaatgttgtgggaaccaagtgggtgttccgcaacaaacaagacgagcacggagtggtgacaaggaacaaggcacgacttgtggcaaaaggttatgcccaagtcgcaggtttggactttgaggagacttttgctcctatggctaggctagagtccattcgtattctactagcatatgccgctcaccattctttcaggtcgtttcaaatggatgtgaagagcgctttcctcaacgggccaatcaaagaggaggtgtacgtggagcaaccccctggcttcgaggatgaacggtaccccgaccacgtctgtaagctctctaaggcgctctatggacttaagcaagccccaagagcatggtatgaatgccttagagactttttaattgctaatgctttcaaggttgggaaagccgatccaactctttttaccaagacatgtgatggtgatctttttgtgtgccaaatttatgtcgatgacataatatttggttctactaaccaaaagtcttgtgaagagtttagcagggtgatgactcaaaagtttgatatgtcgatgatgggcgagttaagctattttcttgggttccaagtgaagcaactcaaggacggcaccttcatctcccaaacgaagtacacgcaagacttgatcaagcggtttgggatgaaggacgccaagcccgcaaagactccaatgggaactgacagacacaccgacctcaacaaaggagactccgactatgctggatgtaaggtcgataggaaaagtacatcagggacgtgccaattcttaggaaggtccctggtgtcgtggagttctaagaaacaaacctccgttgccctatccaccgctgaggccgagtacgttgccgcaggacagtgttgcgcacaactactttggatgaggcaaaccctcagggactttggctacaatctgagcaaagtcccactcctatgtgataatgagagtgctatccgcatagcggataatcctgttgaacacagccgcacaaagcacatagacatccggcatcactttttgagagaccaccagcaaaagggggatatcgaagtgtttcatgttagcaccgagaaccagctagccgatatctttaccaagcctctagatgagaagaccttttgcaggctgcgtagtgagctaaatgtcttagattcgcggaacttggactga

SEQ ID NO: 4612 - DNA, 4944 bp, Zea mays
  Clone ID: TF_ZmC4916_395
atggatcctaaggggaagggaatcgtgatcaacgacaaggaaaaggagtccttcgtcaacgagccaaaagatgacaaatccaacgactctggctcgggccacagacgtaaagatgggaagaagaagaagacaagacgtatcaaggagatcgtctactacgacagcgacgagtctacttcttccgacaaggacgacgactacgacaaacaaaagacggtcaattcaaacttttcatttgattattctcgtattccacatagttcgaattcgcatttgctttccattcctcttggcaaacctccacactttgatggggaggactacggattttggagtcacaaaatgcgtagtcatttattctctctccatccaagcatatgggagatcgtagagaatggaatgaaatttgatagctcggatagccctatgtttattaatgaacaaattcataaaaatgcacaagctactactgtgttgctagcctctttgtgcagggacgagtacaataaggtgagcggcttggacaatgccaagcagatatgggacaccctcaagatttctcacgaggggaacgacatcaccatgctcaccaaaatggagttggtggagggcgagcttggaaggtttgcaatgataaggggcgaggagccaacccaaacatacaaccggctcaagacccttatcaacaaaataaggagctacggaagcacgcgatggacggatcacgacgtcgtccgcctaatgctaaggtcatttaccgttcttgatcctcatctcgtgaacaatattcgtgagaatcccaggtacacgaagatgacgcccgaggaggtactcggaaaattcgtaagcgggcggatgatgatcaaggaggcaagatacgtggacgacgccttgaatggaccgatcaacgagcatcaacctcttgctctcaaggcaacaagaagcaaggaggcgctacctagcaaggtggcacaaattgaggcagccggacttaatgatgaagagatggctctcatcatcaaacgcttcaagacggtgctaaaaggtcacaaggggcagccaagcaagaccaagacaaaagggaagcgctcatgcttcaagtgcggtaagattggtcattttatcgctaactgccccgataacgatagtgaccaggaacaggggaacaagagggaaaagaagaagaattacaagaaggccaagggcgaggcacacatcggaaaggagtgggattcggattgctcctccgactccgacaatgaaggactcgccgccaccgccttcaacaagtcatccctcttccccaacgagcgtcacacatgccttatggcaagggagaagaaagtgagtactcgagactccacttatgcttcttctagtgataatgagtctagtgatgatgacatagactattcatgcttattcaagggtttagatagatctaagatagacaaaatcaatgaattgattgatgccttgaatgataagaatgtgcttttagaaaagcaagaagatttgttgtatgaagaacatgacaaatttgtagaagcacaaaaatcacttgcattagagattaagagaaatgaaatactttcgtgtgagttgtctacatgtcatgattcaattgctagtttaaagagcaaaaatgatgatttaaatgctaaactagaaaaatctagtaaatcaacatcttgtgtagaacatgttgagatttgcactaggtgtaaagatttcgatgttgatgcctgtagtgatcatttagtttcaatttccaaactaactgaggaattggctagtcttaatgcccaacttaagactagcaagaatgaatttgataaactaaaatttgcaagggatgcctacacgatcggtagacacccctcaattaaggatggacttggcttcaagagggaagccaagaacttaacaagccataagactcccattcccgctaaggagaaagggaaggcccctatggctactagtgttaaaaagaaccatgcctttatgtatcatgataaaaaaaattctagaaatgcttatgattcttatgctatgactgcttctagttctcatgttgtgcatgatagaaatattggtagaaggaatgttgttcataatatgcctaggagaaatgttcctaggaaagttaatgagccttctacaatatatcatgctttgaatgcctcctttgcaatttatagaaaggatagaaaggtttatgcatccgggggttcaagctggattattgatagcggatgcacaaaccatatgacgggggagaagaaaatgttcacctcctacgtcaagaataaggattcccaagattcaattatattcggtgatgggaatcaaggcaaggtaaaagggttagatgtgtctgtctttagaagaagtgatggttcactagcttttaagggtgtattagacggcaaactttatttagttgattttgcaaaagaagaggataagtctgaaacccaagggaccctcaagcgcttcctcaggagagctcaaaatgagtttgagctcaaggtgaagaacataaggagcgacaatgggtccgagttcaagaatcttcaagtggaggagttccttgaggaggaagggatcaagcacgagttctccgctccttatacaccacagcaaaatggtgtggtagagaggaagaacaggacgctaatcgacatggcgaggactatgcttggagagttcaagacccccgagcggttttggtcggaagcagtgaacacggcttgccacgccatcaacagggtctaccttcaccgcctcctcaagaagacgtcatatgagcttctaaccggtaacaaacccaatgtatcgtactttcgtgtatttgggagcaagtgctacattctagtgaagaagggtagaaattctaaatttgctcccaaagctgtagaagggtttttgttaggttatgactcaaatacaaaggcgtatagagtcttcaacaaatcatcgggtttggttgaagtttctagcgacgttgtatttgatgagactaatggctctccaagagagcaagttgttgattgtgatgatgtagatgaagaagatgttccgacggccgctatacgaaccatggcgattggagaagtgcggccacaggaacaagatgaacgagatcaaccatcttcctcaactatggtgctacccccaactcaagacgatgaacaggttcaccaacaggaggcggatgatcaagggggagcacaagatgatcatgtgatggaggaagatgcgcaaccggcacctccagcccaagttcgagcgatgattcaaagggatcatcccgtcgaccaaattctgggtgatattagcaagggagtaactactcgatctcgattagttaatttttgtgagcattactcctttgtctcttctattgagcctttcagggtagaggaggccttgctagatccggactgggtgttggccatgcaggaggagctcaacaacttcaagagaaatgaagtttggacgctggtgcctcgtccgaagcaaaatgttgtgggaaccaagtgggtgttccgcaacaaacaggacgagcatggggtggtgacgagaaacaaggctcgacttgtggcaaaaggttatgcccaagtcgcaggtttggatttcgaggagacttttgctcctgtggctaggctagagtcaattcgaatcttgctagcatatgccgctcaccattctttcaggttgtaccaaatggatgtgaagagcgctttcctcaacgggccaatcaaggaggaggtgtacgtggagcaaccccctggcttcgaggatgaacggtaccccaaccacgtgtgtaagctctctaaggcgctctatggacttaagcaagccccaagagcatggtatgaatgccttagagatttcttaattgctaatgctttcaaggttgggaaagccgatccaactctttttactaagacttgtaatggtgatttgtttgtgtgccaaatttatgtcgatgacataatatttggttctactaaccaaaagtcttgtgaagagtttagcagggtgatgacgcagaaattcgagatgtcgatgatgggcgagttgaactacttccttgggttccaagtgaagcaactcaaggacggcactttcatctcccaaacgaagtacacgcaagacttgctaaagaggtttgggatgaaggacgccaagcccgcaaagacgccgatgggaaccgacggacacacagacctcaacaaaggaggtaagtctgtcgatcaaaaagcataccggtcaatgatagggtctttactttatttatgcgctagtagaccggatattatgcttagcgtatgcatgtgtgctagatttcaatccgatcctaaggagtgtcacttagtggcggtaaagcgaattcttagatatttggttgctacgccttgcttcgggctctggtatccaaaggggtctacctttgacttggttggatactcagactccgactatgctggatgtaaggtcgataggaagagtacatcggggacgtgccaattcttaggaaggtccctggtgtcttggaattctaagaaacaaacctccgttgccctatccaccgctgaggccgagtatgttgccgcaggacagtgttgcgcgcaactactttggatgaggcaaaccctctgggactttggctacaatctgagcaaagtcccactcctatgtgataatgagagtgctatccgcatggcggaaaatcctgttgaacacagccgcacaaagcacatagacatccggcatcactttctgagagaccaccagcaaaagggagatatcgaagtgtttcatgttagcaccgagaaccagctagccgatatctttaccaagcctctagatgagaagaccttttgcaggctgcgtagtgagctaaatgtcttagattcgcggaacttggattga

SEQ ID NO: 4613 - DNA, 5127 bp, Zea mays
  Clone ID: TF_ZmC4916_397
atggatcctaagggaaaggggatggtggtcaatgataaggagaaggagaccatcttcaacgagccgagggacaacaaagctactgactccggctcgagtcaaaagaagaaggaaggaaagaagaagaggtgcatcaagaagatcgtctactacgacgacaacgacgagtcctcttcttcccaaaagtacaacgacgacaacgactacgagaaaaagaagacgattaactctaatttttctttcgattactctcgtattcctaaaagtaccaatggtcatttactctccattccacttggtaaacctcctcactttgatggagaggactacggattttggagtcacaaaatgcgtagtcacttgttctctctccatccaagcatatgggagatagtagaaagtggaatgcaattttatagtactgatagtcccatatttatcaatgagcaaattcacaaaaatgcacaagctactactgttcttctagcatcattgtgcagggatgaataccataaggtgagcggcttggataacaccaagcagatctgggacaccctcaagatctcgcatgaggggaacgacgtcaccatgctcaccaagatggagttggtggaaggcgaactaggaaggttcacgatgatcaggggagaggagccaacccaaacgtacaacaggatcaagaccctcgtcaacaaaataaggagctatggaagcatgcgatggacggaccacgacgtcgtccgcctaatgctaaggtccttcactgtccttgatccacatcttgtaaacaatattcgtgagaatcctaggtacaccaagattacgcccgaggaaatacttgggaagtttgtaagcgagcggatgatgatcaaggaggcaagatacgttgatgatgcgttgaatggcccaatccacgagcctcaaaccgttgctctcaaagcaactaggagcaaggaagtgctacctagcaaggtggcacaagttgaggcggcggggctcaatgaggaagagatggccctcatcttcaagcgtttcaaaacggcgctaaggggtcgcaaggagcatcccaacaagaacaagacgaaggggaagcgctcatgcttcaaatgtggtaagattggtcattttatcgctaattgtcccgataatgatagtgaccaggaacaagagaagaagagggaaaagaagaaggcctacaagaaggctaagggcgaggcacaccttggcaaggagtgggactcagattgttcgtcatccgactccgacaacgaaggacttgccgcctcagccttcaacaaatcgtccctcttccccaacgagcatcacacttgcctcatggcaaaggagaagaaggtaaacactcgaaagactacttatgcttcttctagtgatgatgaatctagcgatgatgaaatagattatgctagtttgttcaagggcttagaaagaactaagattgataagattaatgaattaatcgatgccttgaatgacaagaatagattgttagaaaagcaagaggatcttctgtatgaagaacatgataaagttgtagaggcacaaaaatctcttgctttagaagtcaaaaggaatgaaatgctttcttgtgaactatctacttgccatgagaccatttcaagtttaaaaagtgttaatgatgatttaaatgctaaaatagaagtagcaaatagatctaactcttgtgtagaacatgttgtaatttgcaataggtgtaaagattttgatgttgatgcttgtagtgaacacctagtttctattgcaaagttaaatgatgaagtggctagtcttaatgcccaacttaagactagcaaaaatgaatttgacaaactaaaatttgcaagggatgcctacactattggtagacacccctcaattaaggatgggcttggctttaagagagaagccaagaacttaacaagtcataaggctcccatctccgcaaaggagaaagggaaggcccctatggctaatagtgctcaaaagaaccatgctttcatgtaccatgataggagatattctaggaatgttcattatgatagaagttacaatgatgttgtttcacatgccatgattgcttcaagttcttctattatgcatgatagaagtttggctaggaaaaatgtcatttatcatgtgcctaggagaaatgttcatgtacctaggaaaattaatgaaccttctacaatttatcatgcttgcaatgcttcctttgcaatttgtagaaaggataagaaggtttatgcatccgggggatcaagctggattatcgacatcggatgcacaaaccacatgacgggggagaagaagatgttcacctcctacgtcaagaacaaagattcccaagactcaatcatattcggtgacgggaatcaaggcaaggttaaagggttaggaaagattgctatttcatccgagcactccatttctaatgtgtttttagttgagtcgcttgggtataatttgttgtccgttagtcaattatgcaatatgggatataattgcttattcacaaatgtagatgtgtctgtctttagaaggagtgatggttcattagcttttaagggtgtattagatgacaaactctacttagttgattttgcaaaagaggaggccggtctagatgcatgcctaattgctaagactagcatgggctggctatggcatcgccgtttagcacatgtggggatgaagaacctccacaaacttctaaagggagaacatgtgataggtctaacaaacgataaatctgaaacccaagggaccctcaagcgcttcctaaggagagctcaaaatgagtttgagctcaagcaaaatggtgtagtagagaggaagaacaggacactcattgacatggcgaggacgatgcttggagagttcaagacccccgagcggttttggtcggaagccgtgaacacggcttgccacgccataaaccgggtctaccttcatcgcctcctcaagaagacttcgtatgagcttctaaccggtaacaaacccaatgtttcatactttcgtgtatttgggagtaaatgctacattctagtgaagaaaggtaggaattctaaattttctcccaaagctatagaagggtttttgttaggttatgactcaaatacaaaggcgtatagagtcttcaacaaatcatcgggtttggttgaggtctctagcgacgttgtatttgatgagactaatggctctccaagagagcaagttgttgatcttgatgatgtagatgaagaagacgttccaacggccgcaatacgcaccatggcgattggagatgtgcgaccacaggaacaaacggagcaagatcaaccttcttcctcaacaatggtgcaacccccaactcaagatgacgaacaggttcatcaagaagaggcatgtgatcaagggggagcgcaagatgatcatgtcatagaagaagaagcacctcaagcccctccaacccaagttcgagcgacgattcaacggaattatcccgtcgaccaaatattgggtgatataagcaagggagtaactactcgctcgagaatagttaatttttgtgagcattactcttttgtctcttctattgagcctttcagggtagaagaagccttgctagttccggactgggtgttggccatgcaggaggagctcaataatttcaagagaaatgaagtttggacactggtgccacgtcccaagcaaaacgttgtgggaaccaagtgggtgtttcacaacaaacaggacaagcacagagtggtgacaaggaataaggctagacttgtggcaaaaggttatgcccaagtcgcaggtttggactttgaggagacttttgctcctgtggctaggctagagtcaattcgcatattgttagcctatgccgctcaccattctttcaggctgttccaaatggacgtgaagagcgctttcctcaacgggccaatcaaggaggaggtgtacgtggagcaaccccctggctttgaggatgaacggtaccccgaccacgtgtgcaagctctctaaggcgctctatggacttaagcaagccccaagagcatggtatgaatgccttagagactttctaattgctaattctttcaaggttgggaaagccgatccaaccttattcactaagacttgtgacggtgacttattcgtgtgccaaatttatgtcgatgacataatatttggctctactaaccaaaagtattgtgaagagtttagtagggtgatgactcaaaaatttgaaatgtcgatgatggacgagttggactacttcctagggttccaagtgaagcaactcaaggacgacaccttcatctcccaaacgaagtacacacaagacttgctaaagcggtttgggatgaaggacgccaagcccgcaaagactccaatgggaactgacggacacgtcgacctcaacaaaggaggtaagtctgttgatcaaaaagcataccggtctatgataggttccttgctttacttatgtgctagtagaccggatattatgcttagtgtatgcatgtgtgctagatttcaatccgatccaagggagtgtcacttagtggccgtgaatcgaattcttagatatttagtcgctacgccttgcttcgggatctggtatccaaaggtgtctacctttgacttaattggatattcagactccgattacgctggatgcaaggtcgataggaagagtacatcagggacgtgccaattcttaggaaggtctctggtgtcttggagttctaagaaacaaactttcgttgccctatccaccgctgagaccgagtatgttgccgccggacagtgttgcgcgcaactactttggatgaggcaaaccctccgggactttggctacaatctgagcaaagtcccactcctatgtgataatgagagtgccatccgcatggcggataatcctgttgaacacagccgcacaaagcacatagacatccgacatcactttttgagagaccaccagcaaaagggagatatcgaagtgttttatgttagcaccgagaaccagctagacgatatctttaccaagcctctagatgagaagaccttttgcaggctgcgtagtgagctaaatgtcttagattcgcggaacttggattga

SEQ ID NO: 4614 - DNA, 4974 bp, Zea mays
  Clone ID: TF_ZmC4916_405
atggatcctaaaggcaaggggatggtgatcaacgacaaggaaaaggagtccttcgtcaatgagcccaatgatgacaagcccaccgactcaggctcgggccgcaaaagaaaagacgggagaaagaagaaggcaaggcgcatcaaggaaattgtctactacgacagcgacgaatcttcctcctcccaaaaggacgacgacgactacgatagacgaaagacggttaactcaaacttttctttcgattattcgcgcatcccgcatagttcaaatgctcaattacttcccattcgacttggcaagccccctcactttgatggagaggattacggattttggagccacaaaatgcgtactcacctgttttctctccatccaagcatttgggagattgtggaaagtggaatgaaatttgatagctcggatagccctatgtttattaatgaacagattcataaaaatgcacaagctactactgtattgctagcctctttgtgcagggacgagtatcacaaggtgagcggcttggacaatgccaagcagatctgggacaccctcaagatctctcatgagggaaacgatgtcaccttgctcaccaaaatggagttggtggaaggcgaacttggacggttcgcaatgataaggggcgaggagccaactcaaacatacaaccggctcaagacccttatcaacaaaataaggagctacggaagcacgcgatggacggatcacgacgtcgtccgcctaatgctaaggtcctttactgttcttgatcctcatttggtgaacaatattcgtgaaaatcctaggtacaccaagatgtcgcccgaagaagtacttgggaaattcgttagcgggcgaatgatgatcaaggaggcaagatacgtggacgacgccttgaatggttcgatcaacgagccgcaaccccttgctctcaaggcaacgaggagcaaggaggcgctaccgagcaaggtggcgcaagttgaggcggccgggctaaataatgaggagatggccctcatcattaagcgcttcaagacggcgcttaaaggacgcaagggacagccaagcaagaccaaagccaaggggaagcgctcgtgcttcaaatgcggtaagattggtcattttattgctaactgtcccgacaatgatagtgaccaggaacacgggagcaagagagaaaagaagaagcattacaagaaggccaagggcgaggcacatatcggaaaggagtgggattcggattgctcctcctccgactccgacaatgaaggactcgccgccactgccttcaacaagtcatccctcttccccaacgagtgtcacacatgccttatggcaagggagaagaaggtaagtaatcaaaacaatgtcacttatgattcttctagtgatgatgagtctagtgatgaagaaatagattactctagtttgttcaagggaatggatagaactaaagtagataagattaatgaattgattgatgccttgaatgaaaaggatagactcttagaaaaacaagaggatcttctatatgaagagcatgacaaatttgtagaggctcaaaaatcttatgctttagaagttaaaagaaatgaagtgctttctagtgaattatcttcttgtcatgaaaccattgctactttaaaaggtgttaataatgatttaaatgctaaactagaagtggctagtaaatctaactcttgtgtagaacatgttatggtttgcactaggtgtaaagattttaatgttgatgcttgtagtgaacacctagtttcaatttctaaattgaatgatgaagtggctagtcttaatgcccaacttaagactagcaaaagcgaatttgataaattaaaatttgcaagggatgcctatacgattggtagacatccctcaattaaggatggacttggctacaaaagggaagccaagaacttgacaagccataaggctcccatctccgccaaggagaaagggaaggcctctatggctagtagtgtgcaaaagaaccatgcctttatgtactatgatagaagacaacctagaaatgcttataggagttgtaatgcatataatgcctttgattctcatgccatgtttgcttctagctcttcttatgtgcatgatagaaatgttggtaggagaaatgttgttcataatatgcctaggagaaatgttgttaatgttcctaggaaagtaaatgaaccttctacaatatatcatgctttgaatgcttcctttgcaatttgtagaaaggatagaaaggtgattgctaggaaattaggggcaaaatgcaagggtgataaaacttgcatttgggtccctaagacaattgtgactaaccttgtaggacccaacaagagttgggtttatgcatccgggggttcaagctggattatcgacagcggatgcacaaaccatatgacgggggagaagaagatgttcacctcctacgtcaagaataaggattcccaagattcaattatattcggtgatgggaatcaaggcaaggtaaaagggctagatgtgtctgtctttagaagaagtgatgattcactagcttttaagggtgtattagacgacaagctctacttagttgattttgcaaaagaagaggccggtctagatgcatgcttaattgctaagactagcatgggctggctgtggcatcgccgcttagcacatgtggggatgaagaaccttcacaagcttctaaagggagaacacgtgataggtttgactaacgtacaattcgaaaagatagaccttgtgcagcttgtcaagcaggataagtctgaaacccaagggaccctcaagcgcttcctaaggagagctcaaaatgagtttgagctcaaggtgaagaagataaggagcgacaacgggtccgagttcaagaatcttcaagtggaggagttccttgaggaggaagggatcaagcacgagttctccgctccctacacaccacagcaaaatggtgtggtagagaggaagaacaggacgctaatcgatatggcgagaacgatgcttggagaattcaagacccccgaggtctaccttcatcgcctcctcaagaagacttcgtatgagcttctaaccggtaacaaacccaatgtatcttactttcgtgtatttgggagcaagtgctacattctagtaaagaagggtagaaattctaagtttgctcccaaagctgtagaagggtttttgttaggttatgactcaaatataaaggcgtatagagtcttcaacaaatcatcgggtttggttgaagtctctagcaacgttgtatttgatgagactaatggctctccaagagagcaagttgttgattgtgatgatgtagatgaagaagatgttccgacggccgctatacgaaccatggcgattggagtagtgcgaccacaggaacaagatgaacgagatcaaccttcttcctcaacaacggtgcatcccccaactcaagacgatgaacaggttcatcaaaaggaggcgtgtgatcaagggggagcacaagatgatcaagtaatggaggaagaagcgcaaccggcacctccaacccaagttcgaacggaggaactcaacaacttcaagcgcaatgaagtttggacactggtgcctcgtcccaagcaaaatgttgtgggaaccaagtgggtgtttcgcaacaaacaggatgagcacggggtggtgacgaggaacaaggctcgacttgtggcaaaaggttatgcccaagtcgcaggtttggactttgaggagacgttgtaccaaatggatgtgaagagcgctttcctcaacgggccaatcaaggaggaggtgtacgtagagcaaccccctggcttcgaggatgaacggtaccccgaccacgtgtgtaagctctctaaggcgctctatggacttaagcaagccccaagagcatggtatgaatgccttagagactttctaattgttaatgctttcaaggttgggaaagccgatccaactctttttactaagacatgtgatggtgatttgtttgtgtgccaaatttatgtcgatgacataatatttggttctactaaccaaaagtcttgtgaagagtttagcagggtgatgacgcagaaattcgagatgtcgatgatgggcgagttgaactacttccttgggttccaagtgaagcaactcaaggacggcatcttcatctcccaaacgaagtacacgcaagatctgctaaagcggtttgggatgaaggacgccaagcccgcaaagactccgatggggaccgacggacacaccgacctcaacaaaggaggtaagtccgttgatcaaaaggtataccggtcaatgatagggtccttactttatttatgtgctagtagaccggatattatgcttagcgtatgcatgtgtgctagatttcaatccgatcctaaggagtgtcacttagtggcggtgaagcgaattcttagatatttggttgctacgccctgcttcgggctctggtatccaaaggggtctacctttgacttggttggatactcagattccgactatgctggatgtaaggtcgataggaagagtacatcggggacgtgccaattcttaggaaggtccctggtgtcgtggaactctaagaaacaaacctccgttgccctatccaccgctgaggccgagtatgttgccgcaggacagtgttgcgcgcaactactttggatgaggcaaaccctcagggactttggctacaatctgagcaaagtcccactcctatgtgacaatgagagtgctatccgcatggcggaaaatcctgttgaacacagccgcacaaagcacattgacatccggcatcactttttgagagatcaccagcaaaagggagatatcaaagtgtttcatgttagcaccgagaaccagctagccgatatctttaccaagcctctagatgaaaagaccttttgcaggctgcgtagtgagctcaatatcctagattcgcggaacttggattga

SEQ ID NO: 4615 - DNA, 5022 bp, Zea mays
  Clone ID: TF_ZmC4916_407
atggatcctaaggaaaaggggatggtggtcaacgacaatgagaaggagtccatcttcaacgagccgaaggacgacaaggccaatgactccggctcgagtcaaaagaagaaggatggaaagaagaagaggtgcatcaagaagattgtctactacgacagcgacgaatcttcctcttctcaaaaggacgacgaatacgaggagaaaaataaaacggttaactcgaacttttctttcgattattctcgtattccgcataattccaatgctcatatgctttccattccacttggtaaacctccacactttgatggagaggactacggattttggagtcacaaaatgcgtagccacttgttctctcttcatccaagtatgtgggagatagtagaaaatggaatgcaatttgatagttcggataactccatgtttatcaatgaacaaatccataaaaatgcacaagctactactgttcttttagcatccttgtgcagggaagagtacaataaggtgagcggcttggataacgccaagcagatctgggacaccctcaagatctcgcatgaggggaacaacgccaccatgctcaccaagatggaattggtggaaggcgaactaggaaggttcgcaatgatcaggggagaggagccaactcaaacgtacaataggctcaagaccctggtcaacaagataaggagctatgggagcacgagatggacggaccacgacgtcatccgacttatgctaaggtccttcactgtccttgatcctcatcttgtaaactctattcgtgagaatcctaggtacatcaagatgacgcccgaagaaatactcggaaagtttgtaagcgggcgaatgatgatcaaggaggcaagatatgttgatgaggcgttgaatggcccaatgcccatctacgagcctcaaaaggttgctctcaaagcaacaagtagcagggagacgctacctagcaaggtggcgcaagttgaggtggccgggctaaatgaggatgaaatggccctcatcatcaagcgcttcaagacggcgctcaaaggtcgcaaggagcatcccaacaagagcaagacgaagggaaagcgctcctgcttcaagtgtggtaagattggtcactttattgctaactgtcccgacaatgatagtgaccaggaacaaggaaagaatgggaagagagagaacaagaaggtttacaagaaggctaagggcgaggcacaccttggcaaagagtgggactcgccgcctcggccttcaacaaatcgtctctcttcccaaacgagcatcacacctgcctcatggcaaaggagaaaaaggtgtaagaattttaatgttgatgcttgtagtgaacacttaatttccatttcaaaattaaatgatgaagtggctagtctaaatgcccaacttaagactagcaaggatgactttgataaactgaaatttgcaagggatgcctacactattggtagacacccctcaattaaagatgggcttggctttaagagggaagccaagaacttaacaagtcaaggggctcccattttcaacaaggaaaaagggaaggctcctatgactagtaatagtcaaaataattatgcatttatttataatagaaaattttctagaaatgcttatcataataggagttgtaatgcctatgattcaaatgccatgattgcttcgagttcttcctttgtgcatggtagagatatgcctaagaaaaatgttattcatcatatgcctaggagaaatgttgttcatgtacctaggatagcaagtaattgtaatacccaaattgtcagggccgtcaacaaccttccgttcgaggcgcggctcatgcggtcctgctcgaatcctcctccgcgaagtgcgccgatgaccgaaaccaaccaggggattaaaaccccaatcgaccccgccgcaaccctggaacccccttcatcgaagcctgggcgagtttctgggtgcccaattgggatttctggcacttcgcgggagataaggtgtatggggtctgatcaactccgtggcaaatgggtaacacgacttgtgggtaaagatgcgcaacctctgcagagtgtaaaactggtttatgcatccgggggctcaagctggattatcgacagcggatgcacaaaccacatgacaggggagaagaagatgttcacctcctacgtcaagaacaaagattcccaagattcaatcatattcggtgacgggaatcaaggcaaggttaaaggactaggaaaaatagctatttcatccgagcattccatctctaatgtgtttttagttgaatcgctcgggtataacttgttgtccgttagtcaattatgtaatatgggttacaattgcttatttacaaatgtagatgtgtctgtctttagaaggagtgatggttcattagcttttaagggtgtactagacaacaaactttatttagttgattttgcaaaggaagaggccggtctagatgcatgcttaattgctaagactagcatgggctggctgtggcatcgtcgtctagcacatgtggggatgaagaaccttcacaaacttctaaagggagaacatgtattgggtctaacaaatgtaactttcgaaaaagatagaccttgtgcagcttgtcaagcaggtaaacaagtgggaagcgctcatcacaacaagaatgtgatgaccacatcaagacctctggagctacttcatatggatctcttcggacctgtcgcctacctcagcatagggggaagtaagtatggtcttgttatagttgatgatttttcccgcttcacttgggtattctttttgcaggataaatctgaaatccaagggaccctcaagcgcttcctaaggagagctcaaaatggatttgagctcaaggtgaagaagataaggagcgacagcggagaggaagaacaggacgctcatcgacatggcgaggacgatgcttggagaattcaagacgcccgagcggttttggtcgaaagctgtgaacacgcttgccacgccataaaccgggtctaccttcatcgcctcctcaagaagacgtcatacgaactcctaaccggtaacaaacccaacgtttcatattttcgtgtatttgggagtaaatgctacattctagtgaagaaaggtaggaattccaaatttgctcccaaagttgtagaagggtttttgttaggttatgactcaaatacaaaggcgtatagagtcttcaacaaatcatcgggtttggttgaagtctctagcgacgttgtatttgatgagactaatggctctccaagagagcaagttgatcttgatgatgtagatgaagaagatgttccaacgaccgcaatacgcaccatggcgattggagatgtgcgaccacaggaacaaaaggagcaagatcaaccttcttcctcaacaatggtgcatcccccaacccaagacgatgaacaggttcatcaagaagaggcgtgtgatcaagggggagcacaagatgatcatgttatggaggaagaagcaccacaggcccctccaactcaagtccgagcgacgattcaaaggaatcatcccgccaaccaaattttgggtgatataagcaagggagtaactactcgctctagattagctaatttttgtgagcattactcttttgtctcttctattgagcctttcaaggtagaagaggccttgctagatccggactgggtgttggccatgcaggaagaacttaataacttcaagcgaaatgaagtttggacactggtgccacatcccaagcaaaacgttgtgggaaccaagtgggtgttccgcaacaaacaggatgagcacggggtggtgacaaggaacaaggctagacttgtggcaaaaggttatgcccaagtcgcaggtttggactttgaggagacttttgctcctgtggctaggctagagtctattcgtattttgttagcctatgccgctcaccattctttcaggttgtttcaaatggatgtgaagagcgctttcctcaacgggccaatcaaggaggaggtgtacgtagagcaaccccctggctttgcggatgaacggtaccccgaccacgtgtgtaagctctctaaggcgctctatggacttaatcaagccccaagagcatggtatgaatgccttagagactttctaattgctaatgctttcaaggttgggaaagccgatccaactttattcactaagacttgtgatggtgacttatttgtgtgccaaatttatgtcgatgacataatatttggttctactaaccaaaagtcttgtgaagagtttagcagggtgatgactcaaaaatttgagatgtcgatgatgggcgagttgaactacttccttgggttccaagtgaagcaactcaaggacggcacattcatctctcaaacgaagtacacacaagacttgataaagcgatttgggatgaaggacgccaagcccgcaaagactccaatgggaaccgacagacatgtcgacctcaataaaggagttgctacgccttgcttcgggatctggtatccaaaggggtcaacctttgacttaattggatactcagactccgattatgctggatgcaaggttgataggaagagtacatcagggacgtgccaattcttaggaaggtccctggtgtcttggagttctaagaaacaaacttccgttgccctatccaccgctgaggccgagtatgttgccgcaggacagtgttgcgcgcaactactttggatgaggcaaaccctcagggactttggctacaatctgagcaaagtcccactcctatgtgataatgagagtgctatccgcatgacggataatcctgttgaacacagccgcacaaagcacatagacattcggcatcactttttgagagaccatcagcaaaagggagatatcgaagtgttttatgttagcaccgaaaaccagctagccgatatctttaccaagcctctagatgagtcaaccttttgcaggctgcgtagtgagctaaatgtcttagattcgcgtaacttggattga

SEQ ID NO: 4616 - DNA, 4983 bp, Zea mays
  Clone ID: TF_ZmC4916_410
atggatcctaaagggaagggaatcgtgatcaacgacaaggagaaggagtccttcgtcaacgagccaagggatgacaagtccaacgactcgggctcgggccacagacgaaaagatgggaagaagaagaagacaagacgcatcaaggagatcgtctactatgacagcgatgagtctacttcctcccaaaaggacgacgaccacaacgaatacgagagaaagaaaccggtcaattcaaacttttcttttgattactctcgtattcctcaaagtactaatgctcatttattatctattccacttggtaaacctcctcattttgatggagaggactacggattttggagtcacaaaatgcgtagtcacttgttctctctccatcctagcatatgggagattgtagaaagtggaatgcactttgatagtacggatagtcccatgtttattaatgaacagattcataaaaatgcacaagctactactgtgttgctagcctctttgtgcagggacgagtatcataaggtgagcggcttggacaatgccaagcagatctgggacaccctcaagatctctcatgaggggaatgatgtcaccttgctcaccaagatggagttggtggagggcgagcttggacggttcgcaatgataaggggcgaggagccaactcaaacatacaaccggctcaagacccttatcaacaaaataaggagctacggaagcacgcgatggacggatcacgacgtcgtccgcctaatgctaaggtcctttaccgttcttgatcctcatttggtgaataatattcgtgaaaatcctaggtacaccaagatgtcgcccgaagaagttctggggaagttcgtaagcgggcgaatgatgatcaaggaggcaagatatgtggacgacgcgttgaacggtcctattcatgagcctcaacccattgctctcaaggcaacgaggagcaaggaggcgctaccgagcaaggtggcgcaagttgaggcggccgggctaaataatgaggagatggccctcatcattaagcgcttcaagacggcgcttaaaggtcgcaagggacagccaagcaagaccaagacaaaggagaagcgctcgtgcttcaaatgtggtaagattggtcatttcattgctaactgccccgataatgaaagtgaccaggaaaaggggaacaaaagggagaagaagaagcattacaagaaggccaagggcgaggcacatatcggaaaggagtgggattcggattgctcctcctccgactccgacaatgaaggactcgccgccaccgccttcaacaagtcatccctcttccccaacgagcgtcacacttgcctcatggcaagggagaagaaagtaagcactcatgatactagtacttatgcttcttcaagtgaggatgagtctagtgatgatgatgagatagattactcatgcttattcaagggattagatagatctaaaattaataagattaatgagttgattgatgctttgaatgacaagaatagattactagaaaaacaagaggatcttttatatgaggagcatgataaatttgttagtgcacaaaattctcttgctctagaaattaaaagaaatgaaatgctctctagtgaattatctacttgtcatgaatccatctctaaattaaaaagtgttaatgatgatttgaatgctaagttagaaatagctagtaaatcaacatcttgtgtagaaattgttgaaacttgcaataggtgtaaagattttgacattgatgcttgtagtgaacacctagtttcaatttccaaacttaatgatgaattggctagtcttaatgctcaacttaagactagcaagagtaattttgataagctaaaatttgcaagggatgcctacacaattggtagacacccctcaattaaggatggacttggctacaagaaggaagccaagaacttgacaagccataaggctcccatctccgccaaggagaaagggaaggcccctatggctagtagtgtgcaaaagaaccatgcctttatgtaccatgataggagacaatctagaaatgcttataggagatgtaacgcatatgatgcttttgattctcatgacatgtttgcttctagttcttcttatgtgcatgatagaaatgttgaaaggtttatgcatccggggggttcaagctggattatcgacagcggatgcacaaaccatatgacgggggagaagaagatgttcacctcctacgtcaagaataaggattcccaagattcaattatattcggtgatgggaatcaaggcaaggtaaaagggttaggtaaaattgcaatctctaatgagcactctatctccaatgtgtttttagttgagtctcttggttacaatttgctatctgttagtcaactatgcaatatgggatataattgtctttttacaaatgtagatgtgtctgtctttagaagaagtgatggttctctagcctttaagggtgtattagacgacaagctttacttagttgattttgcaaaagaagaggccggtctagatgcatgcttaattgctaagactagcatgggctggctgtggcatcgctgcttagcacatgtggggatgaagaaccttcacaagcttctaaagggagaacacgtgataggtttgactaacgtacaattcgaaaaagatagaccttgtgcagcttgtcaggcaggtaaacaggtgggaggagcgcatcacagcaagaatgtgatgaccacatcaagacccctggagctgctacatatggacctcttcggacccgtcgcatatctaagcataggaggaagtaagtatggtttagttattgttgatgacttttcccgcttcacttgggtgttctttttgcaggataagtctgaaacccaagggaccctcaagcgcttcctcaggagagctcaaaatgagtttgagctcaaggtgaagaagataaggagcgacaacgggtccgagttcaagaaccttcaagtggaggagttccttgaggaggaagggatcaagcacgagttctccgctccctacacaccacagcaaaatggtgtggtagagaggaagaacaggacgctaatcgatatggcgaggacgatgcttggagaattcaagacccccgtgcgtttttggtcggaagccgtgaacacggcttgccacgccgtcaacagggtctaccttcatcgcctcctcaagaagacttcgtatgaactactaaccggtaacaaacccaatgtatcttactttcgtgtatttgggagcaggtgctacattctagtgaagaagggtagaacttctaaatttgctcccaaagctgtagaagggtttttgttaggttatgactcaaatacaaaggcgtatagagtcttcaacaaatcatcgggtttggttgaagtctctagcgacgttgtatttgatgagactaatggctctccaagagagcaagttgttgattgtgatgatgtagatgaagaagatgttccgacgaccgctatacgaaccatggtgattggagaagtgcggccacaggaacaagatgaacgagatcaaccttcttcctcaacaacggtgcatcccccaactcaagacgatgaacaggacgagcacggggtggtgacggggaacaaggctcgacttgtggcaaaaggttatgcccaagtcacaggtttggacttcgaggagacgtttgctcctgtggctaggctagaatcaattcgtatcttgctagcatatgccgctcaccattctttcaggttgttccaaatggatgtgaagagcgctttcctcaacgggccaatcaaggaggaggtgtacgtggagcaaccccctggcttcgaggatgaacggtaccccgaccacgtgtgtaagctctctaaggcgctctatggacttaagcaagccccaagagcatggtatgaatgccttagagactttttaattgctaatgatttcaaggttgggaaagtcgatccaactctttttacaaagacatgtgatggtgatttgtttgtgtgccaaatttatgtcgatgacataatatttggttctactaaccaaaagtcttgtgaagagtttagcagggtaatgacgcagaaattcgagatgtcgatgatgggcgagttgaactacttccttgggttccaagtgaagcaactcaaagacggcaccttcatctcccaaacgaagtacacgcaagatctgctaaagcggtttgggatgaaggacgccaagcccgcaaagactccgatgggaaccgacggacacaccgatctcaacaaaggaggtaagtccgttgatcaaaaagcataccggtcaatgatagggtctttactttatttatgtgctagtagaccggatattatgcttagcgtatgcatgtgtgctagatttcaatccgatcctaaggagtgtcacttagtggcggtgaagcgaattcttagatatttggttgctacgccttgcttcgagctctggtatccaaaggggtctacctttgacttggttggatactcagactccgactatgctggatgtaaggtcgataggaagagtacatcggggacgtgccaattcttaggaaggtccctggtgtcgtggaactctaagaaacaaacttccgttgccctatccaccgctgaggccgagtatgttgccgcaggacagtgttgcgcgcaactactttggatgaggcaaaccctccgggactttggctacaatctgagcaaagtcccactcctatgtgacaatgagagtgctatccgcatggcggaaaatcctgttgaacacagccgcacaaagcacattgacatccggcatcactttctgcgagaccaccagcaaaagggagatatcaaagtgtttcatgttagcaccgagaaccagctagccgatatttttaccaagcctctagatgagaagaccttttgcaggctgcgtagtgagctaaatgtcttagattcgcggaacttggattga

SEQ ID NO: 4617 - DNA, 4548 bp, Zea mays
  Clone ID: TF_ZmC4916_413
atggatcctaagggcaaggggatggtgatcaacgataaggagaaggagtccttcgtcaatgagccgaaagacaacaagcctactgactcgggctcaagtcataagaagaaggacgggaagaagaagaggcacatcaagaagatcgtctactacgacgacagcgacgagtcctcctcttcccaaaaggacgactacgagaaaaagaaaacggtcaattcaaacttttcttttgattattctcgtattccgcaaagttcaaatgctcattttctttccattccccttggtaaacctcctcactttgatggagaggactacggattttggagtcacaaaatgcgtagccacttgttctctctccatccaagtatatgggagatagttgagaatggaatgcaatttgatacctcattgtgcagggatgaatatcataaagtgagcggcttggataacgccaagcaaatttgggacaccctcaagatctcacatgaggggaacgatgtcaccatgctcaccaagatggagttggtggagggcgaacttgggagatttgcaatgatcaggggagaggagccaacccaaacgtacaaccggctaaagaccctgatcaacaaaataagaagctatggaagcacgcgatggacggatcacgacgtcgtccgcctaatgctaaggtccttcactatccttgatccacatcttgtaaacaatattcgtgaaaatcctaggtacaccaagatgtcgcccgaagaaatacttggaaagttcgtaagcgggcggatgatgatcaaggaggcaagatacgtcgatgatgcattgaatgacccaatccacgagcctcaaaccgtggctctcaaagcaacgaggagcaaggaggcgctacctagcaaggtggcgcaagttgaggcggccgggcttaacgaagaagaaatggccctcatcatcaagcggttcaagacaacactaaaaggtcgcaaggagcatcccaacaagaacaagacgaaggggaagcgctcatgtttcaaatgtggtaagattggtcattttatcgctaattgtcccgataatgatagtgaccaggaacaagagaagaagagggaaaagaagaagtcttacaagaaggctaagggcgaggcacaccttggcaaggagtgggactcggattgttcgtcgtctgactccgacaatgaaggactcgccgcctcagccttcaacaagacgtccctcttccccaacgagcatcacacatgcctaatggcaaaggagaagaagggatgcctacacggttggtacccctcaattaaggatgggcttggtttcaagagggaagccaagaacttaacaagtcataaggctcccattcccgccaaggagaaagggaaggcccctatgacaaatagtgttcaaaagaaccatgccttcatgtaccatgataggagacattctagggatgttcattataatagaagttataattctcttgcttcacatgccatgattgcttcaagttcctctaatgtgtatggtagaaatatgcctaggaaaaatgttgctcatgctcctaggaaagtgattgctaagaaggtgggggccaaatgcaagggagacaagacttgcatttgggtccctaaggctattgttactaaccttgtaggacccaacaagagttgggtttatgcatccgggggctcaagctggattatcgacagcggatgcacaaaccacatgacgggggagaagaagatgttctcttcctacgtcaagaacaaggattcccaagattcaatcatattcggtgatgggaaccaaggcaaggtgaaaggactaggaaaaattgctatttcatccgagcactctatttctaatgtattcttagttgagtcgcttggatataacttgttgtctgtgagtcaactttgtaatatgggatacaatcgcttattcacaaatgtagatgtgtctgtctttagaaggagtgatggttcattagcttttaagggtgtattagacgacaaactctacttagttgattttgccaaagaggaggccggtctagatgcatgcttaattgctaagactagcatgggctggctgtggcatcgccgcttagcacatgtagggatgaagaaccttcacaaacttctaaagggagaacacgtgataggtctaacaaacgtaaccttcgaaaaagatagaccttgtgcagcttgtcaagcaggtaaacaggtgggaagctctcatcataccaaaaatgtgatgaccacatcaagacctttggagttgcttcatatggacctcttcggacccgtcgcctatctaagcataggaggaagtaagtatggtcttgttatagttgatgatttttcccgcttcacttgggtattctttttgcaggataaatctgaaacccaagggaccctcaaacgtttcctaaggagagctcaaaatgagttcgagcttaagaaaaatggtgtggtagagaggaagaacaggacgctcatagacatggcgaggacaatgcttggagaattcaagacacccgagcggttttggtcggaagccgtgaacacggcttgccacgccataaaccgggtgtaccttcatcgcctcctcaagaagacttcgtatgagcttctaaccggtaacaaacccaatgtttcgtactttcgtgtatttgggagcaaatgttatattctagtaaagaaaggtagaaattctaagtttgctcccaaagctgtagaagggtttttgttaggttatgactcaaatataaaggcgtatagggtcttcaacaaatcatcgggtttggttgaagtctctagcgacgttgtatttgatgagactaatggctctccaagagagcaagttgttgatcttgatgatgtagatgaagaagacgttccaacggccgcaatacgcaccatggcgattggagatgtgcggccacaggaacaaaaggagcaagatcaaccttcttcctcaacaatggtgcatcccccaactcaagacgatgaacagcctttcagggtagaagaggccttgctagatccggactgggtgttggccatgcaggaagagctcaacaacttcaaaagaaatgaagtctggacactggtgcctcgtcccaagcaaaacgttgtgggaaccaagtgggtgttccgcaacaaacaagacgagcacggggtggtgacaaggaacaaggcacgacttgtggcaaaaggttatgcccaagtcgcaggtttggactttgaggagacttttgctcctatggctaggctagagtcaattcgcatattgttagcctatgctgctcaccattctttcaggttgttccaaatggatgtgaagagtgctttcctcaacggaccaatcaaggaggaggtgtacgtggagcaaccccctggcttcgaggatgaatggtaccctgaccacgtgtgtaagctctctaaggcgctctatggacttaagcaagccccaagagcatggtatgaatgccttagagactttttaattgctaatgctttcaaggttgggaaagccgatccaactcttttcactaagacttgtgagggtgacttatttgtgtgccaaatttatgtcgatgacataatatttggttctactaaccaaaagtcttgtgaagagtttagcaaggtgatggctcagaaattcgagatgtcgatgatgggcgagttgaactacttccttgggttccaagtgaagcaactcaaggacggcaccttcatctcccaaatgaagtacatgcaagacttgctaaagcgatttggaatgaaggatgccaagcccgcaaagacaccaatgggaaccgacggacatgttgacctcaacaaaggaggtaagtccgttgatcaaaaggcataccggtctatgatagggtctttactttatttatgtgctagtagaccggatattatgcttagcgtatgcatgtgtgctagattccaatccgatccaagggagtgccacctagtggccgttaagcgaattcttagatatttagtcgctacgctttgcttagggatctggtatccaaaggggtctacctttgacttgattggatattcagactccaattatgctggatgtaaggtcaataggaagagtacatcagggacgtgccaattcttaggaaggtccctagtgtcatggagctctaagaaacaaacttctgttgccctatccaccgctgaggccgagtatgttgccgcaggacagtgttgcgcgcaactactttggatgaggcaaaccctcagggactttggctacaatctgagcaaagtcccactcctatgtgataatgagagtgctatccgcatggcggataatcttgttgaacacaaccgcactaagcacatagacatccggcatcactttttgagagaccaccagcaaaagggagatatcgaagtgttttatgttagcaccgagaaccagctagccgatatcttcaccaagcctctagatgagtcgaccttttgcaggctgcgtagtgagctaaatgtcttagattcgcggaacttggattga

SEQ ID NO: 4618 - DNA, 5253 bp, Zea mays
  Clone ID: TF_ZmC4916_416
atggatcctaaggggaagggaatcgtgatcaacgacaaggaaaaggagtccttcgtcaacgagccaaaagatgataaatccaacgactctggctcgggccacagacgtaaagatgggaagaagaagacaaggcgcatcaaggagatcgtctactacgacagcgacgaatcctcttcttcccaaaaggacgacgacaacgactacaggaagacgattgtagagaatggaatgaaatttgatagctcggatagtcctatgcttataaatgaacaaatccatagaaatgcacaagctactactgttcttttagcatctttgtgcagggaagaatacaataaggagagcggcttggacaatgccaagcagatatgggacaccctcaagatctctcacgagggcaacgacgtcaccatgctcaccaagatggagttggtagagggcgaacttggaagatttgctatgataaggggggaggagccaacccaaacatacaaccggctcaaaacccttgtcaacaagataaggagctatggaagcacgcgatggatggaccacgacatcgtccgcctaatgctaaggtcctttaccgttcttgatcctcatttggtgaataatattcgtgagaatcccaggtacaccaaaatgtcgcccgaagaaattcttggaaaatttgtaagcgggcggatgatgatcaaggaggcgaggtacgtcgatgacgcgttgaacggtccaatccacgagcctcaacccattgctctcaaggcatcgagaagcaaggaggcactaccaagcaaggtggcgcaaattgaggcggccgggcttaatgatgaagaaatggctctcatcattaagcgcttcaagacggcattaaggggtcgcaaggagcatcccaacaagaccaagacgaaggggaagcgctcatgcttcaagtgtggtaagattggtcactttatcgctaattgtcccgataatgatagtgaccaggaaaagaagagtgggaaatgggaaaagaagaagaattacaagaaggcaaagggcgaggctcatattggaaaggagtgggattcggattgctcctcgtctgactccgacaacgaaggactcgccgccaccgccttcaacaagtcatccctcttccccaacgagcatcacacgtgcctcatggctaaggagaagaaagtaagtactcgaaactctacttatgcttcttctagtgaggatgagtctagtgatgatgaaatagactattcatgcttatttaaaggattagatagatctaagattgacaaaattaatgaattgattgatgctttaaatgataagaataggctactagaaaagcaagaggatctcttgtacgaagaacatgataagtttgtagaggctcaaaaaacccttgcattagaaattaagagaaatgaaatgcttgcttgtgaattgtctacatgccatgattcaatttctaaattaaagagcatcaatgatgacttaaatgctaaactagtagaagcacaaaaatccaactcttgtgttgaacatgttgaaatttgcactaggtgtaaggatgttgatattaatgcttgtagtgaacacttagtttccatttcaaaattgaatgatgaattagctagtcttaatgcccaacttaagactagcaagagtgaatttgaaaaactaaaatttacaagggatgcctacactattggtagacacccctcaattaaggatgggcttggcttcaagagggaagccaagaacttaacaagccataagactcctatctccaccaaggagaaagggaaggctcctatggctaatagtgttaagaagaatcatgctttcatgtactatgataggagatactctagaaatgcctttagaagtaatgatgtttttgattcacatgcctatgattcttatgccatgactgcttctagttcttcctatatgcatggtagaagtatgactaggagaaatgctattcatcacgtgcctagaaagaatactattcatgctcctaggaaagtagtaaatgaaccttctacaatttattgtgctttaaatgcttcctttgctatttgtagaaaggataggaagatagttgctaggaagttaggggcaaaatgcaagggagacaaaacttgcatttgggtccctaaggatatttgcactaacctggtttatgcatccgggggttcaagctggattatcgacagcggatgcacaaaccatatgacgggggagaagaagatgttcacctcctacgtcaagaataaggattcccaagattcaattatattcggtgatgggaatcaaggcaaggtaaaagggttagatgtgtttgtctttagaagaagtgatggttcactagcctttaagggtgtattagacggcaagctttacttagttgattttgcaagagaagaggccggtctagatgcatgcttaattgctaagactagcatgggctggctgtggcatcgccgcttagcacatgtggggatgaagaaccttcacaagcttctaaagggagaacacgtgataggtttgactaacgtacaattcgaaaaagatagaccttgtgcagcttgtcaggcaggtaaacaggtgggaggagcgcatcacagcaagaatgtgatgaccacatcaagacccctggagctgctacatatggacctcttcggacccgtcgcctatctaagcataggaggaagtaagtatggtttagttattgttgatgacttttcccgcttcacttgggtgttctttttgcaggataagtctgaaacccaagggaccctcaagcgcttcctcaggagagctcaaaatgagtttgagctcaaggtgaagaagataaggagcgacaacgggtccgagttcaagaaccttcaagtggaggagttccttgaggaggaagggatcaagcacgagttctccgctccctacacaccacagcaaaatggtgtggtagagaggaaaaacaggacgctaatcgatatggcgaggacgatgcttggagaattcaagacccccgagcatttttggtcggaagccgtgaacacggcttgccacaccatcaacagggtctaccttcatcgcctcctcaagaagacttcgtatgagcttctaaccggtaacaaacccaatgtatcttactttcgtgtatttgggagcaaatgctacattctagtgaaaaagggtagaaattctaagtttgctcccaaagctgtagaagggtttttgttaggttatgattcaaatacaaaggcatatagggtcttcaacaaatcatcgggtttggttgaagtctctagcgacgttgtatttgatgagactaatggctctccaagagagcaagttgttgatcttgatgatgtagatgaagaagatgttccaacggccacgatacgcaccatgacgattggagatgtaaggcctcgggaacaattggagcaagatcaaccgtcttcctcaactatggtgaatcccccaacccaagatgacgaacaggtacctcaagtggaggcgcatgatcaagggggagcacaagatgttcaagttgaagaggaagaagcacctcaggcacctccaacccaagttcgagcggtgattcaaagggatcatcccgttgaccaaattttgggtgacattagcaagggagtaactactcgttcaagattagttaatttttgtgagcattactcctttgtctcttctattgagcctttcagggtagaagaggccttgctagatccggactgggtgttggccatgcaggaggagctcaacaacttcaagagaaatgaagtttggacgctggtgcctcgtcctaagcaaaatgttgtgggaaccaagtgggtgttccgcaacaaacaagacgagcacggagtggtgacgaggaacaaggctcgacttgtggcaaaaggttatgcccaagtcgcaggtttggactttgaggagacttttgctcctgtggctaggctagagtccattcgtatcttgctagcatatgccgctcaccattctttcaggttgttccaaatggatgtgaagagcgctttcctcaacgggccaataaaggaggaggtgtacgtggagcaaccccctggcttcgaggatgaacggtaccccgaccacgtgtgtaagctctctaaggcgctctatggacttaagcaagccccaagagcatggtatgaatgccttagagatttcttaattgctaatgctttcaaggttgggaaagccgatccaactctttttactaagacttgtgatggagatttgtttgtgtgccaaatttatgtcgatgacataatatttggctctactaataaaaagtcttgtgaagagtttagcagggtgatgacgcagaaattcgagatgtcaatgatgggcgagttgaactacttccttgggttccaagtgaagcaactcaaggatggcaccttcatctctcaaacgaagtacacgcaagacttgctaaagcggtttgggatgaaggacgccaagcccgcaaagactccaatgggaaccgacggacacaccgacctcaacaaaggaggtaagtccgttgatcaaaaagcataccggtcaatgataggatcgttactttacttatgtgctagtagaccggatattatgcttagcgtatgcatgtgtgctagatttcaatccgatcctaaggagtgtcacttagtggcggtgaagcgaattcttagatatttagttgctacgccttgcttcgggatctggtatccaaaggggtctacctttgacttaatcggatactcagattccgactatgctggatgtaaggtcgataggaagagtacatcggggacgtgccaattcttaggaaggtccctggtgtcgtggaactctaagaaacaaacttctgttgccctatccaccgctgaggccgagtacgttgccgcaggacagtgttgcgcgcaactactttggatgaggcaaaccctccgggactttggctacaatctgagcaaagtcccactcctatgtgataatgagagtgcaatccgcatggcggaaaatcctgttgaacacagccgcacaaagcacattgacatccgacatcactttttgagagaccaccagcaaaagggagatatcgaagtgtttcatgttagcaccgagaaccagctagccgatatccttaccaagcctctagatgagaagaccttttgcaggttgcgtagtgagctaaatgtcttagattcgcggaacctggattga

SEQ ID NO: 4619 - DNA, 5427 bp, Zea mays
  Clone ID: TF_ZmC4916_417
atggatcctaaagggaagggaatcgtgatcaacgacaaggaaaaggagtccttcgtcaacgagccaaaagatgataaatccaacgactctggctcgggccacagacgtaaagatgggaagaagaagaagacaaggcgcatcaaggagatcgtctactacgacagcgacgaatcctcttcttcccaaaaggacgacgacaacgactacaggaagacgatcaattcgaacttttcatttgattattctcgtattccacatagttcgaattcgcatttgctttccattcctctcggcaaacctccacactttgatggggaggactacggattttggagtcacaaaatgcgtagtcacttattctctcttcatccaagcatatgggagattgtagagaatggaatgaaatttgatagctcggatagtcctatgcttataaatgaacaaatccatagaaatgcacaagctactactgttcttttagcatctttgtgcagggaagaatacaataaggtgagcggcttggacaatgccaagcagatatgggacaccctcaagatctctcacgagggcaacgacgtcaccatgctcaccaagatggagttggtagagggcgaacttggaagatttgctatgataaggggggaggagccaacccaaacatacaaccggctcaaaacccttgtcaacaagataaggagctatggaagcacgcgatggacggaccacgacgtcgtccgcctaatgctaaggtcctttaccgttcttgatcctcatttggtgaataatattcgtgagaatcccaggtacaccaaaatgtcgcccgaagagattcttggaaaatttgtaagcgggcggatgatgatcaaggaggcgaggtacgtcgatgacgcgttgaacggtccaatccacgagcctcaacccattgctctcaaggcatcgagaagcaaggaggcactaccaagcaaggtggcgcaaattgaggcggccgggcttaatgatgaagaaatggctctcatcattaagcgcttcaagacggcgttaaggggtcgcaaggagcatcccaacaagaccaagacgaaggggaagcgctcatgcttcaagtgtggtaagattggtcactttattgctaattgtcccgataatgatagtgaccaggaaaagaagagtgggaaatgggaaaagaagaagaattacaagaaggcaaagggcgaggctcatattggaaaggagtgggattcggattgctcttcgtccgactccgacaacgaaggactcgccgccaccgccttcaacaaatcaaccctcttcccaaacgagcgtcacacatgccttatggcaaaggagaagaaggtatgtactcgcaactctacctatgcttcttcaagtgaggacgaatctagtgatgaggatgaagtagattattcatgtttgttcaagggcttagacagatctaagatagacaaaattaatgaattaattgatgccttgaatgaaaagaatatacttttagaaaagcaagaggattcgttgtatgaagaacatgataagtttgtagaggctcaaaaatcccttgcattagaaattaagaggaatgaaatgcttgcttgtgaagtgtcaacatgccatgattctatttctaacttaaagagcataaacgatgatttaaatgctaaactagtagaagcaaataaatccaactcttgtgttaaacatgttgaaatttgcactaggtgtaaggatgttgatattaatgcttgtagtgaacacttagtttacatttcaaaattgagtgatgaagtggctagtcttaatgctcaacttaagactagcaaaagtgattttgaaaaactaaaatttgctagggatgcctacacggttggtagacacccctcaattaaggatggacttggcttcaagagggaagccaagaacttaacaagccataaggctcccattcccgccaaggagaaagggaaggcccctatggctactagtgctaaaaggaaccatgcctttttgtatcatgataaaagacaaactagaagttatgatgcttttgattcatatgtttgtgattctcatgccatgtttgctcctagttcttcttatgtgtatgatagaaatgttactaggagaaatgttgtccctaaaagaaatgttgcaaatgttcatagaaaagtagtgaatgaaccctctacaatttattgtgctttgaatgcttcatttgcaatttgtagaaaggatagaaaagtaattgctaggaagttaggggcaaaatgcaaaggtgataaaacttgcatttgggtccctaaggaaattgtgactaaccttgtaggacccaacaagagttgggtttatgcatctgggggttcaagctggattatcgacagcggatgcacaaaccatatgacgggggagaagaaaatgttcacctcctacgtcaagaataaggattcccaagattcaattatattcggtgatgggaatcaaggcaaggtaaaagggttagatgtgtttgtctttagaagaagtgatggttcactagcttttaagggtgtattagacggcaaactttatttagttgattttgcaaaagaagaggctggtctagatgcatgcttaatagctaagactagcatgggctggctgtggcatcgccgcttagcacatgtggggatgaaaaaccttcacaagcttctaaagggagaacacgtgataggtttgactaacgtgcaattcgaaaaagatagaccttgtgcagcttgtcaagcaggtaaacaagtgggaggagcacatcacagcaagaatgtgatgaccacctcaagacctctggagctgctgcatatggacctcttcggacccatcgcctatctgagcataggaggaagtaagtatggtctagttattgttgatgacttttcccgcttcacttgggtgttctttttgcaggataagtctgaaacccaagggaccctcaagcgcttcctcaggagagctcaaaatgagtttgagctcaaggtgaagaagataaggagcgacaacgggtccgaattcaagaatcttcaagtggaggagtttcttgaggaagaggggatcaagcacgagttctccgctccctacacaccacagcaaaatggtgtggtagagaggaagaacaggacgctcatcgatatggcgaggacgatgcttggagagttcaagacctccgagtgcttttggtcggaagccgtgaacacggcttgccacgccatcaacagggtctaccttcatcgcctcctcaagaagacctcgtatgagctgctaaccggtaacaaacctaatgtatcgtattttcgtgtattcgggagtaaatgctacattcttgtgaagaaaggtagaacttctaaatttgctcccaaagctgtagaagggtttttattaggttatgattcaaatacaaaggcgtatagggtcttcaacaaatcatcgggtttggttgaagtctctagcgacgttgtatttgatgagactaatggctctccaagagagcaagttgttgatcttgatgatgtagatgaagaagacgttccaacggccgcaatacgcaccatggcgattggagaggtgtggccacaggaacaaaatgagcgagatcaaccttcttcctcaacaatggtgcatcccccaactcaagacgatgaacaggtacatcaacaggaggcgtgtgatcaagggggagcacaagatgatcatgtgatggaggaagaagcgcaaccggcacctccaacccaagttcgagcggtgattcaaagggatcatcccgtcgaccaaattctgggtgatattagcaagggagtaactactcggtctcgattagttaatttttgtgaacattactcctttgtctcttctattgagcctttcagggtagaagaggccttgctagatccggactgggtgttggccatgcaagaggagctcaacaacttcaagaggaatgaagtttggacgttggtgcctcgtcctaagcaaaatgttgtgggaaccaagtgggtgttccgcaacaaacaagacgagcacggagtggtgacaaggaacaaggctcgacttgtggcaaaaggttatgcccaagtcgcaggtttggactttgaggagacttttgctcccgtggctaggctagagtccattcgtatcttgctagcatatgtcgctcaccattctttcaggttgttccaaatggatgtgaagagcgctttcctcaatgggccaataaaggaggaggtgtacgtggagcaaccccctggcttcgaggatgaacggtaccccgaccacgtgtgtaagctctctaaggcgctctatggacttaagcaagccccaagagcatggtatgaatgccttagagatttcttaattactaatgctttcaaggttgggaaagccgatccaactcttttcactaagacatgtgatggtgatttgtttgtatgccaaatttatgtcgatgacataatatttggttctactaataaaaagtcttgtgaagagtttagcagggtgatgacgcagaaattcgagatgtcaatgatgggcgagttgaactacttccttgggttccaagtgaagcaactcaaggaaggcaccttcatctctcaaacgaagtacacgcaagacctgctgaagcggtttgggatgaaggacgccaagcccgcaaagactccgatggggaccgacggacacactgacctcaacaaaggaggtaagtccgttgatcaaaaggcataccggtcaatgatagggtcgttactttacttatgtgctagtagaccggatattatgcttagcgtatgcatgtgtgctagatttcaatccgatcctaaggagtgtcacctagtggcagtgaagcgaatccttagatatttagttgctacgccttgcttcgggctctggtatccaaaggggtctacctttgacttgattggatattcagactccgactatgctggatgtaaggtcgataggaagagtacatcggggacgtgccaattcttaggaaggtccctggtgtcatggaactctaagaaacaaacttccgttgccctatccacggctgaggccgagtatgttgccgcaggacagtgttgcgcgcaactactttggatgaggcaaaccctcagggactttggctacaatctgagcaaagtcccactcctatgtgataatgagagtgctatccgcatggcggaaaatcctgttgagcacagccgcacaaagcacatagacatccggcatcactttttgagagaccaccagcaaaagggagatatcgaagtgtttcatgttagcaccgagaaccagctagccgatatctttaccaagcctctagatgagaagaccttttgcaggctgcgtagtgagttaaatgtcttagattcgcagaacttggattga

SEQ ID NO: 4620 - DNA, 4971 bp, Zea mays
  Clone ID: TF_ZmC4916_438
atggatcctaagggcaaggggatcgtgatcaatgataaggataaggagtccttcgtcaacgagccaaaagatgacaagcctaccgactcaggctcgggccacaaacgaagagatgggaagaagaagaagacaaggcgcatcaaagagatcgtctactacgacgatagcgatgagtcctcttcttcccaaaaggacaacgacgacaacgactacgacaaaagaaagacggttaattcaaacttttctttcgattattcttgtattccgcatagctcaaatgcacatttgctttccattcctattggcaaacctccacactttgatggggaggactacggattttggagtcagaaaatgcgtagtcacttgttctctctccatccaagcatatgggagattgtagagagtggaatgaaatttgatagctcggatagtcccatgtttataaatgaacaaatccataaaaatgcacaaactactactgtcctgttagcatctttgtgcagggaagagtacaataaggtgagcggcttggacaatgccaagcagatctgggacaccctcgggatctcacatgaggggaacgacgtcaccatgctcaccaagatggagttggtcgagggcgagcttgggagatttgcaatgataaggggagaggatccaacccaaacatacaaccggctcaagaccctcatcaacaagataaggagctatggaagcacgcgatggacggaccacgacatcgttcgtctaatgctaaggtcctttactgttcttgatccacatcttgtgaacaatattcgtgaaaatcctaggtacacaaagatgtcgcccgaagaagttcttgggaagttcgtgagcgggcgaatgatgataaaggaggcgagatacatggacgatgcaatgaacggtccaatccatgagcctcaacccattgctctcaaggcatcaaggagcaaggaggcactacctagcaaggtagcgcaagttgaggcggccgggctcaatgatgaagagatggccctcatcatcaagcgcttcaagacggtgctaaagggacgcaaggagcatcccaaaaagaccaagacgaaggggaagcggtcatgcttcaaatgtggtaagattggtcattttatcgctaactgtcccgataatgatagtgaccaggaacaagggaacaagagggaaaagaagaattacaaaaaggccaagggcgaggcacatcttggaaaggagtgggattcggattgctcctcttctgactccgacaatgaaggactcgccgccaccgccttcaacaagtcatccctcttccccaacaagcatcacacatgcctcatggcaaaggagaagaagggcctagatagaaccaaggttgataaaattaatgaattaattgatgccttgaatgataagaataggtgtaaagattttgatgttgatgcttgtagcaaacacctagcttcaatttctaaattaaatgatgaagtggctagtcttaatgcacaacttaagactagcaaaagtgattttgataagttaaaatttgcaagggatgcctacacgattggtagacacccctcaattaaggatggacttggcttcaagagggaagccaagaacttaacaagccataaggctcccatctccgccaaggagaaagggaaggcccctatggctagtagtactaaaaagaaccatgctttcatgtatcatgataggagatattctagaaatgcctatagaagttatgatacttatgattcatatgctatgactgcttctagttcccatgttgtgcatgatagagatatgcctaggagaaatgttgttcctaggaaaattaatgaaccttctacaatatatcatgcttgcaatgcttcctttgctatttgtagaaaggataagaaggtttatgcatccgggggttcaagctggattatcgacagcggatgcacaaaccacatgacgggggagaagaagatgttcacctcctacgtcaagaacaaggatccccaagattcaatcatattcggtgatgggaaccaaggcaaggtgaaaggctttggcaagattgcaatctcaaatgagcactctatttctaatgtgtttttagttgagtcacttggatataatttgttatctgttagtcaattatgcaatatgggatataattgtttattcacaaatatagatgtgtctgtctttagaaggtgtgatggttcattagcttttaagggtgtactagacgacaaactttatttagttgattttgcaaaagaggaggccggtctagatgcatgcttaattgctaagacttgcatgggctggctgtggcatcgccgtttagcacatgtgggaatgaagaaccttcacaagcttctaaagggagaacacgtgataggtttaactaacgtgcatttcgaaaaagatagaccttatgcagcttgtcaagcaggtaaacaagtgggaggagcgcatcacagcaaaaatgtgatgaccacatcaagacccctggagctgctacatatggacctcttcggaaccgtcgcctatctgagcataggaggaagtaagtatggtctagttattgttgatgacttttcccgcttcacttgggtattctttttgcaggataaatctaaaacccaagggaccctcaagcgcttcctaaggagagctcaaaacgagtttgagctcaagaggaagaacaggatgctaatcgacatggcgaggacgatgcttggagagtttaagacccccgagcacttttggtcggaagccgggaacacggcttgccacgccatcaaccgggtctaccttcatcgcctcctcaagaagacttcgtatgagctactaaccggtaacaaacccaatgtttcgtatttccgagtttttgggagtaaatgctatattctagtgaagaaaggtagaaattctaaatttgctcccaaagctgtagaagggtttttgttaggttatgactcaaatacaaaggcgtatagagtcttcaacaaatcatcgggtttggttgaagtctctagcgacgttgtatttgatgagactaatggctctccaacagagcaagttgttgattttgatgatgtagatgaagaagaagttccaacggccgcaatacgcaccatggcgattggagatgtgcggccacaggaacaagatgaacgagatcaaccttcttcctcaacaatggtgcatcccccaactcaagatgatgaacaggaggcgtgtgatcaagggggagcacaagatgatcatgtaatggaggaagaagcacaactggcacctccaacccaagttcgagcgatgattcaaagggatcatctcgtcgaccaaattttgggtgacattagcaagggagtaactactcgatctcgattagttaatttttgtgagcattactcttttgtctcttttattgagcctttcagggtagaagaggccctgctagatccggactgggtgttggccatgcaggaggagctcaacaacttcaagagaaatgaagtttggacacttgtgcctcgtcccaagcaaaatgttgtgggaaccaagtgggtgttccgcaacaaacaagacgagcacggggtggtgacaaggaacaaggctagacttgtggcaaaaggttatgcccaagtcgcaggtttggactttgaggagacttttgctcctgtggctaggctagagtccattcgcattttgctagcatatgccgctcaccattctttcaggttgttccaaatggatgtaaagagcgctttcctcaacgagccaatcaaggaggaggtgtacgtggagcaaccccctggcttcgaggatgaacggtaccccgaccacgtgtgtaagctctctaaggcgctctatggacttaagcaagccccaagagcatggtatgaatgccttagagactttttaattgctaatgctttcaaggttgggaaagccgatccaactctttttactaagacttgcgatggtgatctttttgtgtgccaaatttatgtcgatgacataatatttggttccactaaccaaaagtcctgtgaagagtttagcagggtgatgacgcagaaattcgagatgtcgatgatgggcgagttgaactacttccttgggttccaagtgaagcaactcaaggacggcaccttcatctcccaaactaagtacatgcaagacttgctaaagcggtttgagatgaaggacgccaagcccgcaaagactctgatgaggaccgacagacacaccgacctcaacaaaggaggtaagtccgttgatcaaaaggcataccggtcaatgatagggtctttactttatttatgtgctagtagaccggatattatgctcagcgtatgcatgtgtgctagatttcaatccgatcctaaggagtgtcacttagtggcggtgaagcgaatctttagatatttagtcgctacgccttgcttcgggatcaggtatccaaaggggtctacttttgacttgattggatattcagattccgactatgtcggatgtaaggtcgataggaagagtacattggggacgtgccaattcttaggaaggtccctagtgtcatggaattctaagaaacaaacttttgttgccctatccaccgctgaggccgagtacgttgccgcaggacagtgttgcgcgcaactactttggatgaggcaaaccctccgggactttcgctacaatctgagcaaagtcccactcctatgtgataatgagagtgctatccgcatggcggaaaatcctgttgaacacagtcgcacaaagcacatagacatccggcatcactttttaagagaccaccagcaaaagggagatatcgaagtgtttcatgttagcaccgagaaccagctagccgatatctttaccaagcctctagatgagaagaccttttgcaggctgcgtagtgagctcaatgtcttagattcgcggaacctggattga

SEQ ID NO: 4621 - DNA, 5517 bp, Zea mays
  Clone ID: TF_ZmC4916_444
atggatcctaaggggaagggaatcgtgatcaacgataaggagaaggagtccttcgtcaacgagccaaaggatgacaagtcaaacgactcgggctcgggtcatagacgaaaagatgggaagaagaagaagacaaggcgcatcaaggagattgtctactacgacagcgacgaatcttcctcttcccaaaaggacgatgacaacgactacaggaagacggtcaattcgaacttttcatttgattattcttgtattccacatagttcgaattcgcatttgctttccattcctctcggcaaacctccacactttgatggggaggactacggattttggagtcacaaaatgcgtagtcatttattctctctccatccaagcatatgggagattgtagagaatggaatgaaatttgatagctcggatagccctatgtttattaacgaacaaattcataaaaatgcacaagctactactgtgttgctagcctctttgtgcagggacgagtacaataaggtgagcggcttggacaatgccaagcagatatgggacaccctcaagatttctcacgaggggaacgacatcaccatgctcactaaaatggagttggtggagggcgagcttggaaggtttgcaatgataaggggcgaggagccaacccaaacatacaaccggctcaagacccttatcaacaaaataaggagctacggaagcacgcgatggacggaccatgacgtcggccgcctaatgctaaggtcatttaccgttcttgatcctcatctcgtgaacaatattcgtgagaatcccaggtacacgaagatgacgcccgaggaggtactcggaaaattcgtaagcgggcggatgatgatcaaggaggcaagatacgtggacgacgccttgaatggaccgatcaatgagcctcaaccaattgctctcaaggcaacaaggagcaaggaggcgctaccaagcaaggtggcgcaagttgaggcggccgggctaaataatgaggagatggccctcatcattaagcgcttcaagacggcgcttaaaggtcgcaagggacagccaaacaagaccaagacaaaggagaagcgctcatgcttcaaatgtggtaagattggtcatttcattgctaactgtcccgataatgaaagtgaccaggaaaaggaggacaagagggaaaagaagaagcattacaagaaggccaagggcgaggcacatatcggaaaggaatgggattcggattgctcctcttccgactccgacaatgagggactcgccgccaccgccttcaacaaatcgaccctcttccccaacgagcgtcacacatgccttatggcaagggagaagaaggtatgtactcaaaaccctacctatgcttcttttagtgaggatgagtctagtgatgatgatgagatagattactcatgcttattcaagggattagatagatctaaaattgataagattaatgagttgattgatgccttgaatgacaagaatagattactagaaaaacaagaggaccttttatatgaagagcatgacaaatttgtagaagcacaaaaatcccatgctttagaagttaagagaaatgaaatgctttcttgtgaattatcttcttgccatgagacaatttctagcttaaagagcataaatgatgatttaaatgctaagctagaaaaatctagtaaattaacatcttgtgtagaacatgttgtgatttgcactaggtgtaaagactttaatgttgatgcttgtagtgaacacctcgagtgcatttctaaattaaatgatgaagtggctagtcttaatgcccaacttaagactagcaagagtgatttggataaactaaaatttgcaagggatgcctacacaattggtagacacccctcaattaaggatgggcttggcttcaagagggaagtcaagaacttgacaagccataaggctcccatctccgccaaggagaaagggaaggcccctatggctagtagtgtgcaaaagaaccatgcttttatgtaccatgataggagacaaactagaaatgcttataggagttttaatgcttatgatgattttgattctcatgtcatgtttgcttctagttcttcctatgtgcatgatagaaatgttgataggagaaatgttgttcataatatgcctaggagaaatgttgttaatgttcctagaaaagttatgaatggaccttctacaatttatcatgcactaaatgcttcctttgctatttgtagaaaggataggaaaatagttgctaggaagttaggggcaaaatgcaagggagacaaaacttgcatttgggtccctaaggaaatttgcgctaaccttgtaggacccaacatgagttgggtttatgcatccgggggttcaagctggattatcgacagcggatgcacaaaccatatgacgggggagaagaaaatgttcacctcctacgtcaggaataaggattcccaagattcaattatattcggtgatgggaatcaaggcaaggtaaaagggttagttgagtctcttggttataatttgctatctgttagtcaattatgcaacatggggtataactgcctatttacaaatgtagatgtgtctgtctttagaagaagtgatggttcactagcttttaagggtgtattagacggcaaactttatttagttgattttgcaaaagaggaggccggtctagatgcatgcttaatagctaagactagcatgggctggctgtggcatcgccgcttagcacatgtggggatgaagaaccttcacaagcttctaaagggagaacacgtgataggtttaactaacgtgcatttcgaaaaagatagaccttgtgcagcttgtcaagcaggtaaacaagtgggaggagcacatcacagcaagaatgtgatgaccacttcaagacccctggagctgctgcatatggacctcttcggacccgtcgcctatctgagcataggagggagtaagtatggtttagttattgttgatgacttttcccgcttcacttgggtgttctttttgcaggataagtctgaaacccaagggaccctcaagcgcttcctcaggagagctcaaaatgagtttgagctcaaggtgaagaagataagaagcgacaacgggtccgagttcaagaaccttcaagtggaggagttccttgaggaggaagggatcaagcatgagttctccgctccctacacaccacagcaaaatggtgtggtagagaggaagaacaggacgctaatcgacatggcgaggactatgcttggagaattcaagacccccgagcgtttttggtcggaagccgtgaacacggcttgccacgccatcaacagggtctaccttcaccgcctcctcaagaagacgtcatatgagcttctaaccggtaacaaacccaatgtatcgtactttcgtgtatttgggagcaagtgctacattctagtgaagaagggtagaaattctaaatttgctcccaaagctgtagaagggtttttgttaggttatgactcaaatacaaaggcgtatagagtcttcaacaaatcatcgggtttggttgaagtttctagcgacgttgtatttgatgagactaatggctctccaagagagcaagttgttgattgtgatgatgtagatgaagaagatgttccgacagccgctatacgaaccatggcgattggagaagtgcggccacaggaacaagatgaacgagatcaaccatcttcctcaactatggtgcatcccccaactcaagacgatgaacaggttcatcaccaggaggcgtgtgaccaagggggagcacaagatgatcatgtgatggaggaagaagcggaactggcacctccaacccaagttcgagcgatgattcaaagggatcatcccgtcgaccaaattctgggtgatattagcaagggagtaactactcgatctcgattagttaatttttgtgagcattactcctttgtctcttctattgagcctttcagggtagaggaggccttgctagatccggattgggtattggccatgcaggaggaactcaacaacttcaagcgcaatgaagtttggacactggtgcctcgtcccaagcaaaatgttgtgggaaccaagtgggtgttccgcaacaaacaagacgagcacggggtggtgacgaggaacaaggctcgacttgtggcaaaaggttatgcccaagtcgcaggtttggactttgaggagacctttgctcctgtggctaggctagaatcaattcgtatcttgctagcatatgccgctcaccattctttcaggttgtaccaaatggatgtgaagagcgctttcctcaatgggccgatcaaggaggaggtgtacgtggagcaaccccctggcttcgaggatgaacggtaccccgaccacgtgtgtaagctctctaaggcgctctatggacttaagcaagccccaagagcatggtatgaatgccttagagactttctaattgttaatgctttcaaggttgggaaagccgatccaactctttttacaaagacatgtgatggtgacttgtttgtgtgccaaatttatgtcgacgacataatatttggttctactaaccaaaagtcttgtgaagagtttagcagggtaatgacgcagaaattcgagatgtcgatgatgggcgagttgaactacttccttgggttccaagtgaagcaactcaaggacggcaccttcatctcccaaacgaagtacacgcaagacttgctaaagaggtttgggatgaaggacgccaagcccgcaaagacgccgatgggaaccgacggacacacagacctcaacaaaggaggtaagtccgttgatcaaaaagcataccggtcaatgataggttctttgctttacttatgtgctagtagaccggatattatgcttagcgtatgcatgtgtgctagattacaatccgatcctaaggagtgtcacttagtggcggtaaagcgaattcttagatatttggttgctacgccttgcctcgggctctggtatccaaaggggtctacctttgacttagttggatactcagactccgactatgctggatgtaaggtcgataggaagagtacatcggggatgtgccaattcttaggaaggtccctggtgtcatggaactctaagaaacaaacctccgttgccctatccaccgctgaggccgagtacgttgccgcaggtcagtgttgcacgcaactactttggatgaggcaaaccctccgggactttggctacaatctgagcaaagtcccactcctatgtgacaatgagagtgctatccgcatggcggagaatcctgttgagcacagccgcacaaagcacatagacatccggcatcactttttgagagaccaccagcaaaagggagatatcgaagtgtttcatgttagcaccgagaaccagctagccgatatcttcactaagcctctagatgagaagaccttttgcaggttgcgtagtgagctaaatgtcttagattcacggaacctggattga

SEQ ID NO: 4622 - DNA, 4851 bp, Zea mays
  Clone ID: TF_ZmC4916_448
atgtcgcccgaagaagttcttgggaagttcgtaagcgggcgaatgatgattaaggaggcaagatacgtggacgacgcgttgaacggtcctattcatgagcctcaacccattgctctcaaggcaacaagaagcaaggaggcactacctagcaaggtggcacaaattgaggcggtcggactaaatgatgaagagatggctctcatcatcaaacgcttcaagacggtactaaagggtcacaaggggcagccaagcaagaccaaggcaaaagggaagcgctcatgcttcaagtgcggtaagattggtcatttcatcgctaactgccctgataatgatagtgaccaggaacagggaaacaagagggaaaagaagaagaattacaagaaggcaaagggcgaggcgcatctaggcaaggagtgggactcggactgctcctcttccgactccgacaatgaaggactcgccgccaccgccttcaacaaatcaaccctcttccccaacgaatgtcacacatgccttatggcaagagagaagaaggtatgtactcggaattctacctatgcttcttcaagtgaggacgaatctagtgatgaggatgaagtagattactcatgtttgtttaagggcctagatagaaccaaggtagacaaaattaatgaattaattgatgccttgaatgataagaacatacttttagaaaagcaagaggatttgttgtatgaagaacatgataaatttgtagaagctcaaagatctcatgctctagaagttaaaagaaatgaaatactttcttgtgaattatcttcttgccatgatacaatttctaaattaaggagcatcaatgatgatttgaatgctaagttagagattgctagtaaatccacctcttgtgtagaaaatgttgtagcatgctctaggtgtaaagatattaacattgatgtttatagtgaacacctagcttgcatttctaaattaaatgaagaggtagctagtctgaatgcccaacttaagactagcaaaagtgattttgaaaaactaaaatttgcgagggatgcctacacggttggtagacacccctcaattaaggatgggcttggcttcaagaaggaagccaagaacttaacaagccataaggctcccatctccgccaaggagaaagggaaggcccctatggcaagtagcactaaaaggaatcatgcttttatatataatgataggagacaaactagaaatgcttgtaggagttataatgcttatgatgattttaactcacatgccatgtttgcttctagttcttcctttatgcatggtagaaatatgcctagaaagaatattattcatgctcctaagaaagtagtgaatgaaccttctacaatttattgtgctttaaatgcttcctttgctatttgtagaaaggataagaaaattgttgctaggaagttaggggcaaaatgcaagggagacaaaacttgcatttgggtccctaaggatatttgcactaaccttgtaggacccaacatgagttgggtttatgcatccaggggttcaagctggattatcgacagcggatgcacaaaccatatgacgggggagaagaagatgttcacctcctacgtcaagaataaggattcccaagattcaatcatattcggtgatgggaatcaaggcaagggcgacgtgggggttcctccgaagccgaggttgagtctgccttccgttgccgtggccgagcccgagccaaggggtcgggcgaggcggaagtcgttcggccgaggccagggcggagtccgagccctggggtcgggcgaagcggagtttcgtcgtcttccgggtgttagcccgagtccgagccctggggtcgggcggagcggagttcgccgtcttccgggtcttagcccgagtccgagccctggggtcgggcggagcggagttcgccgtcttccgggtcttagcccgagtccgagccctggggtcgggcggagcggagttcgccgtcttccgggtcttagcccgagtccgagccctggggtcgggcggagcggagttcgccgtcttccgggtcttagcccgagtctgagccctggggtcgggcggagcggagttcgccgtcttccggtcggagtggcgcaggcggcgctgtccttctgtcagactggccagtggagcggtggagtgacggcggtcacttcggctctgccgagggcgcgtgtcaggatagaggtgtcaggccacctttgcgttaaatgcccctgcaatttggtcagtcggtgtggcgatttagtcaaggtggcttctgagcgaagccaaggcctcgggcgagccggtgatgtgtccgccataaaaagggggcctcgggcgagacggaagtctctcgaggataagtctgaaacccaagggaccctcaagcgcttcctcaggagggctcaaaatgagtttgagctcaaggtgaaaaagataaggagcgacaacgggtccgagttcaagaaccttcaagtggaggaattccttgaggaggaagggatcaagcacgagttctccgctccctacacaccgcagcaaaatggtgtggtagagaggaagaacaggacgctcatcgatatggcgaggacgatgctaggagagttcaagacccccgagtgcttttggacggaagccgtgaacacggcttgccatgccatcaacagggtctaccttcaccgcctcctcaagaagacttcgtatgagctgctaaccggtaacaaacccaatgtatcttactttcgtgtatttgggagcaagtgctacattctagtgaagaaaggtagaaattctaagtttgctcccaaagcagtagaagggtttttattaggttatgactcaaatacaaaggcgtatagagtcttcaacaaatcatcgggtttagttgaagtctctagcgacgttgtatttgatgagactaatggctctccaagagagcaagttgttgatcttgatgatgtagatgaagaagatgttccaacggccgctatgcgcaccatggcgattggtgatgtgcgaccacaggaacacttggagcgagatcaaccttcttcctcaactatggtgcatcccccaactcaagacgatgaacaggttcatcaacaggaggcgtgtgatcaagggggagcacaagttgatcatgtgatggaggaagaagcgcaaccggcacctccaacccaagttcgagcgatgattcaaagggatcatcccgtcgaccaaatactgggtgacattagcaagggagtaactactcgatctcgattagttaatttttgtgagcattactcctttgtctcttctattgagcctttcagggtagaggaggccttgctagatccggactgggtattggccatgcatgaggagctcaacaacttcaagaggaatgaagtttggacactggtgcctcgtccgaagcagaatgttgtgggaaccaagtgggtgttccgcaacaaacaggacgagcacggggtggtgacgagaaacaaggctcgacttgtggcaaaaggttatgcccaagtcgcaggtttggatttcgaggagacttttgctcctgtggctaggctagaatcaattcgtatcttgctagcatatgccgctcatcattctttcaggctgtaccaaatggatgtgaagagcgccttcctcaacgggccaatcaaggaggaggtgtacgtggagcaaccccctggcttcgaggatgaacggtaccccgaccatgtgtgtaagctctctaaggcgctctatggacttaagcaagccccaagagcatggtatgaatgccttagagactttctaattgttaatgctttcaaggttgggaaagccgatccaactctttttacaaagacatgtgatggtgatttgtttgtgtgccaaatttatgtcgatgacataatatttggttctactaaccaaaagtcttgtgaagagtttagcagggtgatgacgcagaaattcgagatgtcgatgatgggcgagttgaactacttccttgggttccaagtgaagcaactcaaggacgacaccttcatctcccaaacgaagtatacgcaagatctgctaaagcggtttgggatgaaggacgccaagcctgcaaagactccgatgggaaccgacggacacaccgacctcaacaaaggaggtaagtccgttgatcaaaaagcataccggtccatgataggttctttgctttatttatgtgctagtagaccggatattatgcttagcgtatgcatgtgtgctagatttcaatctgatcctaaggagtgtcacttagtggcggtgaagcgaattcttagatatttagttgctacgccttgcttcgggctctggtatccaaaggggtctacctttgacttggttggatactcagattccgactatgctggatgtaaggtagataggaagagtacatcggggacgtgccaattcttaggaaggtccctggtgtcgtggaactctaagaaacaaacttctgttgccctatccaccgctgaggccgagtatgttgccgcaggacagtgttgcgcgcaactactttggatgaggcaaaccctcagggactttggctacaatctgagcaaagtcccactcctatgtgataatgagagtgctatccgcatggcggaaaatcctgttgagcacagccgcacaaagcacatagacatccggcatcactttttgagagaccaccagcaaaagggagatatcgaagtgtttcatgttagcaccgagaaccagctagccgatatctttaccaagcctctagatgagaagaccttttgcaggctgcgtagtgagctaaatgtcttagattcgcggaacttggattga

SEQ ID NO: 4623 - DNA, 2081 bp, Zea mays
  Clone ID: TF_ZmC4916_451
atggatcctaaggggaagggaattgtgatcaacgacaaggagaaggagtctttcgtcaatgagccaagggatgacaaatccaacaactcgggctcgggccacaagcgaaaagatgggaagaagaagaagacaagacgcatcaaggagatcgtctactacgacagcgatgagtcctcttcttcccaaaaggacgacgacaacgactacaggaagacggtcaattcgaacttttcgtttgattattctcgtattccacatagttcgaattcgcatttgctttccattcctcttggtaaacctccacactttgatggggaggactacggattttggagtcacaaaatgcgtagtcatttattctctctccatccaagcatatgggagattgtagagaatggaatgaaatttgatagctcggatagccctatgtttatcaatgaacaaattcataaaaatgcacaagctactactgttctcttagcatctttgtgcagggaagagtacaataaggtgagcggcttggacaatgccaagcagatatgggacaccctcaagatctctcacgaggggaacgacatcaccatgctcaccaagatggagttagtggagggcgagcttggacgattcgccatgataaggggagaagagccaactcaaacttacaaccggctcaagacccttatcaacaagataaggagctacggaagcacgcgttggacggatcacgacgtcgtccgcctaatgctcaggtcatttactgttcttgatcctcatctcgtgaacaatattcgtgagaatcccaggtacacgatgatgacgcccgaagaagtacttggaaaattcgtgagcgggcggatgatgatcaaggaggctagatatgtcgacgacgcgttgaacggtccactccacgagtctcaacccattgctctaaaggcaacaagaagcaaagaggcgctacctagcaaggtggcacaaattgaggcggccggactcaatgatgaagagatggctctaatcatcaaacgcttcaagacggtgctaaaaggtcacaaggggcagccaagcaagaccaagacaaaggggaagcgctcatgcttcaagtgcggtaagattggtcattttatcgctaactgccccgataacgatagtgaccaggaacagggaaacaagagggaaaagaagaagaattacaagaaggccaagggcgaggcacatctcggcaaggagtgggattcggattgctcctcctccgactccgacaatgagggactcgccgccactgccttcaacaaatcggctctcttccccaacgagcatcacacttgcctcatggcaagggaaaagaaggtaatcactcataatgctaatacttatgattcttctagtgatgatgaatctagtgaggatgaaattgattactctagtttattcaagggattggatagaactaagatagctaagattaatgagttgattgatgccttaaatgaaaaggatagaatcttagagaaacaagaagaccttttatatgaagaacatgataaatttgttagtgcacaaaattcacttgctttagaagttaaaagaaatggaatactttctggtgaactttctacttgtaatgaaactatttcttctttaaaaggtgaaattgatgttttaactgctaaactagaagtagcaagtaactcctgtgttgaaaatattacaatttgcactaggtgtaaggattttgatgttaatgcttgtagtgaacacttagtctcaatttcaaaactaaatgatgaagtggctagtcttaatgctcaacttaagactagcaagagtgaagttgataaaataaaatttgcaagggatgcctacacggtcggtagacatccctcaattaaggatggtcttggcttcaagagagaggccaagaacttaacaagccataaggctcccatcctcgtcaaggagaaagggaaggcccctatggctagtagtgctaaaaggaaccatgctttcttgtaccatgataagagacatgctagaaatgcttataataattttgattcacatgcttatgattctcatgccat

SEQ ID NO: 4624 - DNA, 4080 bp, Zea mays
  unsure (1)..(4080): unsure at all n locations
  Clone ID: TF_ZmC4916_456
atggatcctaaagggaagggaatcgtgatcaacgacaaggaggagtccttcgtcaacgagccaagggaagacatgtccaacgactcgggctcgggccacatacgcaaagatgggaagaagaagaagacaagacgcatcaaggagatcgtctactacgacagcgatgagtctacttcctcccaaaaggacgacgaccacaacgaatacgagagaaagaaaccggtcaattcgaacttttcttttgattactctcgtattcctcaaagtactaatgctcatttattatctattccacttggtaaacctcctcattttgatggagaggactacggattttggagtcacaaaatgcgtagtcacttgttctctctccatcctagcatatgggagattgtagaaagtggaatgcactttgatagtacggatagtcccatgtttattaatgaacagattcataaaaatgcacaagctactactgtgttgctagcctctttgtgcagggacgagtaccataaggtgagcggcttggacaatgccaagcagatctgggacaccctcaagatctctcatgaggggaatgatgtcaccttgctcaccaagatggagttggtggagggcgagcttggacggttcgcaatgataaggggcgaggagccaactcaaacatacaactggctcaagacccttatcaacaaaataaggagctacggaagcacgcgatggacggatcacgacgtcgtccgtctaatgctaaggtcctttaccgttcttgatcctcatttggtgaacaatattcgtgaaaatcctaggtacaccaagatgtcgcctgaagaagttctggggaagttcgtaagcgggcgaatgatgatcaaggaggcaagatatgtggacgacgcgttgaacggtcctattcatgagcctcagcccactgctctcaaggcaacgaggagcaaggaggcgctaccgagcaaggtggcgcaagttgaggcggccgggctaaataatgaggagatggccctcatcattaagcgcttcaagacggcgcttaaaggtcgcaagggacagccaagcaagaccaagacaaaggagaagcgctcgtgcttcaaatgtggtaagattggtcatttcattgctaactgtcccgataatgaaagtgaccaggaaaaggggaacaaaagggagaagaagaagcattacaagaaggccaagggcgaggcacatatcggaaaggagtgggattcggattgctcctcctccgactccgacaatgaaggactcgccaccaccgccttcaacaagtcatccctcttccccaacgagcgtcacacttgcctcatggcaagggagaagaaagtaagcactcatgatactagtacttatgcttcttcaagtgaggatgagtctagtgatgatgatgagatagattactcatgcttattcaagggattagatagatctaaaattaataagattaatgagttgattgatgctttgaatgacaagaatagattactagaaaaacaagaggatcttttatatgaggagcatgataaatttgttagtgcacaaaattctcttgctctagaaattaaaaggaatgaaattctctctagtgaattatctacttgtcatgaatccatctctaaattaaaaagtgttaatgatgatttgaatgctaagttagaaatagctagtaaatcaacatcttgtgtagaaattgttgaaacttgcaataggtgtaaagattttgacattgatgcttgtagtgaacatctagttttaatttccaaacttaatgatgaattgtctagtcttaatgctcaacttaagactagcaagagcaattttgataagctaaaatttgcaagggatgcctacacaattggtagacacccctcaattaaggatggacttggctacaagaaggaagccaagaacttgacaagccataaggctcccatctccgccaaggagaaagggaaggccccctatggctattcttcttatgtgcatgatagaaatgttggtaggagaaatgttgttcataatatgcctaggagaaatgttgttaataggaaagtttatgcatccgggggttcaagctggattatcgacagcggatgcacaaaccatatgacaggggagaagaagatgttcacctcctacgtcaagaataaggattcccaagattcaattatattcggtgatgggaatcaaggcaaggataagtctgaaaaccaagggaccctcaagcgcttcctcaggagagctcaagatgagtttgagctcaaggtgaagaagataaggagcgacaacggatccgagttcaagaaccttcaagtggaggagttccttgaggaggaagggatcaagcacgagttctccgctccctacacaccacagcaaaatggtgtggtagagaggaagaacaggacgctaatcgatatggcgaggacgatgcttggagaattcaagacccccgagcgtttttggtcggaagccgtgaacacagcttgccacgccatcaacagggtctaccttcaccgcatcctcaagaagacgtcgtatgagctgctgaccggtaacaaacctaatgtatcgtattttcgtatttttgggagtaaatgctacattctagtgaagaagggtaggaattccaaatttgctcccaaagccgtagaagggtttttattaggttatgattcaaatacaaaggcgtatagggtcttcaacaaatcatcgggtttggttgaagtctctagcgacgttgtatttgatgagactaatggctctccaagagagcaagttgttgatcttgatgatgtagatgaagaagacgttccaacggccgcgatacacaccatggcgattggagatgtacggcctcaagaacatttggagcaagatcaaccatcttcctcaactatggtgcatcccccaacccaaggtgacgaacaggtacctcaagtggaggcgcatgatccagggggagcacaggatgttcaagttgaagaggaagaagcacctcaggcacctctaacccaagttcgagcgacgattcaaagggatcatcccgtcgaccagatattaggtgatattagcaagggagtaactactcgctcgagattagttaatttttgtgagcattactcttttgtctcttctattgagcctttcagggtagaagaggccttgctagatccggactgggtgttggccatgcaggaggaactcaacaacttcaagcgcaatgaagtttggacattggtgcctcgtcccaagcanaatgttgtgggaaccaagtgggtgttccgcaacaaacaggacgatcacggggtggtgacgaggaacaaggctcgacttgtggcaaaaggttatgcccaagtcgcaggtttggactttgaggagacttttgctcctgtggctaggctagagtcaatttgcatcttgctagcatatgccgctcaccattctttcaggttgtaccaaatggatgtgaagagcgctttcctcaacgggccgatcaaggaggaggtgtacgtggagcaaccccctggcttcgaggatgaacggtaccccgaccacgtgtgtaagctctctaaggcgctctatggacttaagcaagccccaagagcatggtatgaatgccttagagactttttaattgctaatgctttcaaggttgggaaagccgatccaactctttttactaagacttgcgatggtgatctttttgtgtgccaaatttatgtcgatgacataatatttggttctactaaccaaaagtcttgtgaagagtttagcagggtgatgacgcagaaattcgagatgtcgatgatgggcgagttgaactacttccttgggttccaagtgaagcaactcaaggacggcaccttcatctcccaaacgaagtacacgcaagatttgctaaagaggtttgggatgaaggacgctaagcccgcaaagacgccgatgggaaccgacggacacaccgacctcaacaaaggtgtagaccggatattatgcttagcgtatgcatgtgtgctaggtttcaatccgatcctaaggagtgccacttag

SEQ ID NO: 4625 - DNA, 5532 bp, Zea mays
  Clone ID: TF_ZmC4916_458
atggatcctaagggaaaggggatggtggtcgacaacaacgagaaggagtctatcttcaacgagccgaagaatgacaagtctaccgacttgggttcaagccacaagcgcaaagatgggaagaagaagaagacaaggcgcatcaaagagatcgtctactacgacagcgacgaatcctcttcttcccaaaaggacgacgaccacaacgactacgagcaaaggaaaccggttaattctaacttttcttttgactactctcgtattccgcaaagctcaaattcacatttgctttccattccactcggcaagcccccacactttgatggggaggactacggattttggagccacaaaatgcgtagtcacctattctctctccatcctagtatatgggagattgtagatagtggaatgcactttaatagttcggatagtcctatattcattaatgagcaaatccataagaatgcacaagctactactgttcttctagcttcattgtgcagggatgaatataacaaagtgagtggcttggataacgccaagcaaatctgggataccctcaagatctctcatgagggaaatgacgctaccttgctcaccaaaatggagttggtggagggagagcttggacggttcgcgatgataaggggcgaggagccaactcaaacatacaaccggctcaagacccttatcaacaaaataaggagctacggaagcacgcgatggacggaccacgacgtcgtccgactaatgctaaggtcctttaccgttcttgatcctcatttggtgaataatattcgtgagaatcccaggtacaccaaaatgtcgcctgaagaagtcttaggaaaattcgtcagcgggcgaatgatgatcaaggaagcaaggtacgtggacgacgccttaaatggaccgatcaacgagccgcaaccttttgctctcaaagcaacaagaagcaaggaggtgctacctagcaaggtggcacaaatcgaggcggccggacttaatgatgaggagatggctctcatcattaaacgcttcaagacggttctaaagggtcacaaggggcagccaagcaagaccaagacaaaagggaagcgctcatgcttcaagtgcggtaagattggtcattttatcgctaactgccccgataatgatagtgaccaggaacagggaaataagagggaaaagaagaagaattacaagaaggcaaagggcgaggcgcatctaggcaaggagtgggactcggattgctcctcttccgactccgacaatgaaggactcgccgccaccgccttcaacaaatcaaccctcttcccaaacgagcgtcacacatgccttatggcaagggagaagaaggtatgtactcgcaactctacctatgcttcttcaagtgaggacgaatcaagtgatgaggatgaagtagattattcatgtttgttcaagggcttagatagatctaagatagataaaattaatgaattaattgatgccttgaatgaaaagaatatacttttagaaaagcaagaggatttgttgtatgaagaacatgataagtttgtagaggctcaaaaatcccttgcattagaaattaaaaggaatgaaatgcttgcttgtgaattgtctacatgccatgattctatttctaaattaaagagcattaatgatgacttaaatgctaaactagtagaagcacataaatctaactcttgtgttgaacatgttgaaatttgcactaggtgtaaggatgttgacattaatgcttgtagtgaacacttagtttccatttcaaaattgaatgatgaattagctagtcttaatgcccaacttaagactagcaaaagtgattttgataaactaaaatttgctagggatgcctacatggttggtagacacccctcaattaaggatgggcttggcttcaagagggaagccaagaacttaacaagccataagactcccatctccaccaaggagaaagggaaggctcctatggctaatagtgttaagaagaaccatgctttcatgtactatgataggagatattctagaaatgcttttagaggtcatgatgtttttgattcacatgcttatgactcttatgctatgactgcttctagttctcatgttatgcatggtagaaatatgcttagaagaaatgttgttcatcaaatgcctataaagaatattactcatgctcctaggaaagtagtaaatgaactttctacaatttattgtgctttaaatgcttcctttgctatttgtagaaaggataagaaaattgttgctaggaagttaggggcaagatgcaagggagacaaaacttgcatttgggtccctaaagatatttgtgctaaccttgtaggacccaacatgagttgggtttatgcatccgggggttcaagctggattattgacagcggatgcacaaaccatatgacgggggagaagaagatgttcacctcctacgtcaagagtaaggattcccaagattcaattgtattcggtgatgggaatcaaggcaaggtaaaagggttagtagagtctcttggttataatttgctatctgttagtcaattatgcaacatggggtataactgtctatttacaaatgtagatgtgtctgtctttagaagaagtgatgattcactagcttttaagggtgtattagatggcaagctttacttagttgattttgcaaaagaagaggccggtctagatgcatgcttaatagctaagacttgcatgggctggttgtggcatcgccgcttagcacatgtggggatgaagaaccttcacaagcttctaaagggagaacacgtgataggattgactaatgtaaaattcgaaaaagatagaccttgtgcagcttgtcaggcaggtaaacaagtgggaggagcgcatcacagcaagaatgtgatgaccacttcaagacccctggagctgctgcatatggacctcttcggacccgtcgcctatctgagcataggagggagtaagtatggtctagttattgttgatgacttttcccgcttcacttgggtgttctttttgcaggataagtctgaaacccaagggaccctcaagcgcttcctcaggagagctcaaaatgagtttgaactcaaggtgaagaagataaggagcgacaacgggtccgagttcaagaaccttcaagtggaagagtttcttgaggaggaagggatcaagcacgagttctccgctccctacacaccacagcaaaatggtgtggtagagaggaagaacaggacactaatcgacatggcgaggacgatgcttggagaatttaagacccccgagcggttttggtcggaagccgtgaacacggcttgccacgccatcaacagggtctaccttcaccgactcctcaagaagacgtcgtatgaactactaaccggtaacaaacccaatgtatcttactttcgtgtatttgggagcaagtgctacattctagtgaagaaggttagaaattcaaaatttgctcccaaagctgtagaagggtttttgttaggttatgactcaaatacaaaggcgtatagagtcttcaacaaatcatcgggtttggttgaagtctctagtgatgttgtatttgatgagactaatggctctccaagagagcaagttgttgatcttgatgatgtagatgaagaagatgttccgacggccgctatacgaaccatggcgattggtgatgtgcgaccacaggaacaagaagagcaagatcaaccttcttcctcaactatggtgaatcccccaactcaagacgatgaacaggttcatcaacaggaagcgtgtgatcaagggggagcacaagatgatcatgtgatggaggaagaagcacaactggcacctccaacccaagttcgaacgatgattcaaagggatcatcccgttgaccaaattctgggtgacattagcaagggagtaactactcggtctcgattagttaatttttgtgaacattactcctttgtctcttccattgagcctttcagggtagaggaggccttgctggatccggactgggtgttggccatgcaggaggagctcaacaacttcaagcggaatgaagtttggacactggtgcctcgtcctaagcaaaatgttgtgggaaccaagtgggtgttccgcaacaaacaagacgagcacggagtggtgacgagaaacaaggctcgacttgtggcaaaaggttatgcccaagtcgcaggtttggatttcgaggagacttttgctcctgtggctaggctagaatcaattcgtatcttgctagcatatgccgctcatcattctttcaggttgtaccaaatggatgtgaagagcgctttcctcaacgggccaatcaaggaggaggtgtacgtggagcaaccccctggcttcgaggatgaacggtaccccgaccatgtgtgtaagctctctaaggcgctctatggacttaagcaagccccaagagcatggtatgaatgccttagagactttctaattgttaatgctttcaaggttgggaaagccgatccaactctctttacaaagacatgtgatggtgatttgtttgtgtgccaaatttatgtcgatgacataatatttggttctactaaccaaaagtcttgtgaagagtttagcagggtgatgacgcagaaattcgagatgtcgatgatgggcgagttgaactacttccttgggttccaagtgaagcaactcaaggacggcactttcatctcccaaacgaagtacacgcaagatctgctgaagcggtttgggatgaaggacgccaagcccgcaaagactccgatgggaaccgacggacacaccgacctcaacaaaggaggtaagtccgttgatcaaaaagcataccggtcaatgataggatcattactttacttatgtgctagtagaccggatattatgcttagtgtatgcatgtgtgctagatttcaatccgatcctaaggagtgtcacttagtggcggtgaagcgaattctgagatatttagttgctacgccttgccttgggctctggtatccaaaggggtctacttttgacttagttggatactcagattccgactatgctggatgtaaggtcgataggaagagcacatcggggacgtgccaattcttaggaaggtccctggtgtcatggaactctaagaaacaaacctctgttgccctatccaccgctgaggccgagtatgttgccgcaggacagtgttgcgcgcaactactttggatgaggcaaaccctcagggactttggctacaatctgagcaaagtcccactcctatgtgataatgagagtgctatccgcatggcggaaaatcctgttgagcacagccgcacaaagcacatagacatccggcatcactttttgagagaccaccagcaaaagggggatatcgaagtgtttcatgttagcaccgagaaccagctagccgatatctttaccaagcctctagatgagaagaccttttgcaggctgcgtagtgagctaaatgtcttagattcgcggaacttggattga

SEQ ID NO: 4626 - DNA, 5091 bp, Zea mays
  Clone ID: TF_ZmC4916_459
atggatcctaaggggaagggaatcgtgatcaacgataaggagaaggagtccttcgtcaatgagctcaaagatgacaagcctaccgactccggctcgggtcatagacgaaaggaagggaagaagaagaagacgaggcgcatcaaggagatcgtctactacgacgacagtgatgagtctacttcttcccaaaaggacgacgaccacaacgactacgagcaaaggaaaccggttaattctaacttttcctttgactactctcgtattccgcaaagctcaaattcacatttgctttccattccactcggcaagcccccacactttgatggggaggactacggattttggagccacaaaatgcgtagtcacctattttctctccatcctagtatatgggagattgtagatagtggaatgcactttaatagttcagatagtcctatattcattaatgagcaaatccataagaatgcacaagctactactgttcttctagcttcattgtgcagggatgaatataacaaagtgagtggcttggataacgccaagcaaatctgggataccctcaagatctctcatgagggaaatgacgctaccttgctcaccaaaatggagttggtagagggcgagcttggacggttcgcgatgataaggggcgaggagccaactcaaacatacaaccggctcaagacccttatcaacaaaataaggagctacggaagcacgcgatggacggaccacgacgtcgtccgactaatgctaaggtcctttaccgttctcgatcctcatttggtgaataatattcgtgagaatcccaggtacaccaaaatgtcgcccgaagaaattcttggaaaatttgtaagcgggcggatgatgatcaaggaggcaaggtacgtcgatgacgcgttgaacggtccaatccacgagcctcaacccattgctctcaaggcatcgagaagcaaggaggcactaccaagcaaggtggcgcaaattgaggcggccgggcttaatgatgaagaaatggctctcatcattaagcgcttcaagacggcgttaaggggtcgcaaggagcatcccaacaagaccaagacaaaggggaagcgctcatgcttcaagtgtggtaagattggtcactttattgctaattgtcccgataatgatagtgaccaggaaaagaagagtgggaaatgggaaaagaagaagaattacaagaagacaaagggcgaggctcatattggaaaggagtgggattcggattgctcctcatccgactccgacaacgaaggactcgccgccaccgccttcaacaaatcaaccctcttcccaaacgagcgtcacacatgccttatggcaaaggagaagaaggtatgtactcgcaactctacctatgcttcttcaagtgaggacgaatctagtgatgaggatgaagtagattattcatgtttgttcaagggcttagacagatctaagatagacaaaattaatgaattaattgatgccttgaatgaaaagaatatacttttagaaaagcaagaggatttgttgtatgaagaacatgataagtttgtagaggctcaaaaatcccttgcattagaaattaagaggaatgaaatgcttgcttgtgaagtgtcaacatgccatgattctatttctaacttaaaaagcataaacgatgatttaaatgctaaactagtagaagcaaataaatccaactcttgtgttaaacatgttgaaatttgcactaggtgtaaggatgttgatattaatgcttgtagtgaacacttagtttacatttcaaaattgagtgatgaagtggctagtcttaatgctcaacttaagactagcaaaagtgattttgaaaaactaaaatttgctagggatgcctacacggttggtagacacccctcaattaaggatggacttggcttcaagagggaagccaagaacttaacaagccataaggctcccattcccgccaaggagaaagggaaggcccctatggctactagtgctaaaaggaaccatgcctttttgtatcatgataaaagacaaactagaagttatgatgcttttgattcatatgtttatgattctcatgccatgtttgctcctagttcttcttatgtgtatgatagaaatgttactaggagaaatgttgttcctaaaagaaatgttgcaaatgttcatagaaaagtagtgaatgaaccctctacaatttattgtgctttgaatgcttcatttgcaatttgtagaaaggatagaaaagtaattgctaggaagttaggggcaaaatgcaaaggtgataaaacttgcatttgggtccctaaggaaattgtgactaaccttgtaggacccaacaagagttgggtttatgcatccgggggttcaagctggattatcgacagcggatgcacaaaccatatgacgggggagaagaaaatgttcacctcctacgtcaagaataaggattcccaagattcaattatattcggtgatgggaatcaaggcaaggtaaaaggtttagatgtgtctgtctttagaagaagtgatggttcactagcttttaagggtgtattagacggcaaactttatttagtagattttgcaaaagaagaggaaaagtccgaaacccaagggactctcaaacgcttcctcaggagagctcaaaatgagtttgagctcaaagtgaagaagataaggagcgacaacggatccgagttcaagaaccttcaagtggaggagttccttgaagaggaagggatcaagcacgagttctccgctccctacacaccacagcaaaatggtgtggtagagaggaagaacaggacgctcatcgatatggcgaggacgatgctaggagagttcaagacccccgagtgcttttggacggaagccgttaacactgcttgccacgccatcaacagggtctaccttcatcgcctcctcaagaagacgtcgtatgagctactaaccggtaacaaacccaatgtatcatactttcgtgtatttgggagtaaatgctacattctagtaaagaagggtagaaattctaagtttgctcccaaagctgtagaagggtttttgttaggttatgactcaaatacaaaggcgtatagagtcttcaacaaatcatcgggtttggttgaagtctctagcgacgttgtatttgatgagactaatggctctccaagagagcaagttgttgattgtgatgatgtagatgaagaagatgttccgacggccgctatacggaccatggcgattggagaagtacggccacaggaacaagataaacgagatcaaccttcttcctcaactatggtgcatcccccaaccaaagatgacgaacaggtacctcaagtggaggcgcttgatcaagggggagcacaagatgatcaagtgatggaggaagaagcgcaaccggcacctccaacccaagttcgagcgatgattcaaagggatcatcccgtcgatcaaattctgggtgacattagcaagggagtaactactcgatctcgattagttaatttttgtgagcattactcctttgtctcttctattgagcctttcagggtagaggaggccttgctagatccggattgggtattggccatgcaggaggagctcaacaacttcaagcgcaatgaagtttggacactggtgcctcgtccgaagcaaaatgttgtgggaaccaagtgggtgttccgcaacaaacaggacgagcacggggtggtgacgaggaacaaggctcgacttgtggcaaaaggttatgcccaagtcgcaggtttggactttgaggagactttcgctcctgtggctaggctagagtccattcgtatcttgctagcatatgccgctcaccattctttcaggttgtaccaaatggatgtgaagagcgctttcctcaacgggccaatcaaggaggaagtgtacgtggagcaaccccctggcttcgaggatgaacggtaccccgaccatgtgtgtaagctctctaaggcgctctatggacttaagcaagccccaagagcatggtatgaatgccttagagactttttacttgctaatgctttcaaggttgggaaggccgatccaactctttttacaaagacatgtgatggtgatttgtttgtgtgccaaatttatgtcgatgacataatatttggttctactaaccaaaagtcttgtgaagagtttagcagggtgatgacgcagaaattcgagatgtcgatgatgggcgagttgaactacttccttgggttccaagtgaagcaactcaaggacggcaccttcatctcccaaacgaagtacacgcaagatctgctaaagcggtttgggatgaaggacgccaagcccgcaaagactccgatggggaccgacggacacaccgacctcaacaaaggaggtaagtccgttgatcaaaaagcataccggtcaatgataggttctttgctttatttatgtgctagtagaccggatattatgcttagcgtatgcatgtgtgctagatttcaatccgatcctaaggagtgtcacttagtggcggtgaagcgaattcttagatatttggttgctacgccttgcttcgggctctggtatccaaaggggtctacctttgacttagttggatactcagactccgactatgctggatgtaaggtcgataggaagagtacatcggggacgtgccaattcttaggaaggtccctggtgtcatggaactctaagaaacaaacatccgttgccctatccaccgctgaggccgagtacgttgccgcaggtcagtgttgcgcgcaactactttggatgaggcaaaccctccgggactttggctacaatctgagcaaagtcccactcctatgtgacaatgagagtgctatccgcatggcggagaatcctgttgaacacagccgcacaaagcacatagacatccggcatcactttttgagagaccaccagcaaaagggagatctcgaagtgtttcatgttagcaccgagaaccagctagccgatatcttcactaagcctctagatgagaagaccttttgtaggttgcgtagtgagctaaatgtcatagattcgcggaacctggattga

SEQ ID NO: 4627 - DNA, 3584 bp, Zea mays
  Clone ID: TF_ZmC5924_1
ccagccttgagttgcagcggcccggggtgcggcgggccacctgaaaaaacccttgcgccgctgagctgagtccccttcccttctctcgtcgcctccgcctccgccttcagtttagcctccaagcaggggcgccgcgcggggtattctgtccgtcgttgaggatagagagtcacttgcaccgggggagcggagatgaagccggttgtggggatcgtggtgtcgaacaagatgcagaagtcggtggtggttgcagtggaccgcctcttccacaacaaggtatacaaccgctacgtcaagcgcacctccaagttcatggcacacgacgatgacaacacctgcaacattggcgaccgggttaggctggatccttctaggcccttgagcagacacaagcactgggttgttgctgaaattctccgcagagctaaggtgtacgttccaccagctgcaacagcgtccagtgaacgtggtagcaaatctcaacaagctggtggtgctaccaaatgatccatctgaagttactcagaacaagatgcagtcacggcttgtttttctttcgctgtatgtttgtttccttgtggaatgtggttgccatgtttagcatgggagaaaaaatagcaagcagccagcatctttgcttaattactgttgttcttctgtggtgtccttcgtttaacggtactagccattaaggatgtagttaccagattcaacaagaccaatggattcatattgtattggttcacttccgatacccgcttgcatttgcatgtatggttggcagctgtctttgcaactcccctctgacactgaattgagcgggtcggaaaacatgagtgcatagtacatgtcaaactgatccagggggagtcgtgactagctgaaaaaggtctatctttgtcgaaagatacatttgttagacctaacacatgttccccctttagaagcttatgaaggttcttcatcccaacatgtgctagacggcgatgccacagccagcccatgctagtcttagcaattaagcatgcatctagaccggcctcttccttcgaaaaatcaactaaataaagtttgtcgtctagtacacccttaaaagctaatgaaccatcacaccttctaaagatggacacatctacattggtaaataaacaattgtaacccatattacagagttgactaacggacaacaagttatacccaagcgattcaactaaaaacacattagagatggaatgctcggatgaaatagctatttttcctagtcctttaaccttgccttgattcccgtcaccgaatatgattgaatcttgggaatctttgttcttgacgtaggaggtgaacatcttcttctcccccgtcatgtggtttgtgcatccgctgtcgataatccagcttgagcccccagatgcataaacccaactcttgttgggtcctgcaaggttagtaacaatagccttagggacccaaatgcaagtcttgtctcccttgcatttggcccccacctttttagcaatcactttttcatttatgcatgagagaacaaatttagcattgcaagcatgaaagacagtggtagatccattacacactttactaggagcgtgagacacaaagtttctcctacgatgaataatatttttcttaggcatatctctatcgtgcacaaaggaagaacttgaagcaatcatggcatgtgagtcaaaaacattataactcctattataatgagaatttctagaatatttcctatcatggtacatgaaagcatggttcttttgactattactagtcataggagccttccctttttccttgttgaaaatgggagccccttgacttgttaagttcttggcttccctcttaaagccaagcccatccttaattgaggggtgtctaccaatagtgtaggcatcccttgcaaattttagtttatcaaagtcattcttgctagtcttaagttgggcattaagactagccacttcaccatttaattttgcaatagaagtaagatgctcaacacatgcatcaacattaaattccttacacctattacaaattactacatgttcaatacatgagctagatttatttgctacttctaacttagcatttaagtcatcattgacactctttagactagaaatagactcatgacaagtagataattcacatgaaagcatttcatttcttttgacttctaaagcaagagacttttgcacacttacaaatttatcatgctcttcatataaaagatcctcttgcttctctagcaatctatttttctcattcaaggcatcaattaattcattgatcttatcaattttagttctatctaaacctttgaataaactagcatagtctacttcatcatcactagactcatcatcacttgaagaagcatacgtaatagtacttctagtatttaccttcttctcctttgccatgaggcatgtgtgatgctcgttggggaagagagccgacttgttgaaggccgaggcggcgagtccttcgttgtcggagtcggacgaggagcaatccgagtcccactcctttccaaggtgtgcctcgcccttcacctttttgtaggccttcttcttttcccacttcctgctctttccttgttcttggtcactatcattatcgggacagttagcaatgaagtgaccaatcttaccacacttgaagcaggagcgctttcccttcgtcttgctcttgttgggatgctctttgcgacctttgagcgccgtcttgaagcgcttgatgatgagggccatttcatcctcatttagcctggccgcctcgacttgcgccactttgctaggtagcgcctcactgctacttgttgctttgagagcaacagtttgaggctcgtggattgggccattcaacgcctcatcaacatatcttgcctccttgatcatcattcgcccacttacaaactttccgagtatttcctcgggcgtcattttggtgtacctaggattctcatgaatagagttaacaagatgaggatcaaggatagtgaaggaccttagcataagccgaacgacgtcatggtccgtccatctcgtgcttccgtagcttcttattttgttgaccagggtcttgagcctattgtacgtttgggttggctcctcccccctgatcattgcgaaccttcctagttcgccttccaccaactccattttggtgagcatagtgacgtcgttcccctcatgcgagatcttgagggtgtcccaaatctgcttggcgttgtccaagccgctcaccttatgatattcatccctgcacaatgatgcaagaggaatggaaagcaaatgagcattggaagtttgcgaaatacgagaataatcaaaagaaaagtttgagttgaccgttttctttttctcgtcgtcgtcgtctctttgggaagaagaggactcgtcgctgtcgtagtagactatcttcttgatgcgcctcttcttcttcccatccttcttcttgtgacttgagcccgagtcagtgggcttgtcgtcttttggctcattgatgaaggactccttctccttgtcattgatcaccatcccctttcccttaggatccat

SEQ ID NO: 4628 - DNA, 718 bp, Zea mays
  Clone ID: TF_ZmC5924_19
taatacaagagatctcttgcttttctaataacctattcttaccattcaaggcatcaattaattcattaattttatcaatattggttctatctaggcccttgaataaacatgaatagtctatttcatcatcgctagattcttcatcacttgaggaagtgtaagtactagtatcacgagtgcttaccttcttttcccttgccatgagacaagtgtgatgctcgtttgggaagagggccgacttgttgaaggcggtggcggcgagtccttagttgtcggagtcggacgacgaacaatccgagtcccactcctttccaaggtgtgcctcgcccttagccttcttgtaagccttcttctttttcctcttgttcccttgttcctggtcactatcattatcgggacaattagcgataaaatgaccaatcttaccacatttgaagcatgaacgcttcccctttgtcttggtcttgttgggatgctccttgcgaccccttagcgctgtcttgaaacgcttaatgatgagggccatctcttcctcattgagtcccgctgcctcaacttgtgccaccttgctaggtagcatttccttgctcctcgttgctttgagagcaacggtttgaggctcgtggattgggccgttcaacgcatcgtcaacacatcttgcctccttgatcatcatccgcccgcttacaaactttccaagtatctcctcgggcgtcat

SEQ ID NO: 4629 - DNA, 1678 bp, Zea mays
  Clone ID: TF_ZmC5924_5
ccccttcctttctcctttcgcctccgcctccgactacggcttcagtttagcctccaagcaggggcgcggcgcggggtattctgtccgtcgttgagggtagagagtcacttgcaccgggggagcggagatgaagccggttgtggggatcgtggtgtcgaacaagatgcagaagtcggtggtggttgcagtggaccgcctctttcacaacaaggtatacaaccgctatgtcaagcgcacctccaagttcatggcacacgacgatgacgacttctgcaacattggcgaccgggttaggcttgatccttttaggcccttgagcagacataagcactggggttgttgcttgaattctccgcagagctaaggtgtacgttccaccagctgcaacagcgttcagtgaacgtggtagcaaatttcaacagctggtgttggtaccaatgatccttcacatccatttgaaacaacctgcgacttgggcataaccttttgccacaagtctagccttgttccttgtcaccaccccatgctcgtcctgtttgttgcggaacacccacttggttcccacaacgttttgcttgggacgaggcaccagtgtccaaacttcatttcgcttgaagttattgagctcttccacaccgttttgttgtggtgtgtagggagcggagaactcgtgcttgactccttcctcctcaagatactcttccacttgaaggttcttgaactcggacccgttgtcgctccttatcttcttcaccttgagctcaaattcattttgagctctccttaggaagcgcttgagggtaccttgggtttcagacttatccttgccttgattcccgtcaccgaatatgattgaatcttgggaatctttgttcttggcgtaggaggtgaacatcttcttctcccccgtcatgtggtttgtgcatccgctgtcgataatccagcttgagcccccggatgcataaaccttcttctcctttgccatgaggcaggtgtgatgctcgttggggaagagagacgatttgttgaaggccgtggcggcgagttcttcgtcatcggagtcggacgaagaacaatccgagtcccactcttttccaatgtgtgcctcgcccttagccttcttgtaaaccttcttgttctctctcttcccattctttacttgttcctggtcactatcattatcgggacagttagcaataaagtgaccaatcttaccacacttgaagcaggagcgctttcccttcgtcttgctcttgttgggatgctccttgcaacctttgagcgtcgtcttgaagcgcttgatgatgagggccatttcatcctcatttagcccggccgcctcaacttgtgccaccttgctaggtagcgcctccctgctacttgttgctttgagagcaacagtttgaggctcgtgaatcgacattgggccattcaacgcctcatcaacatatcttgcctccttgatcatcattcgcccgcttacaaactttccgagtatttcctcgggcgtcatcttggtgtaccttagcataagtcggacgacgtcgtggtccgtccatctcgtgcttccatagctcctgattttgttgaccagggtcttgagcctgttgtacgtttgagttggctcctcccccctgatcattgcgaaccttcctagttcgccttccaccaactccat

SEQ ID NO: 4630 - DNA, 1259 bp, Zea mays
  Clone ID: TF_ZmC951_381
atggatcctaaggggaagggaattgtgatcaacgacaaggaaaaggagtccttcgtcaacgagccaaaagatgataaatccaacgactctggctcgggccacagacgtaaagatgggaagaagaagaagacaaggcgcatcaaggagatcgtctactacgacagcgacgaatcctcttcttcccaaaaggacgacgacaacgactacaggaagacgacggtgctaagaggtcacaaggggcagccaagcaagaccaagacaaaggggaagcgctcatgcttcaagtgcggtaagattggtcattttatcgctaactgccccgataacgatagtgaccaggaaaaggggaacaagagggaaaagaagaagcattacaagaaggcaaagggcgaggcacatctaggcaaggagtgggactcggattgctcctcttccgactccgacaatgaaggactcgccgccaccgccttcaacaaatcaaccctcttccccaacgagcgtcacacatgccttatggcaagggagaagaagagtaagtctgacaggcagtcaggtcttgccaaaggcgccacagcgaactccgctccgcccgaccccagggctcggactcgggctaagacccggaagacggcgaactccgctccgcccgaccccagggctcggactcgggctaagacccggaagacggcgaactccgctccgcccgaccccagggctcggactcgggctaagacccggaagacggcgaactccgctccgcccgaccccagggctcggactcgggctaagacccggaagacggcgaactccgctccgcccgaccccagggctcggactcgggctaagacccggaagacggcgaactccgctccgcccgaccccagggctcggactcgggctaagacccggaagacggcgaactccgctccgcccggccccagggctcggactcgggctaagacccggaagacgacgaaactccgcctcgcccgaccccagggctcggactccgccctggcctcggccgaacgacttccgactcgcccgaccccagggctcggactccgccctggcctcggccgaacgacttccgcctcgcccgaccccttggctcgggctcggccacggcaacagaaggcagactcaacctcggcttcggaggaaaccccacgtcgccggaagcaggacaacgtcagcagggactcgaccgctccaacagctgtccctccatcaggctccgccgcacctccgacagccat

SEQ ID NO: 4631 - DNA, 3345 bp, Zea mays
  Clone ID: TF_ZM3613.C2.o2.fg
atggatcctaagggaaagaggatggtgatcaacgacaaggagaaggagtgcttcatcaatgagccaaaagacgacaagcccactgactcgggctcaagtcacaagaagaaggatgggaagaagaagaggcgcatcaagaagatagtctactacgacagcgacgagtcctcttcttcccaaagagacgacgacgacgagaaaaagaaaacggacaccctcaagatctcacatgaggggaacgacgccaccatgatcaccaagatggagttggtagaatgcgaactaggaagattcgcaatgatcaggggggaggagccaactcaaacgtacaacaggctcaagaccctggtcaacaaaatcaggagctatggaagcacgagatggacggaccacgacgtcgtccggcttatgctaaggtccttcactgtccttgatcctcatcttgtaaactctattcgtgaaaatcctaggtacaccaagatgatgctcgaggaaatactcggaaagtttgtaagcgggcgaatgatgatcaaggagacaagatatgttgatgaggcgttgaatggcccaatgccgatccacgagcctcaaaccgttgctctcaaagaaacaagcagcagggaggggctacctagcaaggcggcgcaagttgaggcggccgggctaaatgaggatgaaatggccctcatcatcaagcgcttcaagacggcgctcaaaggtcgcaaggagcatcccaacaagagcaatacaaagggaaagcgctcctgcttcaagtgtggtaagattggtcactttattgctaactgtcccgataatgatagtgaccaggaacaaggaaagaatgggaagagagagaacaagaagatttacaagaaggctaagggcgaagcacaccttggaaaagaatgggactcggattgttcttcgtccgactccgacgacgaaggactcgccgccacggccttcaacaaatcgtctctcttccccaacgagcatcacacctgcctcatggcaaaggagaagaaggtaagcactcaaaatactattgcatatgcttcttcaagtgatgatgaatctagtgatgatgaagtagactacgcaagtttattcaaaggcttagatagaactaaaattgataagatcaatgaattaattgatgcgttgaatgagaagaatagattgctagaaaagcaagaggatcttttatatgaagagcatgataaatttgtaagtgtgcaaaagtctcttgctttagaagttaaaagaaatgaaatgctttcatgtgaattatctacttgtcatgagtctatttctagtctaaagagtgtcaatgatgacttaaatgctaagttagaagtagcaaataaatctagctcatgtattgaacatgtagtaatctgtaataggtgtaaggattttaatgttgatgcatgtgttgagcaccttacttctattgcaaaattaaatggtgaagtggctagtcttaatgcccaacttaacactagcaagaataactttgataaactaaaatttgcaaggggtgcctacactattggtagacacccctcaattaaggatgggcttggctttaaaagggaagccaagaacttaacaagccaaagagctcccattttcaacaaggaaaagggaaaggctcctatggctaatagtagtcaaaagaatcatgcatttatttatgatagaaaattttctagaaatgcttatcataataggagttgtaatgcttatgattcacatgccatgattgcttcaagttcttccgttgtgcatgatgtgtccgtctttagaaggtgtgatggtttgttagcttttaagggtgtactagacggcaaactctatttagttgatttttcgaaggaggaggccggtctaaatgcatgcttaatcgctaagactagcatgggctgtttgtggcatcgccgtctagcacatgttggaatgaagaaccttcataaacttctaaagggggaacatgtgttaggtctaacaaatgtaactttcgaaaaagatagaccttgtgcagcttgtcaagcaggtaaacaggtgggaagctctcatcatagcaaaaatgtgatgaccacatcaagacctttagagctacttcacatggacctcttcggccctgtcgcctacctcagcatcgggggaagtaagtatggtcttgttattgttgatgatttttcctgcttcacttgggtattctttttgcaggataaaacagaaacccaagggaccctaaagtgcttcctaaggagagctcaaaacgaatttgagctcaaggtgaaaaagataaggagcgacaatgggtccgagttcaagaatcttcaagtggaggagtaccttgaggaggaaggaatcaagcacgagttctccgctccctacacaccacaacaaaacggtgtggtagagaggaagaacaggacgctcatagacatggcaaggacgatgcttggagagttcaagacgcccgagcgattttggtcggaagccgtgaacacggcttgccacgccataaaccgagtctaccttcatcgcctcctcaagaagacgtcgtacgaactcctaaccggtaacaaacccaacgtttcatatttttgtgtatttgggagtaaatgctacattctagtgaagaaaggtaggaattccaaatttgctcccaaagctgtagaagggtttttgttaggttatgactcaaatacaaaggcgtatagagtcttcaacaaatcatcgggtttggttgaattctctagcgatgttgtatttgatgagactaatggctctccaagagagcaagttgatcttgatgatgtagatgaagaatatgttccaacggccgcaatacgcaccatggcgatcggagatgtgcgaccacaggaacaaaaggagcaagatcaaccttattcctcaacaatggtgcaccccccaactcaaactgatgatcaggttcaagaagaggcgtgtgatcaagggggagcacaagatgatcatgtaatggaggaagaagcacctcaggcccctccaactcaagtccgagaaacgattcaaaggaatcatcccgtcgaccagatcttgggtgatataagcaagggagtaactactcgctctagattagctaatttttgtgagcattactcgtttatctcttctattgagcctttcagggtagaagaggccttggtagatccggactgggtgttggccatgcaggaagagctcaacagcttcaagcgaaatgaggtttggaccctgggtgttggccatgcaggaagagctcaaccacttgatttcattgtgctaacacttaatcaagttttgtggctttaa

SEQ ID NO: 4632 - DNA, 1932 bp, Zea mays
  Clone ID: TF_ZM3613.C7.o2.fg
atggatcctaaggggaagggaatcgtgatcaacgataaggagaaggagtccttcgtcaacgagcccaaagatgacaagcctaccgactccggctcgggccatagacggaaggaagggaagaagaagaagacaaggcgcatcaaggagatcgtctactacgacgacagcgacgaatcttcctcttcccaaaaggacaacgacgacaacgactacaggaagacggtcaattcgaacttttcatttgattattctcgtattccacatagttcgaattcgcatttgctttccattcctcttggcaaacctccacactttgatggggaggactacggattttggagtcacaaaatgcgtagtcatttattctctctccatccaagcatatgggagattgtagagaatggaatgaaatttgatagctcggatagccctatgtttattaatgaacagattcataaaaatgcacaagctactactgtgttgctagcctctttgtgcagggacgagtacaacaaggtgagcggcttggacaacgccaagcagatctgggacaccctcaagatttctcatgagggaaatgacgttaccttgcttaccaaaacggagttggtggagggcgagcttggacggttcgcgatgataaggggcgaggagccaactcaaacatacaaccggctcaagacccttattaacaaaataaggagctacggaagcacgcgatggacggaccacgacgtcgtccgactaatgctaaggtcctttaccgttcttgatcctcatttggtgaataatattcgtgagaatcccaggtacaccaaaatgtcgcccgaagaagtcctaggaaaattcgtcagcgggcgaatgatgattaaggaagcaaggtacgtggacgatgccttgaatggaccgatcaacgagccgcaacctcttgctctcaaagcaacaagaagcaaggaggcgctacctagcaaggtggcacaaattgaggcggccggacttaatgatgaagagatggctctcatcatcaaacgcttcaagacggtgctgaagggtcacaaggggcagccaagcaagaccaagacaaaggggaagcgctcatgcttcaagtgcggtaagattggtcattttatcgctaactgccccgataatgatagtgaccaggaacagggaaacaagagggaaaaaaagaagaattacaagaaggcaaagggcgaggcacatattggaaaggagtgggattcagattgctcctcgtccgactccgacaacgaaggactcgccgccaccgccttcaacaagtcatccctcttcccaaacgagcatcacacttgccttatggcaagggaaaagaaggtaatcactcgtaacgctagtacttatgattcttctagtgatgagtctagtgatgatgatgacatagactactctagcttgttcaagggtttggatagaactaaaatagataaaattaatgagttgattgatgccttgaatgagaaggatagactcttagagaaacaagaggatttgttgtatgaagaacatgataaatttgtagaggcacaaaaatcctatgctttagaagttaaaagaaatgaaatgctttcttttgaactatctacttgtcatgaaaccatttctactttgaaaggtgtcaacaatgatttaaatgctaaattagaagtagcaaataaatccaattcttgtgtagaacatgttgaaatttgtactaggtgtaaagattttgacattgatgcttgtagtgaacacctagtttcaatttccaagcttaatgatgaattggctagtcttaatgctcaacttaagactagcaagaatgatttcgataaactaaaatttgcaagggatgcctacacaattggtagacacccctcaattaaggatggacttggcttcaagagaggaagctaa

SEQ ID NO: 4633 - DNA, 2122 bp, Zea mays
  Clone ID: TF_ZM3615.C2.o1.fg
atggatcctaaagggaagggaatcgtgatcaacgacaaggagaaggagtccttcgtcaacgagccaagggatgacaagtccaacgactcgggctcgggccacagacgcaaagatgggaagaagaagaagacaagacacatcaaggagatcgactactacgacagcgatgagtctacttcctcccaaaaggacgacgaccacaacgactacgagaaaaagaaaccgatcaattcgaacttttcttttgactactctcgtattccgcatagttcaagttcacatttgctctccattccactcggcaagcccccacactttgatggagaagactacgaattttggagccacaaaatgcgtagtcacctattctctctccatcctagtatatgggagattgtagaaagtggaatgcactttgatagttcggatagtcccatgttcattaatgagcaaatacataagaatgcacaagctactactgttcttctagcttctttgtgcagggatgaatacaacaaagtgagcggcttggataacgccaagcaaatatgggacaccctcaagatctctcatgaggggaacgacgtcaccttgctcaccaagatggagttggtggagggcgagcttggacggttcgcaatgataaggggcgaggagccaactcaaacatacaaccggctcaagacccttatcaacaaaataaggagctatggaagcacgcgatggacggaccacgacgtcgtccgactgatgctaaggtcctttaccgttcttgatcctcatttggtgaataatattcgtgagaatcccaggtacaccaaaatgtcgcccgaagaagtccttggaaaattcgtaagtgggcgaatgatgatcaaggaggcaaggtacgtggacgacgccttgaatggatcgatcaacgagccgcaacctcttgctctcaaagcaacaagaagcaaggaggcgctacctaacaaggtggcacaaattgaggcggccggacttaatgatgaagagatggctctcatcatcaagagattcaagacggcgctcaaaggtcgcaagggacagccaagcaagaccaaagccaaagggaagcgctcatgcttcaaatgcggtaagattggtcattttattgctaactgtcccgataatgaaagtgaccaggaactcgagagcaagagggaaaagaagaaacattacaagaaggccaagggcgaggcacatatcggaaaggagtgggattcggattgctcctcctccgactccgacaatgaaggactcgccgccaccgccttcaacaagtcgtccctcttccccaacgagcatcacacatgcctcatggcaaaggagaagaaggtatgtactcgagaaagtaccacttactcttctagtgatgatgattctagtgatgacaatgaaatagactattctagtttatttaaaggtcttgatagaattaaaattggcaaaattaatgagttaattgatgccttgaatgaaaaggataggcttttagaaaagcaagaggatttgttatatgatgaacatgataaatttgtagaagcacaaaaatctcatgctttagaagttaaaagaaacgaaatgctttcttgtgaattatcttcttgccatgagacaatttctagcttaaggagcattaatgatgacttgaatgctaagattgctagtaaatctaactcttgcgtagagaatgttataacttgcactaggtgtaaagatattaacattgatgcttatagtgaacacctagcttgcatttctaaattaaatgaagaggtggctagtcttaatacccaacttgagactagcaaaagtgattttgataaactaaaatttgctagggatgcctacacggttggtagacacccctcaattaaggatgaacttggcttcaagagggaagccaagaacttaacaagccataaggctcccatctccgccaaggagaaagggaaggcccctatggctaaaagtactaaaaggaaccatgcttttatgtatcatgataggagacaaactagaaatgcttataggagttataatgcttatgatgactttaactctcatgccatggttgcttctagttcttcctatatgcatg

SEQ ID NO: 4634 - DNA, 4983 bp, Zea mays
  Clone ID: TF_ZM3619.C10.o1.fg
atggatcctaaggggaagggaatcgtgatcaacgacaaagagaaggaatctttcgtcaacgagccaaaagacgacaagcctaccgactccggctcggggcatagacggaaggaagggaagaagaagaagacaaggcgcatcaaggagatcatctactacgacgatagtgatgagtctacttcttcccaaaaggatgatgacaacgactacaaaaagacggtcaattcgaacttttcatttgattattctcgtattcaacatagttcgaattcgcatttgctttccattcctcttggcaaacctccacacttcgatggggaggactacggattttggagtcacaaaatgcgtagtcatttattctctctccatccaagcatatgggagattgtagagaatggaatgaaatttgatagctcggatagccctatgtttatcaatgaacaaattcataaaaatgcacaagctactactgttctcttagcatctttgtgcagggaagaatacaataaagtgagcggcttggacaatgccaagcagatatgggacaccctcaagatctctcacgaggggaacgacatcaccatgctcaccaagatggagttggtggagggcgagcttggacgattcgccatgataaggggagaagagccaactcaaacttacaaccggctcaagacccttatcaacaagataaggagctacggaagcacgcgttggacggatcacgacgtcgtccgcctaatgctcaggtcatttaccgttcttgatcctcatctcgtgaacaatattcgtgagaatcccaggtacacgatgatgacgcccgaagaagtacttggaaaattcgtgagcgggcggatgatgatcaaggaagcaagatacgtcgacgacgcgttgaacggtccactccacgagtctcaacccattgctctaaaggcaacaaggagcaaggagtcgctacctagcaaggtggcgcaagttgaggcggccgggctcaatgatgaagaaatggctcttatcattaaacgcttcaagacagtactaaaaggtcacaaggggcagccaagcaagaccaagacaaaggggaagcgctcatgcttcaagtgcggtaagattggtcattttatcgctaactgccccgataatgatagtgaccaggaacagggaaacaagagggaaaagaagaagaattacaagaaggcaaagggcgaggcgcatctaggcaaggagtgggactcggactgctcctcgtccgactccgacaacgaaggactcgccgctaccgccttcaacaagtcatccctcttcccaaacgagcatcacacttgccttatggcaagggaaaagaaggtaatcactcgtaacgctagtactaatgattcttctagtgatgagtcgagtgatgatgatgacatagactattctagtttgttcaagggattggatagaaataaaattgataaaatcaatgaattgattgatgcattaaatgagaaggataaactcttagagaaacaagaggatttattatatgaagagcatgataaatttgtagaagctcaacgatctcatgctctagaagttaaaagaaatgaaatgctttcttgtgaactatcttcttgccatgagacaatttctaaattaaagagcattaatgatgacttaaatgctaaactagtagaagcaaatagatccaactcttgtgtggaacatgttgaaatttgcactaggtgtaaggatgttgatattaatgcgtgcagtgaacacttagtctccatttcaaaattgaatgatgaattagctagtcttaatacccaacttaagactagcaaaagtgaatttgaaaaactaaaatttgcaagggatgcctacactattggtagacacccctcaattaaggatgggcttggcttcaaaagggaagccaagaacttaacaagccataagactcccatctccaccaaggagaaaggaaaggctcctatggctaatagtgttaagaagaatcatgctttcatgtattatgataggagatattctagaaatacttttagaggtcatgatgtttttgattcacatgcttatgactcttatgctatgactgcttctagttctcatgttatgcatggtagaaatgtgcttagaagaaatgttgttcatcaaatgcctaggagaaatgttgttaggaaagtagtgaatgaaccttctacaatttattgtgctttaaatgcttcttttgccatttgtagaaaggataagaaaattgttgctaggaagttaggggcaaaatgcaagggagacaaaacttgcatttgggtccctaagaatatttgtgctaaccttgcaggacccaacatgagttgggtttatgcatccgggggttcaagctggattattgacagcggatgcacaaaccatatgacgggggagaagaaaatgttcacctcctacgtcaagaataaggattcccaagattcaatcatattcggtgatgggaatcaaggcaaggataagtctgaaacccaagggaccctcaagcgcttccttaggagagctcaaaatgagtttgagctcaaggtgaagaagataagaagcgacaacgggtccgagttcaagaaccttcaagtggaggagttccttgaggaggaagggatcaagcatgagttctccgctccctacacaccacagcaaaatggcgtggtaaagaggaagaacaggacgctcatcgacatggcgaggacgatgctaggagagttcaagacccccgagtgcttttggacggaagccgtgaacacggcttgccacgccatcaacatggtctaccttcatcgcctcctcaagaagacttcgtatgagcttctaaccggtaacaaacccaatgtatcttactttcgtgtatttgggagcaagtgctacattctattgaagaaaggtagaaattctaagtttgctcccaaagctgtagaagggtttttgttaggttatgactcaaatacaaaggcgtatagagtcttcaacaaatcatcgggtttggttgaagtctctagcgacgttgtatttgatgagactaatggctctccaagagagcaagttattgattgtgatgtagatgaagaagatgttccgacgaccgctatacgaaccatggcgattggagacgttcggccacaggaacaatatgaacgagatcaaccttcttcctcaactaaggtgcatcccccaactcaagacgatgaacaggttcatcaacaggaggcgtgtgatcaaggaggagcacaagttgataatgtgatggaggaagaagcgcaaccagcacctccaacccaagttcgagcgatgattcaaagggatcatcccgtcgaccaaattctgggtgacattagcaagggagtaactactcgatctcgattagttaatttttgtgagcattactcctttgtctcttctattgagcctttcagggtagaggaggccttgctagatccggactgggtgttggccatgcaggaggagctcaacaacttcaagcgcaatgaagtttggacactggtgcctcgtccgaagcaaaatgttgtgggaaccaagtgggtgtttcgcaacaaacaggacgagcacggggtggtgacgaggaacaaggctcgacttgtggcaaaaggttatgcccaagtcgcaggtttggactttgaggagacgtttgctcctgtggctaggctagaatcaattcgtatcttgctagcatatgccgctcaccattctttcaggttgtaccaaatggatgtgaagagcgctttcctcaacgggcctataaaggaggaggtgtacgtagagcaaccccctggcttcgaggatgaacggtaccccgaccacgtgtgtaagctctctaaggcgctctatggacttaagcaagccccaagagcatggtatgaatgccttagagatttcttgattgctaatgctttcaaggttgggaaagccgatccaactcttttcactaagacatgtgatggtgatttgtttgtgtgccaaatttatgtcgatgacataatatttggttctactaaccaaaagtcttgtgaagagtttagcagggtgatgacgcaaaaattcgagatgtcgatgatgggcgagttgaattacttccttgggttccaagtgaagcaactcaaggacggcaccttcatctcccaaacgaagtatacgcaagatctgctaaagcggtttgggatgaaggacgccaagcccgcaaagactcctatgggaaccgacggacacaccgacctcaacaaaggaggtaagtccgttgatcaaaaagcataccggtcaatgatagggtcattactttacttatgtgctagtagaccggatattatgcttagcgtgtgcatgtgtgctagatttcaatccgatcctaaggaatgtcacttagtggcggtgaagcgaatccttagatatttagttgctacgccttgcttcgggctctggtatccaaaggggtctacctttgacttggttggatactcagattccgactatgctggatgtaaggtcgataggaagagtacatcggggacgtgccaattcttaggaaggtccctggtgtcatggaattctaagaaacaaacttccgttgccctatccaccgctgaggccgagtatgttgccgcaggacagtgttgcgcgcaactactttggatgaggcaaaccctccgggactttggctacaatctgagcaaagtcccactcctatgtgataatgagagtgctatccgcatggcggagaatcctgttgagcacagccgcacaaagcacatagacatccggcatcactttttgagagaccaccagcaaaagggagatatcgaagtgtttcatgttagcaccgagaaccagctagccgatatcttcactaagcccctagatgagaagaccttttgcaggttgcgtagtgagctaaatgtcttagattcgcggaacctggattga

SEQ ID NO: 4635 - DNA, 1569 bp, Zea mays
  Clone ID: TF_ZM3639.C3.o2.fg
atggattctaaagggaagggaatcgtgatcaacgacaaggagaaggagtccttcgtcaacgagccaagggatgacaagtccaacgactcgggctcgggccacagacgcaaagatgggaagaagaagaagacaagacgcatcaaggagatcgtctactacgacagcgatgagtctacttcctcccaaaaggacgacgaccacaacgaatacgagagaaagaaaccggtcaattcgaacttttcttttgattactctcgtattcctcaaagtactaatgctcatttattatctattccacttggtaaacctcctcattttgatggagaggactacggattttggagtcacaaaatgcgtagtcacttgttctctctccatcctagcatatgggagattgtagaaaatggaatgcactttgatagcacggatagtcccatgtttattaatgaacagattcataaaaatgcacaagctactactgtgttgctagcctctttgtgcagggacgagtaccataaggtgagcggcttggacaatgccaagcaaatctgggacaccctcaagatctctcatgaggggaacgatgtcaccttactcaccaagatggagttggtggagggcgagcttggacggttcgcaatgataaggggcgaggagccaactcaaacatacaaccggctcaagacccttatcaacaaaataaggagctacggaagcacgcgatggacggatcacgacatcgtccgcctaatgctaaggtcctttactgttcttgatcctcatttggtgaacaatattcgtgaaaatcctaggtacaccaagatgtcgcccgaagaagtacttgggaaattcgttagcgggcgaatgatgatcaaggaggcaagatacgtggacgacgccttgaatggtccgatcaacgagccgcaaccccttgctctcaaggcaacgaggagcaaggaggcgctaccgagcaaggtggcgcaagttgaggcggcagggctaaataatgaggagatggccctcatcattaagcgcttcaagacggcgcttaaaggacgcaagggacagccaagcaagaccaaagccaaggggaagcgctcgtgcttcaaatgcggtaagattggtcattttattgctaactgtcccgacaatgatagtgaccaggaacacgggagcaagaaagaaaggaagaagcattacaagaaggccaagggcgaggcacatatcggaaaggagtgggattcggattgctcctcctctgactccgacaatgaaggactcgccgccactgccttcaacaagtcatccttcttccccaacgaacgtcacacatgccttatggcaagggagaagaaggtaagtaatcaaaacaatgtcacttatgattcttctagtgatgatgagtctagtgatgaagaaatagattactctagtttgttcaagggaatggatagaactaaagtagataagattaatgaattgattgatgccttgaatgaaaaggatagactcttagaaaaacaagaggatcttttatatgaagagcatgacaaatttgtagaggcttaa

SEQ ID NO: 4636 - DNA, 1905 bp, Zea mays
  Clone ID: TF_ZM3639.C5.o5.fg
atggatcctaaagggaagggaatcgtgatcaacgacaaggagaaggagtccttcgtcaacgagccaagggatgacaagtccaacgactcgggctcgggccacagacgcaaagatgggaagaagaagaagacaagacacatcaaggagatcgtctactacgacagcgatgagtctacttcctcccaaaaggacgacgaccacaacgaatacgagagaaagaaaccggtcaattcgaacttttcttttgattactctcgtattcctcaaagtactaatgctcatttattatctattccacttggtaaacctcctcattttgatggagaggactacggattttggagtcacaaaatgcgtagtcacttgttctctctccatcctagcatatgggagattgtagaaagtggaatgcactttgatagtacggataatcccatggttattaatgaacagattcataaaaatgcacaagctactactgtgttgctagcctctttgtgcagggacgagtaccataaggtgagcggcttggacaatgccaagcagatctgggacaccctcaagatctctcatgaggggaacgatgtcaccttactcaccaagatggagttggtggagggcgagcttggaaggttcgcaatgataaggggcgaggagccaactcaaacatacaaccggctcaagacccttatcaacaaaataaggagctacggaagcacgcgatggacggatcacgacgtcgtccgcctaatgctaaggtcttttaccgttcttgatcctcatttggtgaacaatattcgtgaaaatcctaggtacaccaagatgtcgcccgaagaagttcttgggaagttcgtaagcggacgaatgatgatcaaggaggcaagatatgtggacgacgcgttgaacggtcctattcatgagcctcaacccattgctctcaaggcaacgaggagcaaggaggcgctaccgagcaaggtggcgcaagttgaggcggccgggctaaataatgaggagatggccctcatcattaagcgcttcaagacggcgcttaaaggtcgcaagggacagccaagcaagaccaagacaaaggagaagcgctcgtgcttcaaatgtggtaagattggtcatttcattgctaactgtcccgataatgaaagtgaccaggaaaaggggaacaaaagggagaagaagaagcattacaagaaggccaagggcgaggcacatatcgggaaggagtgggattcggattgctcctcctccgactccgacaatgaaggactcgccgccaccgccttcaacaagtcatccctcttccccaacgagcgtcacacatgccttatggcaagggagaagaaggtaagtaatcaaaacaatgtcacttatgattcttctagtgatgatgagtctagtgatgaagaaatagattactctagtttgttcaagggattggatagaactaaagtagataagattaatgaattgattgatgccttgaatgaaaaggatagactcttagaaaaacaagaggatcttttatatgaagaacatgacaaatttgcagaggcacaaaaatcttatgctttagaagttaaaagaaatgaagtgctttctagtgaactatcttcttgtcatgaaactattgctaagttaaagagttttaatgatgatttaaatgctagactagaagtagctagtaaatctaattcttgtgtagaaattgttggaacttgtaataggtgtaaagattttgacattgatgcttgtagtgaacacctagtttcaatttccaaacttaatgatgaattggctagtcttaatgctcaacttaagactagcaagagtaattttgataagctaaaatttgcaagggatgcctacacaattggtagacaccccctcaattaa

SEQ ID NO: 4637 - DNA, 978 bp, Zea mays
  Clone ID: TF_ZM3642.C4.o6.fg
atggatcctaagggaaagaggatggtgatcaacgacaaggagaaggagtgcttcatcaatgagccaaaagacgacaagcccactgactcgggctcaagtcacaagaagaaggatgggaagaagaagaggcgcatcaagaagatagtctactacgacagcgacgagtcctcttcttcccaaagagacgacgacgacgagaaaaagaaaacggacaccctcaagatctcacatgaggggaacgacgccaccatgatcaccaagatggagttggtagaatgcgaactaggaagattcgcaatgatcaggggggaggagccaactcaaacgtacaacaggctcaagaccctggtcaacaaaatcaggagctatggaagcacgagatggacggaccacgacgtcgtccggcttatgctaaggtacaccaagatgatgctcgaggaaatactcggaaagtttgtaagcgggcgaatgatgatcaaggagacaagatatgttgatgaggcgttgaatggcccaatgccgatccacgagcctcaaaccgttgctctcaaagaaacaagcagcagggaggggctacctagcaaggcggcgcaagttgaggcggccgggctaaatgaggatgaaatggccctcatcatcaagcgcttcaagacggcgctcaaaggtcgcaaggagcatcccaacaagagcaatacaaagggaaagcgctcctgcttcaagtgtggtaagattggtcactttattgctaactgtcccgataatgatagtgaccaggaacaaggaaagaatgggaagagagagaacaagaagatttacaagaaggctaagggcgaagcacaccttggaaaagaatgggactcggattgttcttcgtccgactccgacgacgaaggactcgccgccacggccttcaacaaatcgtctctcttccccaacgagcatcacacctgcctcatggcaaaggagaagaaggtgtaa

SEQ ID NO: 4638 - DNA, 2007 bp, Zea mays
  Clone ID: TF_ZM3650.C1.o1.fg
atggatcctaaggggaagggaatcgtgatcaacgataaggagaaggagtccttcgtcaacgagcccaaagatgacaagcctaccgactccggctcgggccatagacggaaggaagggaagaagaagaagacaaggcgcatcaaggagatcgtctactacgacgacagcgacggatcttcctcttcccaaaaggacgacgacaacgactacaggaagacgattcataaaaatgcacaagctactactgtgttgctagcctctttgtgcagggacgagtacaataagttggtggagggcgagcttggaagatttgcgatgataaggggcgaggagccaacccaaacatacaaccggctcaagacccttatcaacaaaataaggagctatggaagcacacgatggacggaccatgacgtcgtccgactattactaaggtcctttaccattcttgatcctcatttggtgaataatattcgtgagaatcccaggtacaccaaaatgtcgcccgaagaagttcttgggaagttcgtaagcgggcgaatgatgatcaaggaggcaagatacgtggacgacgcgttgaacggtcctattcatgagcctcaacccattgctctcaaggcaacgaggagcaaggaggcgctaccaagcaaggtggcgcaagttgaggcggccgggctaaataatgaggagatggccctcatcattaagcgcttcaagacggcgcttaaaggtcgcaagggacagccaagcaagaccaaaacaaaggagaagcgctcgtgcttcaaatgtggtaagattggtcatttcattgctaactgtcccgataatgaaagtgaccaggaaaaaggggacaaaagggagaagaagaagcattacaagaaggccaagggcgaagcacatatcggaaaggagtgggattcggattgctcctcctccgactccgacaatgaaggacttgccgccaccgccttcaacaaatcaaccctcttccccaacgagcgtcacacatgccttatggcaagagagaagaaggtgagtactcgagacaccacttatgtctcttctagtgatgatgaatctagcgatgaggaaatagattactctagcttgttcaagggattggatagaaataagattgataaaatcaatgaattgattgatgccttgaatgagaaggatagactcttagagaaacaagaggatttattgtatgaagaacatgataaatttatagaagcacaaaaatcctatgctttagaagttaaaagaaatgaaatgctttcttttgaactatctacttgtcatgaaaccatttctactttaaaaggtgtcaacaatgatttaaatgctaaattagaagtagcaaataaatccaattcttgtgtagaacatgttgtaatttgtactaggtgtaaagattttgacattgatgcttgtagtgaacacctagtttcaatttccaagcttaatgatgaattggctagtcttaatgctcaacttaagactagcaagaatgatttggataaactaaaatttgcaagggatgcctacacgatcggtagacacccctcaattaaggatggacttggcttcaagagagaagccaagaacttaacaagccataaggctcccattcccgccaaggagaaagggaaggcccctatggctagtagtgtgcaaaagaaccatgcgtttatgtaccatgataagagacaaactagaaatgcttataggagttacaatgcttatgatgattttgattctcatgacatgtttgtttctagttcttcccatatgcatggtagaaatatgtctaggagaaatgctattcatcattgtgacaccccagtgtcacctagggtttctcttaaacagccaaaccaaaaaccatcattttatgtgaaccaaagtaagcatgagcatcaaaacaatttaagtgagaaagaattcaccaagtatatacttaaaagtgtcatgatcaaaacaattgagacttttgaaagataa

SEQ ID NO: 4639 - DNA, 2580 bp, Zea mays
  Clone ID: TF_ZM3660.C5.o2.fg
atggatcctaaagggaagggaatcgtgatcaacgacaaggagaaggagtccttcgtcaacgagccaagggatgacaagtccaacgactcgggctcgggccacagacgcaaagatgggaagaagaagaagacaagacgcatcaaggagatcgtctactacgacagcgatgagtctacttcctcccaaaaggacgacgaccacaacgactacgagaaaaagaaaccggtcaattcgaacttttcttttgactactctcgtattccgcatagttcaagttcacatttgctctccattccactcggcaagcccccacactttgatggagaggactacggattttggagccacaaaatgcgtagtcacctattctctctccatcctagtatatgggagattgtagaaagtggaatgcactttgatagttcggatagtcccatgttcattaatgagcaaatacataagaatgcacaagctactactgttcttctagcttctttgtgcagggatgaatacaacaaagtgagcggcttggataacgccaagcaaatatgggacaccctcaagatctctcatgaggggaacgacgtcaccttgctcaccaagatggagttggtggagggcgagcttggacggttcgcaatgataaggggcgaggagccaactcaaacatacaaccggctcaagacccttatcaacaaaataaggagctatggaagcacgcgatggacggaccacgacgtcgtccgactgatgctaaggtcctttaccgttcttgatcctcatttggtgaataatattcgtgagaatcccaggtacaccaaaatgtcgcccgaagaagtccttggaaaattcgtaagtgggcgaatgatgatcaaggaggcaaggtacgtggacgatgccttgaacggaccgatcaacgagccgcaacctcttgctctcaaagcaacaagaagcaaggaggcgctacctaacaaggtggcacaaattgaggcggccggacttaatgatgaagagatggctctcatcatcaagagattcaagacggcgctcaagggtcgcaagggacagccaagcaagaccaaagccaaagggaagcgctcatgcttcaaatgcggtaagattggtcattttattgctaactgtcccgataatgaaagtgaccaggaactcgggagcaagagggaaaagaagaaacattacaagaaggccaagggcgaggcacatatcggaaaggagtgggattcggattgctcctcctccgactccgacaatgaaggactcaccgccaccgccttcaacaagtcgtccctcttccccaacgagcatcacacatgcctcatggcgaaggagaagaaggtatgtactcgagaaagtaccacttattcttctagtgatgatgattctagtgacgacaatgaaatagactattctagtttatttaaaggtctagatagaattaaaattggcaaaattaatgagttaattgatgccttgaatgaaaaggataggcttttagaaaagcaagaggatttgttatatgatgaacatgataaatttgtagaagcacaaaaatctcatgctttagaagttaaaagaaacgaaatgctttcttgtgaattatcttcttgccatgagacaatttctagcttaaggagcattaatgatgacttgaatgctaagattgctagtaaatctaactcttgcgtagagaatgttataacttgcactaggtgtaaagatattaacattgatgcttataatgaacacctagcttgcatttctaaattaaatgaagaggtggctagtcttaatacccaacttgagactagcaaaagtgattttgagaaactaaaatttgctagggatgcctacacggttggtagacacccctcaattaaggatggacttggcttcaagagggaagccaagaacttaacaagccataaggctcccatctccgccaaggagaaagggaaggcccctatggctaaaagtactaaaaggaaccatgcttttatgtatcatgataggagacaaactagaaatgcttataggagttataatgcttatgatgactttaactctcatgccatggttgcttctagttcttcctatatgcatggtagaaatatgtctaggagaaatactatttatcatgtgcctagaaagaatattattcatgctcctaggaaagtagtgaatgaatcttctacaatttattgtgctttaaatgcttcctttgctatttgtagaaaggataggaaaatagttgctaggaagttaggggcaaaatgcaagggagacaaaacttgcatttgggtccctaaggatatttgcactaaccttgtaggacccaacatgagttgggtttatgcatccgggggttcaagctggattatcgacagcggatgcacaaaccatatgacgggggagaagaagatgttcacctcctatgtcaagaataaagattcccaagattcaattatattcggtgatgggaatcaaggcaaggataagtctgaaacccaagggaccctcaagcgcttcctcaggagagctcaaaatgagtttgagctcaag

SEQ ID NO: 4640 - DNA, 639 bp, Zea mays
  Clone ID: TF_ZM3970.C3.o1.fg
atggatcctaaagggaagggaatcgtgatcaacgacaaggagaaggagttcttcgtcaacgagccaagggatgacaagtccaacgactcgggctcgggccacagccgcaaagatgggaagaagaagaagacaagacgcatcaaggagatcgtctactacgacagcgatgagtctacttcctcccaaaaggacgacgaccacaacgaatacgagagaaagaaaccggcaacgaggagcaaggaggcgctaccgagcaaggtggcgcaagttgaggcggccgggctaaataatgaggagatggccctcatcattaagcgcttcaagacggtgcttaaaggtcgcaagggacagccaagcaagaccaagacaaaggagaagcgctcgtgcttcaaatgtggtaagattggtcatttcattgctaactgtcccgataatgaaagtgaccaggaaaaggggaacaaaagggagaagaagaagcattacaagaaggccaagggcgaggcacatatcggaaaggagtgggattcagattgctcctcctccgactccgacaatgaaggactcgccgccaccgccttcaacaagtcatccctcttccccaacgagcgtcacacttgcctcatggcaagggagaagaaa

SEQ ID NO: 4641 - DNA, 2136 bp, Zea mays
  Clone ID: TF_ZM4163.C9.o2.fg
atgattcaagtttcacaagatcacctattcaccctccctctaggtgctctcatcgtcaacgagcccaaggatgacaagcctaccgacttgggctcgggccacaaacgcaaagatgggaagaagaagaagacaaggcgcatcaaggagatcgtctactacgacgacaacgatgagttcacttcttcccaaaaggacaacggcgacaatgactacgacaaaagaaagatggttaattcgaacttttcttttgactactctcgtattccgcaaagtacaaatgctcatttgctttccatccctctcggcaaacctccacactttgatggggaggactacagattttggagtcacaaaatgtgtagtcacctgttctctctccatccaagtatatgggagattgttgagaatggaatgaaatttgatagctcggatagtcctatattcattaatgaacagattcataagaatgcacaagctactactgtgttgttagcctctttgtgcagggacgagtaccataaggtgagcggcttggacaatgccaagcagatctgggacaccctcaagatctctcatgaggggaatgatgtaaccttgctcaccaagatggagttggtagagggcgagctcgggagatttgcaatgataaggggcgaggagccaacccaaacatacaaccggctcaagaccctcatcaacaaaataaggagctacggaagcacgcgttggacggaccacgacgtcgttcgcctaatgctaaggtcttttactgtacttgatccacatttggtgaacaatatctgtgaaaatcctaggtacaccaagatgtcacccgaagaagttcttgggaaattcgtgagcgggcgaatgatgatcaaggaggcgagatatgtcgacgacgcgttgaacggtccaatccatgagcctcaacccattgctctcaaagcaacgaggagcaaggaggcactacctagcaaggtggcacaagttgaagcggcagggctaaatgatgaagagatggctctcatcatcaagcgcttcaagacggcgctaaagggtcacaaggggcaaccgagcaagaccaagacaaaggggaagcgctcatgcttcaagtgtggtaagattggtcattttatcgctaactgccccgataatgatagtgaccaggaacaggggaacaagagggagaagaagaaggcatataaaaaggctaagggcgaggcacaccttggcaaggaatgggactcgcattgttcgtcatccgactccgacgatgaaagactcgccgccaccgccttcaacaagtcatccctcttccccaacgagcggcatacatgcctcatggcgaaggagaagaaggtatgtaatcgaaacaatgccgcttatgaatcttctagtgatgatgagtctagtgatgaagaaataaattactctagtttgttcaagggactggatagaaataaagtagataagattaatgaattgattgatgccttgaatgaaaaggatagacttttagaaaaacaagaggaccttttatatgaagagcatgacaaatttgtagaggcacaaaaatctcatgctttagaagttaaaagaaatgaaatgctttcttgtgaactatcttcttgccatgagacaatttctagcttaaggagcataaatgatagtttgaatgctaagttagaaatagctagtaaatctaactcttgtgtagaacatgttatgatttgcaataggtgtaaagattttgacactgatgcttgtagtgaacacctagtttcaatttccaaactgaatgatgaattggctagtcttaatgcccaacttaagactagcaagagtgattttgataaactaaaatttgcaagggatgcctacacgattggtaggcacccctcaattaaggatggacttggctttaagagggaagccaagaacttaacgagccataaggcacccatctccatcaaggagaaagggaaggcccctatggcaaaaagtgctaaaaagaaccatgcttttatgtaccattatagaagacagtcctataggagttgtaatgcttatgatgcttttgactctcatgccatgtgtgcttctagttcttcctatatgcatggtagagatatgtga

SEQ ID NO: 4642 - DNA, 2505 bp, Zea mays
  Clone ID: TF_ZM4290.C9.o7.fg
atggatcctaaggggaagggaatcgtgatcaacgacaaggaaaaggagtccttcgtcaacgagccaaaagatgacaaatccaacgactctggctcgggccatagacgtaaagatgggaagaagaagaagacaaggcgcatcaaggagatcgtctactacgacagcgacgaatcctcttcttcccaaagggacgacgaccacaacgactacgagcaaaggaaaccggttaattctaacttttcctttgactactctcgtattccgcaaagctcaaattcacatttgctttccattccactcggcaagcccccacactttgatggggaggactacggattttggagccacaaaatgcgtagtcaccttttttctctccatcctagtatatgggagattgtagatagtggaatgcactttaatagttcggatagtcctatattcattaatgagcaaatacataagaatgcacaagctactactgttcttctagcttcattgtgcagggatgaatataacaaagtgagtggcttggataacgccaagcaaatctgggataccctcaagatctctcatgagggaaatgacgctaccttgctcaccaaaatggagttggtggagggcgagcttggacggttcgcgatgataaggggcgaggagccaactcaaacatacaaccggctcaagacccttatcaacaaaataaggagctacggaagcacgcgatggacggaccacgacgtcgtccgactaatgctaaggtcctttactgttcttgatcctcatctagtgaacaatattcgtgagaatcccaggtacacgaagatgacgcccgaggaggtactcggaaaattcgtaagcgggcggatgatgatcaaggaggcaagatacgtggacgacgccttgaatggaccgatcaacgagcatcaaccccttgctctcaaggcaacaagaagcaaggaggcgctacctagcaaggtggcacaaattgaggcggctggacttaatgatgaagagatggctctcatcatcaaacgcttcaagacggtgctaaaaggtcacaaggggcagccaagcaagaccaagacaaaggggaagcgctcatgcttcaagtgcggtaagattggtcattttatcgctaactgccccgataacgatagtgaccaggaacaggggaacaagagggaaaagaagaagaattacaagaaggccaagggcgaggcacacatcggaaaggagtgggattcggattgctcctccgactccgacaatgaaggactcgccgccaccgccttcaacaagtcatccctcttccccaacgagcgtcacacttgcctcatggcaagagagaagaaggtaatcactcgtaatgatgtcacttatgattcttctagtgacgatgagtctagtgatgatgaaatagattactctagtttgttcaagggattagatagaaataaaattgataaaatcaatgaattgattgatgccttgaatgaaaaggataggcttttagaaaagcaagaggaccttttatatgaagaacatgataagtttgtagaagcacaaaaatcacttgctttagagattaagagaaatgaaatgctttcttgtgagttgtctacatgtcatgattcaatttctagtttaaaaagcataaatgatgatttaaatgctaagctagaaaaatctagtaaatcaacatcttgtgtagaacatgttgtgatttgcactaggtgtaaagattttgacattgatgcgtgtagtgaacatctagtttcaatttctaaattgaatgatgaagtggctagtcttaatgctcaacttaaggctagcaaaagcgaatttgataaactaaaatttgcaagggatgcctacacagtgggtagacacccctcaattaaggatggtcttggcttcaagagagaggccaagaacttaacaagccataaggctcccatctacgtcaaggagaaagggaaggcccctatggctagtagtgctaaaaagaatcatgctttcttgtactatgataggagacatgctagaaatgcttataatgattttgattcacatgcttatgattcttatgctatgactgcttctagttctcatgttgtgcatgatagaaaggtttatgcatccgggggttcaagctggattattgacagcggatgcacaaaccatatgacgggggagaagaaaatgttcacctcctacgtcaagaataaggattcccaagattcaatcatattcggtgatgggaatcaaggcaagatgtgtctgtctttagaagaagtgatggtgttgggggccttcgtcctccgaaggtattttcggatccagaattatgaatatggagcacggccaggacgaagcctgaaccagacgaaggtcgagtgtagccgaagctgtgcgcagggaagcttcggcgcgatggcagaagggggaaccgacttaaagatgaaaagacttcgggggcctcgacagatttccataagccgttaa

SEQ ID NO: 4643 - DNA, 4635 bp, Zea mays
  Clone ID: TF_ZM4318.C3.o5.fg
atggatcctaaggggaagggaatcgtgatcaacgacaaggagaaggagtccttcgtcaacgagccaaaggatgacaagtccaacgactcgggctcaggccatagacaaaaagatgggaagaagaagaagacaaggcgcatcaaggagattgtctactacgacagcgacgaatcttcctcttcccaaaaggacgacgacaacgactacaggaagacggtcaattcgaacttttcatttgactattctcgtattccacacaattcgaattcgcatttgctttccattcctcttggcaaacctccacacttcgatggggaggactacagattttggagtcacaaaatgcgtagtcacttattctctctccatccaagcatatgggagattgtagagaatggaatgaaatttgatagctcggatagtcctatgcttataaatgaacaaatccatagaaatgcacaagctactactgttctcttagcatctttgtgcagggaagaatacaataaggtgagcggcttggacaatgccaagcagatatgggacaccctcaagatctctcacgagggcaacgacgtcaccatgctcaccaagatggagttggtggagggcgaacttgggagattcgctatgataaggggggaggagccaacccaaacatacaaccggctcaaaacccttgtcaacaagataagaagctatggaagcacgcgatggacggaccacgacgtcgtccgcctaatgctaaggtcctttaccgttcttgatcctcatttggtgaataatattcgtgagaatcccaggtacaccaaaatgtcgcccgaagaagttcttgggaagttcgtaagcgggcgaatgatgatcaaggaggcaagatacgtggacgacgcgttgaacggtcctatccatgagcctcaacccattgctctcaaggcaacaaggagcaaggaggcgctaccaagcaaggtggcacaagttgaggcggccgggctaaataatgaggagatggccctcatcattaagcgcttcaagacggcgcttaaaggtcgcaagggacagccaagcaagaccaagacaaaggagaagcgctcatgcttcaaatgtggtaagatcggtcatttcattgctaactgccccgataatgaaagtgaccaggaaaaaggggacaagagggaaaagaagaagcattacaagaaggccaagggcgaggcgcatctaggcaaagagtgggactcggactgctcctcctccgactccgataatgaaggactcgccgccaccgccttcaacaagtcatctctcttccccaacgagcgtcacacatgccttatggcaagggagaagaaggtatgtactcagaactctacctatgcttcttcaagtgaggacgaatctagtgatgaggatgaagtagattactcatgtctgtttaagggcctggatagaaccaaggtagacaaaattaatgaattgattgatgccctgaatgagaagaacatacttctagaaaagcaagaggatttgttgtatgaagaacatgataaatttgtagaagctcaaagatctcatgctctagaagttaaaagaaatgaaatgctttcttgtgaattatcttcttgccatgatgcaatttctaaattaaggagcattaatgatgattttaatgctaagttagagattgctagtaaatccacctcttgtgtagaaaatgttgtagcgtgcactaagtgtaaagatattaacattgatgcttgtagtgaacacctagcttgcatttctaaattaaatgaagaggtagctagtcttaatgcccaacttaatactagcaaaagtgactttgagaaactaaaatttgctagggatgcctacacggttggtagacacccctcaattaaggatgggcttggcttcaagagggaagccaagaacttaacaagccataaggctcctatctccgccaaggagaaagggaaggcccctatggcaagtagcactaaaaggaatcatgcttttatatatcatgataggagacaaactagaaatgcttataggagttataatccttatgatgattttaactcacatgccatgtttgcttctagttcttcctgtatgcatggtagaaatatgcctaggaaaaatgctatgcctagaaagaatattattcatgccctaggaaaaaaggataggaaggcttatgcatccgggggttcaagctggattattgatagcggttgcacaaaccatatgacgggggagaagaagatgttcacctcctacgtcaagaataaggattcccaagattcaatcatattcggtgatgggaatcaaggcaaggataagtctgaaacccaagggaccctcaagcgcttcctcaggagagctcaaaatgagtttgagctcaaggtgaagaagataaggagcgacaacgggtccgagttcaagaaccttcaagtggaggagttccttgaagaggaagggatcaagcacgagttctccgctccctacacaccacaacaaaatggtgtggtagagaggaagaacaggacgctcatcgatatggcgaggacgatgctaggagaggtctaccttcatcgcctcctcaagaagacgtcgtatgagctactaaccggtaacaaacccaatgtatcctactttcgtgtatttgggagcaagtgctacattctagtgaagaagggtagaaattctaaatttgctcccaaagctgtagaagggtttttgttaggttatgactcaaatacaaaggcgtatagagtcttcaacaaatcatcgggtttggtcgaagtctctagagacgttgtatttgatgagactaatggctctccaagagagcaagttgttgattgtgatgatgtagatgaagaagatgttccgacggccgctatacgaaccatggcgattggagaagttcggccacaggaacaagatgaacaagatcaaccttcttcctcaacaatggtgcttcccccaactcaagacgatgaacaggttcatcaacaggaggcgtgtgatcaagggggagcacaagttgatcatgtgatggaggaagaagcacaaccggcacctcaaacccaagttcgagcaatgattcaaagggatcatcctgtcgaccaaattctgggtgacattagcaaaggagaggagctcaacaacttcaagaggaatgaagtttggacactggtgcctcgtccgaagcaaaatgttgtgggaaccaagtgggtgttccgcaacaaacaggacgagcacggggtggtgacaaggaacaaggctcgacttgtggcaaaaggttatgcccaagtcgcaggtttggattttgaggagacttttgctcctgtggctaggctagagtctattcgtatcttgctagcatatgtcgctcaccattctttcaggttgttccaaatggatgtgaagagcgctttcctcaacgggccaatcaaggaggaggtgtacgtggagcaaccccctggcttcgaggatgaacggtaccccgaccatgtgtgtaagctctctaaggcgctctatggacttaagcaagccccaagagcatggtatgaatgccttagagactttctaattgttaatgctttcaaggttgggaaagccgatccaactctttttacaaagacatgtgatggtgatttgtttgtgtgccaaatttatgtcgatgacataatatttggttctactaaccaaaagtcttgtgaagagtttagcagggtgatgacgcagaaattcgagatgtcgatgatgggcgagttgaactacttccttgggttccaagtgaagcaactcaaggacggcaccttcatctcccaaacgaagtacacgcaagatctgctaaagcggtttgggatgaaggacgccaagcccgcaaagactccgatgggaactgacggacacaccgacctcaacaaaggaggtaagtccgttgatcaaaaagcataccggtccatgataggttctttgctttatttatgtgctagtagaccggatattatgcttagcgtatgcatgtgtgctagatttcaatccgatcctaaggagtgtcacttagtggcggtgaagcgaattctgagatatttagttgctacgccttgcttcgggctctggtatccaaaggggtctacctttgacttagttggatactcagattccgactatgctggatgcaaggtcgataggaagagtacatcggggacgtgccaattcttaggaaggtccctggtgtcgtggaactctaagaaacaaacttccgttgccctatccaccgctgaggccgagtacgttgccgcaggacagtgttgcgcgcaactactttggatgaggcaaaccctccgggactttggctacaatctgagcaaagtcccactcctatgtgataatgagagtgctatccgcatggcggaaaatcctgttgagcacaaccgcacaaagcacatagacatccgacatcactttttgagagaccaccagcaaaagggggatatcgaagtgtttcatgttagcaccgagaaccagctagccgatatctttaccaagcctctagatgagaagaccttttgcaggctgcgtagtgagctaaatgtcttagattcgcggaacttggattga

SEQ ID NO: 4644 - DNA, 4731 bp, Zea mays
  Clone ID: TF_ZM4325.C1.o23.fg
atggatcctaagggaaatgggatcgtgatcaatgataaggagaaggagtccttcgtcaacgagccgaaagacgacaagcctatcgactcgggctcaggccacaaacgaaaagatgggaagaagaagaagacgaggcgcatcaaggagatcatctactacgacgacagcgacgagtcctcttcttcccaaaaggacgactacgactatgagaaacggaaaacggtcaattcgaacttttcttttgattactctcgtattccgcaaagtacaaatgctcatttgctctccattccacttggcaaacctcctcactttgatggggaggactacggattttggagtcataaaatgcgtagtcacttgttctctctccatccaagcatatgggagatagtagagagtggaatgaaatttgatagtactgatagtcccatgttcattaacgagcaaatccacaaaaatgcacaagcgactactgttcttctagcttcattgtgcagggacgaataccataaggtaagcggcttggacaatgccaagcagatctgggacaccctcaagatctctcatgagggaaacaacatcaccatgctcaccaaaatggagttggtggaaggcgaacttgggagattcgcgatgataaggggtgatgagccaacccaaacgtacaaccggctcaagacccttgtcaacaaaataaggagctacggaagcacacgatggacggaccacgacattgtccgcctaatgctaaggtcctttactgtccttgatccacatcttgtgaacaatattcgtgagaatcctaggtacaccaagatgtcgcccgaagaaattcttgggaaatttgtaagcgggcggatgatgatcaaggaagcaagatacgtcgacgatgaactaaatggaccaatccaagagcctcaaactattgctctcaaggcaacgaggagcaaggaggcgctacctagcaaggtggcacaagttgaggcggcagggctcaatgatgaagagatggccctcatcatcaagcgcttcaagacgacgctaaagggtcgcaaggggcaaccaagcaagaccaagacaaaggggaagcgctcatgcttcaaatgtggtaagattggtcattttatcgctaactgtcccgataatgatagtgatcaggaacaagggaacaagagggagaagaagaaggcatacaagaaggctaagggcgagacacaccttggcaacgagtgggactcagattgttcgtcatccgactccgacaatgaagggctcgccgccaccgccttcaccaagtcatccctcttccccaacgagcgtcacacatgcctcatggcgaaggataagaaggtatgtactcgagacaatactacttatgcttcttcaagtgaggatgagtctagtgatgatgatgaaatagattattcttgtttattcaagggtctagatagaaccaaggttgataagattaacgaattaattgatgccttgaatgataagaatagattattagagaagcaagaggatcttttatatgaagaacatgataagtttgtagaggctcaaaaatcccttgctttagaaatcaaaaggaatgaaatgctttcttgtgaattatctacttgccatgagacaatttctagtttaaaagatgttaacaatgatttaaatgctaaactagaagtagcaaatagatctaactcttgtgtagaacatgttgtgatttgcactaggtgtaaagattttaatgttgatgcttgtagtgaacacctagtgtctattgcaaagttaaatgatgaactagctagtcttaatgcccaacttaagactagcaagagtgaatttgataagttaaaatttgcaagggatgcctatacgattggtagacacccctcaattaaggatggacttggcttcaagagggaagccaagaacttaacaagccataaggctcccatctccgccaaggagaaagggaagacccctatggctagtagtgctaaaaaaaccatgctttcatgtatcatgataggagacattctaggaatgcctatagaagttatgatgcttttgattctcatgccatgtttgcttctagttcttcctatatgcatggtttatgcatccgggggctcaagctggattatcgacagcggatgcacaaaccacatgacgggagagaagaggatgttctcttcctacgtcaagaacaaggatccccaagattcaataatattcggtgatgggaaccaaggcaaggtgaaagggttagatgtgtctgtctttagaaggtgtgatggttcactagcttttaagggtgtactagacgacaaactttatttggttgattttgcaaaagaagaggccagtctagatgcatgcttaattgctaagacttgcatgggctggctgtggcatcgccgcttagcacatgtggggatgaagaaccttcacaagcttctaaagggagaacacatagaccttgtgcagcttgtcaagcaggataaatctgaaacccaagggaccctcaagcgcttcctcaggagagctcaaaatgagtttgagcttaaggtgaagaagataaggagcgacaacgggtccgagtttaagaaccttcaagtggaggagttccttgaggaggaagggatcaagcacgaattctccgctccctacacaccacagcaaaatggtgtggtagagaggaagaacaggacactcatcgatatggcgaggactatgcttggagagttcaagacccctgagcgcttttggtcggaagccgtgaacacggcttgccacgccatcaaccggctctaccttcaccgcctcctcaagaagactttgtatgagcttctaaccggtaacaaacccaatgtgtcttactttcgtgtatttgggagcaaatgctatattctagtgaagaagggtaggaattccaaatttgctcccaaagctgtagaagggtttttgttaggttatgactcaaatacaaaggcgtatagagtcttcaacaaatcatcgggtttggttgaagtctctagcgacgttgtatttgatgagactaatggctctccaagagagcaagttgttgatcttgatgatgtagatgaagaagatgttccgacggccgcaatacgcaccatggctattggagatgtgcgaccacaggaacaaacggagcaagatcaaccgtcttcctcaacgatggtgcatcccccaactcaagatgatgaacagcctttcagggtagaagaggccttgctagatctggactgggtgttggccatgcaggaggagctcaacaacttcaagcgtaatgaagtttggacactggtgccttgtcccaagcaaaatgttgtgggaaccaagtgggtgttccgcaacaaacaggacgagcacgaggtggtgataaggaacaaggctcgacttgtggcaaaaggttatgcccaagtcacaggtttggactttgaggagacctttgctcctgtggctaggctagagtccattcgtattttgctagcatatgccgctcaccattctttcaggttgttccaaatggatgtgaagagcgctttcctcaacgggccaatcaaggaggaggtgtacgtggagcaaccccctggcttcgaggatgaacggtaccccgaccacgtgtgtaagctctctaaggcgctctatggacttaagcaagccccaagagcatggtatgaatgcattagagactttttaattgctaatgctttcaaggttgggaaagccgatccaactcttttcactaagacttgcgatggtgatctttttgtgtgccaaatttatgtcgatgacataatatttggttctactaatcaaaagtcttgtgaagagtttagcaggttgaactacttccttgggttccaagtaaagcaactcaaggatggcaccttcatctcccaaacgaagtacacgcaagacttgctaaagcggtttgggatgaaggacaccaagcccgcaaagactccgatgggaaccgacggacacaccgacctcaacaaaggaggtaagtccgttgatcaaaaagcatacctgtcgatgatagggtctttactttatttatgtgctagtagaccggatattatgcttagcgtatgcatgtgtgctagatttcaatccgatccaagggagtgtcacttagtggccgtgaagcgaattcttagatacttagtcgctacgccttgcttcgggatctggtatccaaaggggtctacctttgacttgattggatattcagattccgactatgctggatgtaaggtcgataggaagagtacatcggggacgtgccaattcttaggaaggtccctggtgtcctggaattctaagaaacaaacttccgttgctctatccaccgctgaggccgagtatgttgccgcaggacagtgttgcgcgcaactactttggatgagtcaaaccctctgggactttggctacaatctgagcaaagtcccactcctatgtgacaatgagagtgctatccgcatagcggacaatcctgttgagcacagccgcacaaagcacattgacatccgacatcactttttgagagaccaccagcaaaagggagatatcgaagtgttctatattaacaccgagaaccagctagccgatatctttaccaagcctctagatgagaagaccttttgcaggctgcgtagtgagctaaatgtcttagattcgcggaacttggattga

SEQ ID NO: 4645 - DNA, 3957 bp, Zea mays
  Clone ID: TF_ZM4326.C1.o5.fg
atggaacctaaggggaagggaatcgtgatcaacgataaggagaaggagtccttcgtcaatgagctcaaagatgacaagcctaccgactccggctcgggtcatagacgaaaggaagggaagaagaagaagacgaggcgcatcaaggaaatcgtctactatgacgacagtgatgagtctacttcttcccaaaaggacgatgaccacaacgactatgagcaaaggaaaccggttaattctaacttttcctttgactactctcgtattccacaaagctcaaattcacatttgctttccattccactcggcaagcccccacactttgatggggaggaccacggattttggagccacaaaatgcgtagtcacctattttctctccatcctagtatatgggagattgtagatagtggaatgcactttaatagttcggatagtcctatattcattaatgagcaaatccataagaatgcacaagctactactgttcttctagcttcattgtgcagggatgaatataacaaagtgagtggcttggataacgccaagcaaatctgggataccctcaagatctctcatgagggaaatgacgctaccttgctcaccaaaatagagttggtggagggcgagcttggacggttcgcgatgataaggggcgaggagccaactcaaacatacaaccgactcaagacccttatcaacaaaataaggagctacggaagcacgcgatggacggaccacgacgtcgtccgactaatgctaaggtcctttaccgttcttgatcctcatttggtgaataatattcgtgagaatcccaggtacaccaaaatgtcgcccgaagaagtcttaggaaaattcgtcagcgggcgaatgatgatcaaggaggcaagatacgtggacgacgccttgaatggaccgatcaacgaaccacaaccttttgctctcaaagcatcaagaagtaaggaggcgctacctagcaaggtggcacaaattgaggcggtcggacttaatgatgaagagatggctctcatcatcaaacgcttcaagacggtgctaaagggtcacaaggggcagccaagcaagaccaagacgaaggggaagcgctcatgcttcaagtgcggtaagattggtcattttatcgctaactgccccgataatgatagtgaccaggaaatgggaaacaagagggaaaagaagaagcattacaagaaggcaaagggcgaggcgcatctaggcaaggagtgggactcggattgctcctcttccgactccgacaatgaaggactcgccgccaccgccttcaacaaatcaaccctcttccccaacgagcgtcacacatgccttatggcaagggaaaagaaggtatgtactcgcaactctacctatgcttcttcaagtgaggacgaatctagtgatgaggatgaagtagattattcatgtttgttcaagggcttagatagatctaagatagacaaaattaatgaattaattgatgccttgaatgaaaagaatatacttttagaaaagcaagaggatttgttgtatgaagaacatgataagtttgtagaggctcaaaaatcccttgcattagaaattaagaggaatgaaatgcttgcttgtgaagtgtcaacatgccatgactctatttctaacttaaagagcataaacgatgatttaaatgctaaactagtagaagcaaataaatccaactcttgtgttgaatatgttgaaatttgcactaggtgtaaggatattgatattaatgcttgtagcgaacacttagtttctatttcaaaattgaatgatgaattagctagtcttaatgctcaacttaagactagcaagagtaattttgataaactaaaatttgctagggatgcctacacggttggtagacacccctcaattaaggatgggcttggcttcaagagggaagccaagaacttaacaagccataaggctcccattcccactaaggagaaagggaaggcccctatggctactagtgctaaaaagaaccatgcctttttgtatcatgataggagacaaactagaaatgcttataggagttataatgagtacgatgatttttctcatgctatgtttgcttctagttcttcatatgtgcatgatagaaatgttggtagaagggatgttgttcataatatgcctaggagaaatgttgttaatattcctaggaaagttaatgagccttctacaatatatcatgctttgaatgcttcctttgcaatttgtagaaaggatagaaaggtttatgcatccgggggttcaagctggattattgacagcggatgcacaaaccatatgacgggggagaagaagatgttcacctcctacgtcaagaataaggattcccaagattcaatcatattcggtgatggaaatcaaggcaaggtaaaaggattaggtaaaattgcaatctcaaatgagcactcaatttctaatgtgtttttagttgagtccttgggatataatttgctatctgttagtcaattatgcaacatggggtataactgtctatttaaaaatgttgtgggaaccaagtgggtgttccgcaacaaacaggacgagcacggggtggtgacgagaaacaaggctcgacttgtggcaaaaggttatgcccaagtcgcaggtttggatttcgaggagacttttgctcctgtggctaggatagaatcaattcgtatcttgctagcatatgccactcaccattctttcaggttgtaccaaatggatgtgaagagcgctttcctcaacgggccaatcaaggaagaggtgtacgtggagcaaccccctggctttgaggatgaacgataccccgaccacgtgtgtaagctctctaaggcgctctatggacttaagcaagccccaagagcatggtatgaatgccttagagactttctaattgctaatgctttcaaggttgggaaagccgatccaactctttttacaaagacatgtgatggtgatttgtttgtgtgccaaatttatgtcgatgacataatatttggttctactaatcaaaagtcttgtgaagagtttagcagggtgatgacgcacaaattcgaaatgtcgatgatgggcaagttgaactacttccttgggttccaagtgaagcaactcaaggacggcaccttcatctctcaaacgaagtacacgcaagacttgctcaagcggtttgggatgaaggacgccaagcccgcaaagacaccgatgggaaccgacggacacaccgacctcaacaagggaggtaagtccgttgatcaaaaagcataccggtcaatgatagggtcattactttacttatgtgctagtagaccggatattatgcttagcgtatgcatgtgtgctagatttcaatccgatcctaaggaatgtcacttagtggcggtgaagcgaattcttagatatttagttgctacgccttgcttcgggctctggtatccaaaggggtctacctttgacttagttggatactcagactccgactatgctggatgtaaggtcgataggaagagtacatcggggacgtgccaattcttaggaaggtccctggtgtcatggaattctaagaaacaaacttccgttgccctatccaccgctgaggccgagtatgccgcaggacagtgttgcgcgcaactactttggatgaggcaaaccctccgggactttggctacaatctgagcaaagtcccactcctatgtgataatgagagtgctatccgcatggcggaaaatcctgttgaacacagccgcacaaagcacatagacatccgacatcactttttgagagatcaccagcaaaagggagatattgaagtgtttcatgttagcaccgagaaccagctagccgatatctttaccaagcctctagatgagaagaccttttgcaggctgcgtagtgagctaaatgtcttagattcgcggaacttggattga

SEQ ID NO: 4646 - DNA, 5448 bp, Zea mays
  Clone ID: TF_ZM4333.C5.o2.fg
atggatcctaaagggaagggaatcgtgatcaacgacaaggagaaggagtcctttgtcaacgagccaagggatgacaagtccaacgactcgggctcgggccacagacgcaaagatgggaagaagaagaagacaagacgcatcaaggagatcgtctactacgacagtgatgagtctacttcctcccaaaaggacgacgaccacaacgaatacgagaaaaagaaaccggttaattcgaacttttcttttgattactctcgtattcctcaaagtactaatgctcatttattatctattccacttggtaaacctcctcattttgatggagaggactacggattttggagtcacaaaatgcgtagtcacttgttctctctccatcctagcatatgggagattgtagaaagtggaatgcactttgatagtacggatagtcccatgtttattaatgaacagattcataaaaatgcacaagctactactgtgttgctagcctctttgtgcagggacgagtaccataaggtgagcggcttggacaatgccaagcagatttgggacaccctcaagatctctcatgaggggaacgatgtcaccctactcaccaagatggagttggtggagggcgaacttggatggttcgcaatgataaggggcgaggagccaactcaaacatacaaccggctcaagacccttatcaacaaaataaggagctacggaagcacgcgatggacggatcacgacgtcgtccgcctaatgctaaggtcctttactgttcttgatcctcatttggtgaacaatattcgtgaaaatcctaggtacaccaagatgtcgcccgaagaagtacttggaaaatttgttagcgggcgaatgatgatcaaggaggcaagatacgtggacaacgccttgaatggtccgatcaacgagccgcaaccccttgctctcaaggcaatgaggaacaaggaagcgctaccgagcaaggtggcgcaagttgaggcggccgggctcaataatgaggagatggccctcatcattaagcgcttcaagacggcgcttaaaggtcgcaagggacagccaagcaagaccaagacaaaggagaagcgctcgtgcttcaaatgtggtaagattggtcatttcattgctaactgtcccgataatgaaagtgaccaggaaaaggggaacaaaagggagaagaagaagcattacaagaaggccaagggcgaggcacatataggaaaggagtgggattcggattgctcctcctccgactccgacaatgaaggactcgccgccaccgccttcaacaagtcatctctcttccccaacgagcgtcacacatgccttatggcaagggaaaagaaggtgagtactcgagactccacttatgcttcttctagtgataatgagtctagtgatgatgatgacatagactattcatgcttattcaaaggcttagatagatctaagatagataagattaatgagttgattgatgctttgaatgacaagaatagattactagaaaaacaagaagatcttttatatgaggagcatgataaatttgttaatgcacaaaattcttatgctttagaagttaaaagaaatgaagtgctttctagtgaattgtcttcttgtcatgaaaccattactactttaaagagtgttaatgatgacttaaatgctaaactagaaggagctagtaaaaattcttgtgtagaacatgttgagatttgcactaggtgtaaagatttcgatgttgatacttgtagtaaacacctagtctcaatttctaatttgaatgatgaagtggctagtcttaatgcccaacttaagactagtaaaagcgaatttgataaattaaaatttgcaagggatgcctatacgattggtagacatccctcaattaaggatggacttggcttcaaaagggaagccaagaacttaacaagccataaggctcccattcccgctaaggagaaagggaaggcccctatggctactagtgctaaaaggaaccatgcctttttgtatcatgataggaaaaattctagaaatgcttttagaagttatgatgcttttgattcacatgcttatgattcttgtactatgactgcttctagttctcatgttatgcatgatagaaaagttggtagaagaaatgttattcataatatgcctaggagaaatgttgttaatattcctaggaaagttaatgagccttctacaatatatcatgctttgaatgcttcctttgcaatttgtagaaaggatagaaatgtgattgctaggaaattaggggcaaaatgcaagggtgataaaacttgcatttgggtccctaagacaattgtgactaaccttgtaggacccaacaagagttgggtttatgcatccgggggttcaagctggattatcgacagcggatgcacaaaccatatgacgggggagaagaagatgttcacctcctacgtcaagaataaggattcccaagattcaattatattcggtgatgggaatcaaggcaaggtaaaagggctagatgtgtctgtctttagaagaagggatggttcactagcatttaagggtgtattagacggcaaactttatttagttgattttgcaaaagaggaggccggtctagatgcatgcttaatagctaagactagcatgggctggctgtggcatcgccgcttagcacatgtggggatgaagaaccttcacaagcttctaaagggagaacacgtgataggtttgactaacgtacaattcgaaaaagatagaccttgtgcagcttgtcaagcaggtaaacaagtgggaggagcacatcacagcaagaatgtgatgaccacatcaagacccctggagctgctacacatggatctcttcggacccgtcgcctatctgagcataggaggaagtaagtatggtctagttattgttgatgacttttcccgcttcacttgggtgttctttttgcaggataaatctgaaacccaagggaccctcaagcgcttcctcaggagagctcaaaatgagtttgagctcaaggtgaagaagataaggagcgacaacgggtcggaattcaagaaccttcaagtggaggagttccttgaggaggaagggatcaagcacgagttctccgctccctacacaccacagcaaaatggtgtggtagagaggaagaacaagacgctaatcgacatggcgaggactatgcttggagaattcaagacccccgagcgtttttggtcggaagccgtgaacacggcttgccacgccatcaacagggtctaccttcaccgcctcctcaagaagacttcgtatgagctactaaccggtaacaaacccaatgtatcctactttcgtgtttttggaagcaaatgctacattctagtgaagaaaggtagaaattctaaatttgctccaaaagctgtagaagggtttttgttaggttatgactcaaatacaaaggcgtatagagtcttcaacaaatcatcgggtttggttgaagtctctagcgacgttgtatttgatgagactaatggctctccaagagagcaagttgttgattgtgatgatgtagatgaagaagatgttccaacggccgctatacgaaccatggcgattggagaagtgcggccacaggaacaagatgaacgtgatcaaccttcttcctcaacaaaggtgcatcccccaactcaagacgatgaacaggttcatcaaaaggaggcgtgtgatcaagggggagcacaagataatcaagaaatggaggaagaaacgcaaccggcacctccaatccaagttcgagcgatgattcaaagggatcatcccgtcgaccaaattctgggtgatattagcaagggagtaactactcgatctcgattagttaatttttgtgagcattactcctttgtctcttctattgagcctttcagggtagaggaggccttgctagatccggactgggtgttggccatgcaggaggagctcaacaacttcaagcgcaatgaagtttggacactggtgcctcatcccaagcaaaatgttgtgggaaccaagtgggtgttccgcaacaaacaggacgagcacggggtggtgacgaggaacaaggctcgacttgtggcaaaaggttatgcccaagtcgcaggtttggactttgaggagacgtttgctcctgtggctaggctagaatcaattcgtatcttgctagcatatgccgctcaccattctttcaggttgtaccaaatggatgtgaagagcgctttcctcaacgggccgatcaaggaggaggtgtacgtggagcaaccccctggcttcgaggatgaacggtaccccgaccacgtgtgtaagctctctaaggcgctctatggacttaagcaagccccaagagcatggtatgaatgtcttagagactttcttattgttaatgctttcaaggttgggaaagccgatccaactctctttactaagacatgtgatggtgatttgtttgtgtgccaaatttatgtcgatgacataatatttggttctactaaccaaaagtcttgtgaagagtttagcagggtgatgacgcagaaattcgagatgtcgatgatgggcgagttgaactacttccttgggttccaagtgaagcaactcaaggacggcaccttcatctcccaaacgaagtacacgcaagatctgctaaagcggtttgggatgaaggatgccaagcccgcaaagactccgatgggaaccgacggacacaccgacctcaacaaaggaggtaagtccgttgatcaaaaagcataccggtcaatgatagggtctttactttatttatgtgctagtagaccggatattatgcttagcgtatgcatgtgtgctagatttcaatccgatcctaaggagtgtcacttagtggcggtgaagcgaattttaagatatttggttgctacgccttgtttcgggctctggtatccaaaagggtcgacctttgacttggttggatactcagattccgactatgctggatgtaaggtcgataggaagagtacatcagggacgtgccaattcttaggaaggtccctggtgtcgtggaactctaagaaacaaacctccgttgccctatccaccgctgagaccgagtacgttgccgcaggacagtgttgcgcgcaactgctttggatgaggcaaaccctccgggactttggctacaatctgagcaaagtcccactcctatgtgataatgagagtgctatccgcatggcggaaaatcctgttgagcacagccgcacaaagcacatagacatccggcatcactttttgagagaccaccagcaaaagggagatatcgaagtgtttcatgttagcaccgagaaccagctagccgatatctttaccaagcctctagatgagaagaccttttgcaggttgcgtagtgagctaaatgtcttagattcgcgaaacctggattga

SEQ ID NO: 4647 - DNA, 5265 bp, Zea mays
  Clone ID: TF_ZM4352.C4.o3.fg
atggatcctaaggggaagggaatcgtgatcaacgacaaggaaaaggagtccttcgtcaacgagccaaaagatgacaaatccaacgactctggctcgggccacagacgtaaagatgggaagaagaagaagacaaggcgcatcaaggagatcgtctactacgacagcgacgaatcctcttcttcccaaaacgacgacgacaacgactacaggaagacggtcaattcgaacttttcatttgattattctcgtattccacatagttcgaattcacatttgctttccattcctcttggcaaacctccacactttgatggggaggactacggattttggagtcacaaaatgcgtagtcatttattctctctccatccaagcatatgggagattgtagagaatggaatgaaatttgatagctcggatagccctatgtttattaatgaacaaattcataaaaatgcacaagctactactgtgttgctagcctctttgtgcagggacgagtacaataaggtgagcggcttggacaatgccaagcagatatgggacaccctcaagatttctcacgaggggaacgacatcaccatgctcactaaaatggagttggtggagggcgagcttggaaggtttgcaatgataaggggcgaggagccaacccaaacatacaaccggctcaagacccttatcaacaaaataaggagttatggaagtacgcgatggacggatcacgacgtcgtccgcctaatgctaaggtcatttaccgttcttgatcctcatctcgtgaacaatattcgtgagaatcccaggtacacgaagatgacgcccgaggaggtactcggaaaattcgtaagcgggcggatgatgatcaaggaggcaagatacgtggacgacgccttgaatggaccgatcaacgaacatcaaccccttgctctcaaggcaacaagtagcaaggtggcacaaattgaggcggccggacttaatgatgaagagatggctctcatcatcaaacgcttcaagacggtgctaaaaggtcacaaggggcagccaagcaagaccaagacaaagagaaagcgctcatgcttcaagtgcggtaagattggtcattttatcgctaactgccccgataacgatagtgaccaggaacaggggaacaagagggaaaagaagaagaattacaagaaggccaaggacgaggcacacatcggaaaggagtgggattcggattgctcctccgactccgacaatgaaggactcgccgccaccgccttcaacaagtcatccctcttccccaacgagcgtcacacatgccttatggcaagggagaagaaggtgagtactcgagactccacttatgcttcttctagtgataatgagtctagtgatgatgatgacatagactattcatgcttattcaagggtttagatagatctaagatagacaaaattaatgaattgattgatgccttgaatgataagaatgtgcttttagaaaagcaagaggatttgttgtatgaggaacatgacaaatttgtagaagcacaaaaatcacttgcattagagattaagagaaatgaaatgctttcttgtgagttgtctacatgtcatgattcaattgctagtttaaagagcaaaaatgatgatttaaatgctaaactagaaaaatctagtaaatcaacatcttgtgtagaacatgttgagatttgcactaggtgtaaagatttcgatgttgatgcctgtagtgatcatttagtttcaatttccaaactaactgaggaattggctagtctcaatgcccaacttaagactagcaagaatgaatttgataaactaaaatttgcaagggatgcctacacgatcggtagacacccctcaattaaggatggacttggcttcaagagggaagccaagaacttaacaagccataagactcccattcccgctaaggagaaagggaaggcccctatggctactagtgttaaaaagaaccatgcctttttgtatcatgatagaaaaaattctagaaatgcttttagaagttatgatgcttatgattcacatgcttatgattcttatgctatgactgcttctagttctcatgttgtgcatgatagaaatgttggtagaaggaatgttgttaatattcctaggaaagttaatgagccttctacaatataccatgttttgaatgcttcctttgcaatttatagaaaggatagaaaggtttatgcatccgggggttctagctggattattgatagcggatgcacaaaccatatgacgggggagaagaagatgttcacctcctacgtcaagaataatgattcccaagattcaattatattcggtgatgggaatcaaggcaaggtaaaaggattagttgagtccttgggatataatttgctatctgttagtcaattatgcaacatggggtataactgtctatttacaaatgaagatgtgtctgtctttagaagaagtgatggttcactagcttttaagggtgtattagacggcaaactttatttagttgattttgcaaaagaggaagccggtctagatgcatgcttaatagctaagactagcatgggctggctgtggcatcgccgcttagcacatgtggggatgaagaaccttcacaagcttctaaaaggagaacacgtgataggtttgactaacgtgcaattcgaaaaagatagaccttgtgcagcttgtcaagcaggtaaacaagtgggaggagcacatcacagcaagaatgtgatgaccacttcaagacccctggagctgctgcatatggacctcttcggacctgtcgcctatctgagcataggagggagtaagtatggtctagttattgttgatgacttttcccgcttcacttgggtgttctttttgcaggataagtctgaaacccaagggaccctcaagcgcttcctcaggagagctcaaaatgagtttgagctcaaggtgaagaagataagaagcgacaacgggtccgagttcaagaaccttcaagtggaggagttccttgaggaggaagggatcaagcatgagttctccgctccctacacaccacatcaaaatggtgtggtagagaggaagaacaggacgctaattgatatggcgaggactatgcttggagagttcaagacccccgagcgattttggtcggaagccgtgaacacggcttgccacgccatcaacagggtctaccttcaccgcctcctcaagaagacgtcgtatgagctactaaccggtaacaaacccaatgtatcgtactttcgtgtatttgggagcaagtgctacattctagtaaagaagggtagaaattctaaatttgctcccaaagcagtagaagggtttttgttaggttatgactcaaatacaaaggcgtatagagtcttcaacaaatcatcaggtttggttgaagtctctagcgacgttgtatttgatgagactaatggctctccaagagagcaagttgttgattgtgatgatgtagatgaagaagatgttccgacggcccctatacgaactatggcgattggagaaatgcggccacaggaacaagatgaacgagatgaaccatcttcctcaactatggtgctacccccaactcaagacgatgaacaggaggcgtgtgatcaagggggagcacaagatgatcatgtgatggaggaagatgcgcaaccggcacctccaacccaagttcgagcgatgattcaaagggatcatcccgtcgaccaaattctgggtgacattagcaagggagtaactactcgatctagattagttaatttttgtgagcattactcctttgtctcttctattgagcccttcagggtagaggaggccttgctagatccggactgggtgttggccatgcaggaggagctcaacaacttcaagcgcaatgaagtttggacactggtgcctcgtcccaagcaaaatgttgtgggaaccaagtgggtattccgcaacaaacaggacgagcacggggtggtgacgagaaacaaggctcgacttgtggcaaaaggttatgcccaagtcgcaggtttggatttcgaggagacttttgctcctgtggctaggctagaatcaattcgtatcttgctagcatatgccgctcaccattctttcaggttgtaccaaatggatgtgaagagcgctttcctcaacgggccaatcaaggaggaggtgtacgtggagcaaccccctggcttcgaggatgaacggtaccccgaccatgtgtgtaagctctctaaggcgctctatggacttaagcaagccccaagagcatggtatgaatgccttagagactttctaattgttaatgctttcaaggttgggaaagccgatccaactctttttactaagacttgcaatggtgatttgtttgtgtgccaaatttatgtcgatgacataatatttggttctactaaccaagagtcttgtgaagagtttagcagggtgatgacgcagaaattcgagatgtcgatgatgggcgagttgaactacttccttgggttccaagtgaagcaactcaaggatggcactttcatctcccaaacgaagtacacgcaagacttgctaaagaggtttgggatgaaggacgccaagcccgcaaagacgccgatgggaaccgacagacacacagacctcaacaaaggaggtaagtccgttgatcaaaaagcataccggtccatgataggttctttgctttatttatgtgctagtagaccggatattatgcttagcgtatgcatgtgtgctagatttcaatccaatcctaaggagtgtcacttagtggcggtgaagcgaattcttagatatttagttgctacgacttgcttcgggctctggtatccaaaggggtctacctttgacttagttggatactcagactccgactatgctggatgtaaggtcgataggaagagtacatcggggacgtgccaattcttaggaaggtccctggtgtcatggaattctaagaaacaaacttccgttgccctatccaccgctgaggccgagtatgttgccgcaggacagtgttgcgcgcaactactttggatgaggcaaaccctccgggactttggctacaatctgagcaaagtcccactcctatgtgataatgagagtgctatccgcatggcggaaaatcctgttgaacacagccgcaccaagcacatagacatccggcatcactttttgagagaccaccagcaaaagggagatatcgaagtgtttcatgttagcaccgagaactag

SEQ ID NO: 4648 - DNA, 1074 bp, Zea mays
  Clone ID: TF_ZM4398.C1.o6.fg
atgacgcccgaggagatacttggaaagttcgtaagcgggcgaatgatgatcaaggaggcaagatacgttgatgatgcgttaaatggcccaatccatgagcctcaagccattgctctcaaggcaacaagtagcagggaggcgctacctagcaaggtggtgcaaattgaggcggctgggctaaatgaggatgaaatggccctcatcatcaagcgcttcaagacggcgctcaaaggtcgcaaggagcatcccaacaaaagcaagacgaagggaaagcgctcctgcttcaagtgtggtaagattggtcattttatcgctaattgtcccgataatgatagtgaccaggaacaagagaagaagagggaaaagaagaaggcttacaagaaggctaagggagaggcacaccttggcaaggaatgggactcggattgttcgtcgtccgactccggcaacgaaggactcgccacctcagcctttaacaaatcgtctctcttccccaacgagcatcacacctgcctcatggcaaaggagaagaaggtttatgcatccgggggatcaagctggattatcgaccgcggatgcacaaaccacatgacgggggagaagaagatgttctcttcctacatcaagaacaaagattcccaagactcaatcatattcggtgacgggaatcaagacaaggataaatctaaaacccaagggaccctcaagcgcttcctaaggagagctcaaaatgagtttgagctcaaggtgaagaagataaggagcgacaacgggtccgagttcaagaaccttcaagtggaggagtaccttgaggaggaaggaatcaagcatgagttctccgctccgtacacaccacaacaaaatggtgtgatgaagaagacattccaacggtcgcaatacgtaccacggcgattggcgatgtgcgaccacaggaacaaaaggagcaagatcaaccttcttcctcaacaatggtgcatcccccaactcaagatgatgaacaggttcatcaataagaggcgcgtgatcaagggggagcacaagatgatcatgttatggaggaagaagcacaactga

SEQ ID NO: 4649 - DNA, 1549 bp, Zea mays
  Clone ID: TF_ZM4447.C1.o26.fg
atggatcctaaggggaagggtatcgcgatcaacgataaagagaaggaatccttcgtcaacgagccgaaggacgacaagcctaccgactccggctcgggccatagacggaaagaagggaagaagaagaagacgaggcgcatcaaggagatcgtctactacgacgacagcgatgagtctacttcctcccaaaaggacgacgaccacaacgactacgagagaaggaaatcggtcaattcgaacttttcttttgactactctcgtattcctcaaagtgcaaatgctcatttattatctattccacttggcaaacctcctcattttgatggagaggactacggattttggagtcacaaaatgcgtagtcacttgttctctctccatcctagtatatgggagattgtagagagtggaatgcactttgatagttcggatagtcccatgttcattaatgagcaaattcataagaatgcacaagctactactgttcttctagcttcattgtgcagggatgaatatcacaaagtacaccaaaatgtcgcccgaagaagtccttggaaaattcgtaagcgggcgaatgatgatcaaggaagcaagacaacgcttaagggtcgcaagggacagccaagcaagaccaaagccaaggggaagcgctcatgcttcaaatgcggtaagattggtcattttattgctaactgtcccgataatgaaagtgaccaggaacacgggagcaagagggaaaagaagaaaaattacaagaaggccaagggcgaggcacatctaggaaaggagtgggactcggattgctcctcctccgactccgacaatgaaggaatcgccgccaccgccttcaacaagtcatccctcttccgcaacgagcgtcacacatgccttatggcaagggagaagaaggtatgtagtcgaaactctacttatgcttcttcaagtgaggacgaatctagtgatgaggatgaaatagattattcatgtttatttaagggcctagatagaaccaaggtagataaaattaatgaattaattgatgccttgaatgataagaataggcttttagaaaaacaagaagatttgttgtatgaagaacatgacaaatttgtagaagcacaaaaatctcatgctttagaagttaaaagaaatgaaatgctttcttgtgaattatcttcttgccatgagacgatttctagcttaaggagcattaatgatgatttgaatgctaagatagaaatagctagtaaatcaacaacttgtgtagaaaatgttgttatttgcaatagatgtaaagactttgatattgatgcttgtagtgaacacatagcttctattgcaaagttaaatgatgaaatggctagtcttaatgcccaacttaaggctagcaaaagtgattttgataaactaaaatttgctagggatgcctacacgattggtagacacccctcaattaaggatgggcttggcttcaagagggaagccaagaacttaacaagccataaggctcccatctccgccaaggagaaagggaaggcccctatgacaa

SEQ ID NO: 4650 - DNA, 4053 bp, Zea mays
  Clone ID: TF_ZM4449.C5.o10.fg
atggatcctaagggaaaggggatggtggtcgacaacaacgagaaggagtctatcttcaacgagccgaagaatgacaaggacgagtacaataaggtgagcggcttggacaatgccaagcagatatgggacaccctcaagatttctcacgaggggaacgacatcaccatgctcactaaaatggagttggtggagggcgagcttggaaggtttgcgatgataaggggcgaggagccaacccaaacatacaaccggctcaagacccttatcaacaaaataaggagctatggaagcacgcgatggacggaccatgacgtcgtccgactattactaaggtcctttaccattcttgatcctcatttggtgaataatattcgtgagaatcccaggtacaccaaaatgtcgcccgaagaagtcctaggaaaattcgtcagcgggcaaatgatgattaaggaagcaaggtacgtggacgacgccttgaatggaccgatcaacgagccacaacctcttgctctcaaagcaacaagaagcaaggaggcactacctagcaaagtggcacaaattgaggcggccggacttaatgatgaagagatggctctcatcatcaaacgcttcaagacggtgctaaagggtcacaaggggcagccaagcaagaccaagacaaaggggaagcgctcatgcttcaagtgcggtaagattggtcattttatcgctaactgccccgataataatagtgaccaagaacaggaaaacaagagggaaaagaagaagaattacaagaaggcaaagggcgaggcgcatctaggcaaggaatgggactcggactgctcctcctccgactccgacaatgaaggactcgccgccaccgccttcaacaagtcatccctcttccccaacgaacgtcacacatgccttatggcaagggagaagaaggtgagtactcgagactccacttatgcttcttcaagtaatgatgagtctagtgatgatgatgacatagactattcatgcttattcaagggattggatagaaataaaattgataaaatcaacgaattgattgatgcattgaatgagaaggataaactcttagagaaacaagaggatttattgtatgaagagcatgataaatttgtagaagctcaaagatctcatgctctagaagttaaaagaaatgaaatgctttcttgtgaattatcttcttgccatgagacaatttctaaattaaggagcattaatgatgatttgaatgctaagttagagattgctagtaaatctacttcttgtgtagaaaatgttatgacatgcactaggtgtaaagatattaaccttgatgcttatggtgaacacctagcttgcatttctaaattaaatgaagaggtagctagtcttaatgcccaacttaagactagcaaaagtgattttgagaaactaaaatttgctagggatgcctacacggtcggtagacacccctcaattaaggatggacttggcttcaagagagaagtcaagaacttaacaagccataaggcttccatttccgccaaggagaaagggaaggcccctatggctagtagtgtgcaaaagaaccatgcgtttatataccatgacaggagacaatctagaaatgcttataggagttataatgcttatgatgattttgactctcatgccatgtttgcttctagttcttcctatatgcatggtagaaatatgtctagaaaaaatgctattcatcatatgcctagaaagaatgttattcatgctcctaggaaagtagtgaatgaaccttctacaatttattgtgctttaaatgcttcctttgctatttgtagaaaggataagaaaatagttgctaggaagttaggggcaaaatgcaagggagacaaaacttgcatttgggtccctaaggatatttgcactaaccttgtaggacccaacatgagttgggtctatgcatccgggggttcaagctggattatcgacagcggatgcacaaaccatatgacgggggagaagaagatgttcacctcctacgtcaagaataaggattcccaagattcaattatattcggtgatgggaatcaaggcaaggataagtctgaaacccaagggaccctcaagcgcttcctcaggagagctcaaaacgagtttgagctcaaggtgaagaagataaggagcgacaacgggtccgagttcaagaaccttcaagtggaggagttccttgaagaggaagggatcaagcacgagttctctgctccctacacaccacagcaaaatggtgtggtagagaggaagaacatgacgcttattgatatggcgaggacgatgctaggagaattcaagacccccgagtgcttttggtcggaagccgtgaacacggcttgccacgccatcaacaggatgaagaagatgttccgacggccgctatacgaaccatggcgattggagaagtgcggccacaggaacaagatgaacgagatcaaccttcttcctcaacaatggtgcattcccctactcaagacgatgaacagggtagaagaggccttgctagatccagactgggtgttggccatgcaagaggagctcaacaacttcaagaggaatgaagtttggacgctggtgcctcgtcctaagcaaaatgttgtgggaaccaagtgggtgttccgcaacaaacaagacgagcacggagtggtgacaaggaacaaggctcgacttgtggcaaaaggttatgcccaagtcgcaggtttggactttgaggagacttttgctcccgtggctaggctagagtccattcgtatcttgctagcatatgccgctcaccattctttcaggttgtaccaaatggatgtgaagagcgctttcctcaacgggccaataaaggaggaggtgtacgtggagcaaccccctggcttcgaggatgaacggtaccccgacgacgtgtgtaagctctctaaggcgctctatggacttaagcaagccccaagagcatggtatgaatgccttagagatttcttaattgctaatgctttcaaggttgggaaagccgatccaactcttttcactaagacatgtgatggtgatttgtttgtgtgccaaatttatgtcgatgacataatatttggttctactaataaaaaatcttgtgaagagtttagctgggtgatgacgcagaaattcgagatgtcaatgatgggcgagttgaactacttccttgggttccaagtgaagcaactcaaggacggcaccttcatctctcaaacaaagtacacgcaagacctgctgaagcggtttgggatgaaggacgccaagcccgcaaagactccgatgggaaccgacggacacaccgacctcaacaaaggaggtaaatccgttgatcaaaaagcataccggtcaatgatagggtctttactttacctatgtgctagtagaccggatattatgcttagcgtatgcatgtgtgctagatttcaatccgatcctaaggagtgtcacttagtggcagtgaagcgaatccttagatatttagttgctacgccttgcttcgggctctggtatccaaaggggtctacctttgacttgattggatattcagattccgactatgctggatgtaaggtcgataggaagagtacatcagggacgtgccaattcttaggaaggtccctggtgtcatggaattctaagaaacaaacctccgttgccctatccaccgctgaggccgagtatgttgccgcaggacagtgttgcgcgcaactactttggatgaggcaaaccctcagggactttggttacaatctgagcaaagtcccactcctatgtgataatgagagtgctatccgcatggcggaaaatcctgttgagcacagccgcacaaagcacatagacatccggcatcactttttgagagaccaccagcaaaaggaagatatcgaagtgtttcatgttagcaccgagaaccagctagccgatatctttaccaagcctctagatgagaagaccttttgcaggctgcgtagtgagctaaatgtcttagattcgcggaacttggattga

SEQ ID NO: 4651 - DNA, 1719 bp, Zea mays
  Clone ID: TF_ZM4449.C5.o3.fg
atggatcctaaagggaagggaatcgtgatcaacgacaaggagaaggagtctttcgtcaacgagccaagggatgacaagtccaacgactcgggctcgggccacagacgcaaagatgggaagaagaagaagacaagacgcatcaaggagatcgtctactacgacagcgatgagtccacttcctcccaaaaggacgacgaccacaacgaatacgagagaaagaaaccggtcaattcaaacttttcttttgattactctcgtattcctcaaagtactaatgctcatttattatctattccacttggtaaacctcctcattttgatggagaggactacggattttggagtcacaaaatgcgtagtcacttgttctctctccatcctagcatatgggagattgtagaaagtggaatgcactttgatagtacggatagtcccatgtttattaatgaacagattcataaaaatgcacaagctactactgtgttgctagcctctttgtgcagggacgagtaccataaggtgagcggcttggacaatgccaagcagatctgggacaccctcaagatctctcatgaggggaatgatgtcaccttgctcaccaagatggagttggtggagggcgagcttggacggttcgcaatgataaggggcgaggagccaactcaaacatacaaccggctcaagacccttatcaacaaaataaggagctacggaagcacgcgatggacggatcacgacgtcgtccgcctaatgctaaggtcctttaccgttcttgatcctcacttggtgaacaatattcgtgaaaatcctaggtacaccaagatgtcgcccgaagaagttctggggaagttcgtaagcgggcgaatgatgatcaaggaggcaagatatgtggacgacgcgttgaacggtcctattcatgagcctcaacccattgctctcaaggcaacgaggatcaaggaggcgctaccgagcaaggtggcacaagttgaggcggccgggctaaataatgagatggccctcatcattaagcgcttcaagacggcgcttaaaggtcgcaagggacagccaagcaagaccaagacaaaggagaagcgctcgtgcttcaaatgtggtaagattggtcatttcattgctaactgtcccgataatgaaagtgaccaggaaaaggggaacaaaagggagaagaagaagcattacaagaaggccaagggcgaggcacatatcggaaaggagtgggattcggattgctcctcctccgactccgacaatgagggactcgccgccaccgccttcaacaagtcatccctcttccccaacgagcgtcacacttgcctcatggcaagggagaagaaagtaagcactcatgatactagtacttatgcttcttcaagtgaggatgagtctagtgatgatgatgagatagattactcatgcttattcaaaggattagatagatctaaaattaataagattaatgagttgattgatgctttgaatgataagaatagattactagaaaaacaagaggatcttttatatgaggagcatgataaatttgttagtgcacaaaattctcttgctctagaaattaaaaggaatgaaatgctctctagtgaattatctacttgtcatgaatccatctctaaattaaaaagtgttaatgatgatttgaatgctaagttagaaatagctagtaaatcaacatcttgtgtagtgtaa

SEQ ID NO: 4652 - DNA, 5529 bp, Zea mays
  Clone ID: TF_ZM4451.C1.o17.fg
atggatcctaaagggaagggaatcgtgatcaacgacaaggagaaggagtccttcgtcaacgagccaagagatgataagtccaacgactcaggctcgggccacagacgcaaagatgggaagaagaagaagacaagacacatcaaggagatcgtctactacgacagcgatgagtctacttcctcccaaaaggacgacgaccacaacgaatacgagagaaagaaaccggtcaattcgaacttttcttttgattactctcgtattcctcaaagtactaatgctcatttattatctattccacttggtaaacctcctcattttgatggagaggactacagattttggagtcacaaaatgcgtagtcacttgttctctctccatcctagcatatgggagattgtagaaagtggaatgcactttgatagtacggatagtcccatgtttattaatgaacagattcataaaaatgcacaagctactactgtattgctagcctctttgtgcagggacgagtaccataaggtgagcggcttggacaatgccaagcagatctgggacaccctcaagatctctcatgaggggaatgatgtcaccttgctcaccaagatggagttggtggaaggcgagcttggacggttcgcaatgataaggggcgaggagccaactcaaacatacaaccggctcaagacccttatcaacaaaataaggagctacggaagcacacgatggacggatcacgacgtcgtccgcctaatgctaaggtcctttaccgttcttgatcctcatttggtgaacaatattcgtgaaaatcctaggtacaccaagatgtcgcccgaagaagttctggggaagttcgtaagcgggcgaatgatgatcaaggaggcaagatatgtggacgacgcgttgaacggtcctattcatgagcctcaacccaatgctctcaaggcaacgaggagtaaggaggcactaccgagcaaggtggcgcaagttgaggcggccgggctaaataatgaggagatggccctcatcattaagcgcttcaagacggcgcttaaaggtcgcaagggacagccaagcaagaccaagacaaaggagaagcgctcgtgcttcaaatgtggtaagattggtcatttcattgctaactgtcccgataatgaaagtgaccaggaaaaggggaacaaaagggagaagaagaagcattacaagaaggccaagggcgaggcacatatcagaaaggagtgggattcggattgttcttcctccgactccgacaatgaaggactcgccgccaccgccttcagcaagtcatccctcttccccaacgagcgtcacacttgcctcatggcaagggagaagaaagtaagcactcataatactagtacttatgcttcttcaagtgaggatgagtctagtgatgatgatgagatagattactcatgcttattcaagggattagatagatctaaaattaataagtttaatgagttgattgatgctttgaatgacaagaatagattactagaaaaacaagaggatcttttatatgaggagcatgataaatttgttagtgcacaaaattctcttgctctagaaattaaaaggaatgaaatgctctctagtgaattatctacttgtcatgaatccatctctaaattaaaaagtgttaatgttgatttgaatgctaagttagaaatagccagtaaatcaacatcttgtgtagaaattgttgaaacttgcaataggtgtaaagattttgacattgatggttgtagtgatcatttagtttcaatttccaaattaaatgaggaattggctagtcttaatgcccaacttaagactagcaagaatgaatttgataagctgaaatttgcaagggatgcctacacgattggtagacacccctcaattaaggatggacttggctacaagagggaagccaaggacttgacaagccataaggctcctatctccgccaaggagaaagggaaggctcctatggctagtagtactaaaaggaaccatgcttttatgtatcatgataggagacaaactagaaatgcttataggagttataatgcttatgatgattttgactctcatgccatgtttgcttctagttcttcctatatgcatggtagaaatatgtctaggagaaatgctattcatcatgtgcctagaaagaatattattcatgctcctaggaaaatagtgaatgaaccttctacaatttattgtgctttaaatgcttcctttgctatttgtagaaaggataggaaaatagttgctaggaagttaggggcaaaatgcaagggagacaaaacttgcatttgggtccctaaggatatttgcactaaccttgtaggacccaacatgagttgggtttatgcatccgggggttcaagctggattatcgacagcggatgcacaaaccatatgacgggggagaagaagatgttcacctcctacgtcaagaataaggattcccaagattcaattatattcggtgatgggaatcaaggcaaggtaaaagggttagttgagtctcttggttacaatttgctatctgttagtcaactatgcaatatgggatataattgtctttttacaaatgtagatgtgtctgtctttagaagaagtgatggttcactagcctttaagggtgtattagacggcaagctttacttagttgattttgcaaaagaagaggccggtctagatgcatgcttaattgctaagactagcatgggctggctgtggcatcgccgcttagcacatgtggggatgaagaaccttcacaagcttctaaagggagaacacgtgataggtttgactaacgtacaattcaaaaaagatagaccttgtgcagcttgtcaggcaggtaaacaggtgggaggagcgcatcacagcaagaatgtgatgaccacatcaagacccctggagctgctacatatggacctcttcggacccgtcgcctatctaagcataggaggaagtaagtatggtttagttattgttgatgacttttcccgcttcacttgggtgttctttttgcaggataagtctgaaacccaagggaccctcaagcgcttcctcaggagagctcaaaatgagtttgagctcaaggtgaagaagataaggagcgacaacaggtccgagttcaagaaccttcaagtggaggagttccttgaggaggaagggatcaagcacgagttctccgctccctacacaccacagcaaaatggtgtggtagagaggaagaacaggacgctaatcgatatggcgaggacgatgcttggagaattcaagacccccgagcgtttttggtcggaagccgtgaacacggcttgccacgccatcaacagggtctaccttcatcgcctcctcaagaagacttcgtatgagctactaaccggtaacaaacccaatgtatcttactttcgtgtatttgggagcaggtgctacattctagtaaagaagggtagaaattcaaaatttgctcccaaagctgtagaagggtttttgttaggttatgactcaaatacaaaggcgtatagagttttcaacaaatcatcgggtttggttgaagtctctagcgacgttgtatttgatgagactaatggctctccaagagagcaagttgttgattatgatgatgtagatgaagaagatgttccgacggctgctatacgaaccatggcgattggagaagtgcggccacaggaacaagatgaacgagatcaaccttcttcctcaacaacggtgcatcccccaactcaagacgttgaacaggttcttcaaaaggaggcgtgtgatcaagggggagcacaagatgatcacgtgatggaggaagaagtgcaaccggcacctccaacccaagttcgagcggtgattcaaagggatcatcccgtcgaccaaattttgggtgacattagcaagggagtaactactcgatctcgattagttaatttttgtgagcattactcctttgtctcttctattgagccttacagggtagaggaggccttgctagatccggattggatattggccatgcaggaggaactcaacaacttcaagcgcaatgaagtttggacactggtgcctcgtcccaagcaaaatgttgtgggaaccaagtgggtgttccgcaacaaacaggacgagcacggggtggtgacgaggaacaaggctcgacttgtggcaaaaggttatgcccaagtcgcaggtttggactttgaggagacttttgctcctgtggctaggctagaatcaattcgtatcttgctagcatatgccactcaccattctttcaggttgtaccaaatggatgtgaagagcgcgttcctcaacgggccgatcaaggaggaggtgtacgtagagcaaccccctggcttcgaggatgaacggtaccccgaccatgtgtgtaagctctctaaggcgctctatggacttaagcaagccccaagagcatggtatgaatgccttagagactttttaattgctaatgctttcaaggttgggaaagccgatccaactctttttactaagacttgcaatggtgatctttttgtgtgccaaatttatgtcgatgacataatatttggttctactaatcaaaagtcttgtgaagagtttagcaggctgatgacacagaaatttgagatgtcgatgatggccgagttgaactacttccttgggtttcaagtgaagcaactcaaggacggcaccttcatctcccaaacaaagtacacgcaagacttgctgaagcggtttgggatgaaggacgccaagcccgcaaaaactccgatggggaccgacggacacaccgacctcaacaaaggaggtaagtccgttgatcaaaaagcataccggtcaatgatagggtctttactttatttatgtgctagtagaccggatattatgcttagcgtatgcatgtgtgctagatttcaatccgatcctaaggaatgtcacttagtggcggtgaagcgaattcttagatatttggttgctacgccttgcttcgggctctggtatccaaaggggtctacctttgacttggttggatactcagattccgactatgctggatgtaaggtcgataggaagagtacatcagggacgtgccaattcttaggaaggtccctggtgtcgtggaactctaagaaacaaacctctgttgctctatccaccgctgaggccgagtatgttgccgcagggcagtgttgcgcgcaactactttggatgaggcaaacccttcgggactttggctacaatctgagcaaagtcccactcctatgtgacaatgagagtgctatccgcatggcggaaaatcctgttgaacacagccgcacaaagcacatagacatccgacatcactttttgagagaccaccagcaaaagggagatatcgaagtgtttcatgttagcaccgagaaccagctagccgatatctttaccaagcctctagacgagaagaccttttgcaggttgcgtagtgagctaaatgtcttagattcgcggaacttggattga

SEQ ID NO: 4653 - DNA, 3720 bp, Zea mays
  Clone ID: TF_ZM4455.C2.o3.fg
atggatcctaagggcaaggggatggtggtcaatgataaggagaaggagtcattcgtcaatgatccaaaggatgacaagcccactgactcgggcatgagtcacaaaagaaaagacgggaagaagaagaaaacgaggcgcatcaaggagatcgtctactacgacgacagcgacgagtcctcttcttctcaaaaggacgacgacaacgactacgagaaaaagaagacggttaattcaaatttttcctttgattattctcgtattccgcaaagttccaatactcattttctttccattccccttggtaaaccccctcactttgatggagaggactacgaattttggagtcacaaaatgcgtagccacttgttctctctccatccaagtatatgcgagatagtagaaaatggaatgcattttgatagtacggatagtcccatgttcatcaatgaacaaaaccataaaaatgctcaagctactactgtccttttagcatctttgtgcagggaagaatacaataaggtgagtggcttggacaatgccaagcagatctgggacaccctcaagatatcacatgagggaaatgacgtcaccatgctcaccaagatggagttggtggagggagaacttgggagatttgcaatgatcaggggagaggagccaaaccaaacgtacaaccggctcaagaccctcatcaacaaaataaggagctatggaagcacacgatggacggaccacgacgtcgtccgcctactgctaaggtcttttactgtccttgatccacatcttgtaaacaatattcgtgagaatcccaggtacaccaagatgtcgcccgaagaagtacttgggaagtttgtaagcgggcggatgatgatcaaggaggcaagatacgtcgacgatgcattgaatggcccaatccacgagcctcaaaccgtggctctcaaagaaacaaggagcaaggaggcgctacctagcaaggtggcgcaagttgatgcgaccgggcttaatgaggaagaaatggccctcatcatcaagctgttcaaaacggcgctaaagggtcgcaaggagcaccccaacaagaacaagacgaaggggaagcgctcctgcttcaaatgtggtaagattggtcattttatcgctaattgtcccgataataatagtgaccaggaacaagataagaagagggaaaagaagaaggcttacaggaaggctaagggcgaggcacaccttggcaaggagtgggactcggattgctcttcgtccgactccgacaacgaaggactcgctgcatcggccttcaacaaatcatctctcttccccaacgagcactattctagtttattcaaaggtttagacagaaataaaattgataagatcaataaattgattgatgctttgaatgataagaatagattgttagaaaagcaagaggatcttttgtatgaagaacatgataaatttgtagaggcacaaaaatctcttgctttagaagttaaaaggaatgaaatgctttcttgtgaactatctacatgccatgagtctatttctaacttaaagagtattaatgatgacttgaatgctaagttagaagtagcaaatagatctaactcttgtgtagaacatgttgtgatttgcaataggtgtaaagattttaatgttgatgcgtgtagtgaacatctagtctccattgcaaaactaaacgatgaagtggctagtcttaatgcccaacttaagactagcaaggatgaatttgacaaactaaaatttgcaagggatgcctacactattggtagacacccctcaattaaggacgggcttggcttcaaaagggaagccaagaacttaactagtcataaggctcccattcccgctaaggagaaagggaaggcccctatgactaatagttgtcaaaagaaccatgctttcatgtaccatgataggaaattttctagaaatgctcattatgataggagttttaatgcttacaattcaaatgcaatgattgcctcaagttcttcgattatgcataatagaaatttgactagaaaaaatgttatgcctagaagaaatgttgttcatgttcctagcaaagtaaacaatgaaccttctacaatttatcatgcttgcaatgcttcctttgcaatttgtagaaaggatagaaaggtgattgctaggaaattaggggcaaaatgcaagggagataaaacttgcatttgggtccctaaggatattgtcactaaccttgtaggacccaacaagagttgggtttatgcatccgggggatcaagctggattatcgacagcggatgcacaaaccacatgacgggggagaagaagatgttcacctcctacatcaaaaacaaagattcccaagactcaatcatattcggtgacaggaatcaaggcaaggtgaaagggttaggaaaaatagctatttcatccgagcactccatttccaatgtgtttttagttgagtcgcttggatataacttgttgtctgtgagtcagctttgtaatatgggatataactgcttattcacaaatgtagatgtgtctgtctttagaaggagtgatggttcattagcttttaagggtgtattagacgacaaactctacttagttgattttgcaaaagaggaggccggtctagatgcatgcctaattgctaagactagcatgggctggctgtggcatcgccgcttagcacatgtggggatgaagaaccttcacaaacttctaaagggagaacacgtgataggtctaacaaatgttacttttgaaaaggatagacctcgtgcagcttgtcaagcaggtaaacaggtgggaagctctcatcataccaaaaatgtgatgaccacatcaagacctttggagttgcttcatatggacctcttcggacccgtcgcctatctaagtataggaggaagtaagtatggtcttgttatagttgatgatttttcctgcttcacttgggtattctttttgcaggataagtctgaaacccaagggaccctcaagcgcttcctaaggagagctcaaaatgagtttgagctcaaggtgaagaagataaggagcgacaatgggtccgagttcaagaaccttcaagtggaggagtaccttgaggaggaaggaatcaagcacgagttctccgctccctacacaccacagcaaaatggtgtggtagagaggaagaacaggacgcttatagacatggcaaggacaatgcttggagagttcaagacgcccgagcggttttggtcggaagccgtgaacacgacttgtcacgccatgaaccgggtctaccttcatcgcctcctcaagaagacgtcatacgagctactaaccggtaacaaacccaatgtttcgtattttcgagtttttgggagtaaatgctacattctagtgaagaagggtaggaattccaaatttgcccccaaagctgtagaagggtttttgttaggttatgactcaaatacaaaggcgtatagggtcttcaacaaatcattgggtttggttgaagtctctagcgacgttgtatttgatgagactaatggctctccaagagagcaagttgttgatcttgatgatgtagatgaagaagacgttccaacggccgcaatacgcaccatggcgattggagatgtgcggccacaggaacaaaaggagcaagatcaaccttcttcctcaacaatggtgcatcccccaactcaagacgataaatag

SEQ ID NO: 4654 - DNA, 1881 bp, Zea mays
  Clone ID: TF_ZM4548.C4.o1.fg
atggatcctaaggggaagggaatcgtgatcaacaataaggagaaggagtccttcgtcaacgagccaaaggatgacaagtccaacgactcgggctcgggtcataaacgaaaagatgggaagaagaagaagacaaggcgcatcaaggagattgtctactacgacagcgacgaatcttcctcttcccaaaaggacgacgaccacaacgactacgagcaaaggaaaccggttaattctaacttttcctttgactactctcgtattccgcaaagttcaaattcacatttgctttccattccactcggcaagcccccacactttgatggggaggactacggattttggagccacaaaatgcgtagtcacctattctctctccatcctagtatatgggagattgtagatagtggaatgcactttaatagttcggatagtcctatattcattaatgagcaaatccataagaatgcacaagctactactgttctcttagcatctttgtgcagggaagaatacaataaggtgagcggcttggacaatgccaagcagatatgggacaccctcaagatctctcacgagggcaacgacgtcaccatgctcaccaagatggagttggtggagggcgaacttgggagattcgctatgataaggggggaggagccaacccaaacatacaaccggctcaaaacccttgtcaacaagataagaagctatggaagcacgcgatggacggaccacgacgtcgtccgcctaatgctaaggtcctttaccattcttgatcctcatttggtgaataatattcgtgagaatcccaggtacaccaaaatgtcgcccgaagaagttcttgggaagttcgtaagcgggcgaatgatgatcaaggaggcaagatacgtggacgacgcgttgaacggtcctatccatgagcctcaacccattgctctcaaggcaacaaggagcaaggaggcgctaccaagcaaggtggcgcaagttgaggcagccgggctaaataatgaggagatggccctcatcattaagcgcttcaagacggcgcttaaaggtcgcaagggacaaccaagcaagaccaagacaaaggagaagcgctcatgcttcaaatgtggtaagatcggtcatttcattgctaactgtcccgataatgaaagtgaccaggaaaaaggggacaagagggaaaagaagaagcattacaagaaggccaagggcgaggcgcatctaggcaaagagtgggactcggactgctcctcctccgactccgacaatgaaggactcgccgccaccgccttcaacaaatcaaccctcttccccaacgagcgtcacacatgccttatggcaagggagaagaaggtatgtactcgcaactctacctatgcttcttcaagtgaggacgaatctagtgatgaggatgaagtagattattcatgtttgttcaagggcttagatagatctaagatagacaaaattaatgaattaattgatgccttgaatgaaaataatatacttttagaaaagcaagaggatttgttatatgaagaacatgataagtttgtagaggctcaaaaatccctcgcattagaaattaagaggaatgaaatgcttgcttgtgaagtgtcaacatgccatgattctatttctaacttaaagagcataaacgatgatttaaatgctaaactagtagaagcaaataaatccaactcttgtgttgaatatgttgaaatttgcactaggtgtaaggatattgatattaatgcttgtagcgaacacttagtttctatttcaaaattgaatgatgaattagctagtcttaatgctcaacttaagactagcaagagtaattttgataaactaaaatttgctagggatgcctacacg

SEQ ID NO: 4655 - DNA, 5121 bp, Zea mays
  Clone ID: TF_ZM4580.C3.o9.fg
atggatcctaaagggaagggaatcgtgatcaacgacaaggagaaggagtccttcgtcaacgagccaagggatgacaagtccaacgactcgggccacagacgcaaagatgggaagaagaagaagacaagacgcatcaaggagatcgtctactacgacagcgatgagtctacttcctcccaaaaggacgacgaccacaacgaatacgagagaaagaaaccgattcataaaaatgcacaagctactactgtgttgctagcctctttgtgcagggacgagtaccataaggtgagcggcttggacaatgccaagcagatctgggacaccctcaagatctctcatgaggggaatgatgtcaccttgctcaccaagatggagttggtggagggcgagcttggacggttcgcaatgataaggggcgaggagccaactcaaacatacaaccggctcaagacccttatcaacaaaataaggagctacggaagcacgcgatggacggatcacgacgtcgtccgcctaatgctaaggtcctttaccgttcttgatcctcatttggtgaacaatattcgtgaaaatcctaggtacaccaagatgtcgcccgaagaagttctggggaagttcgtaagcgggcgaatgatgatcaaggaggcaagatatgtggacgacgcattgaacggtcctattcatgagcctcaacccattgctctcaaggcaacgaggagcaaggaggcgctaccgagcaaggtggcgcaagttgaggcggtcgggctaaataatgaggagatgacactcatcattaagcgcttcaagacggcgcttaaaggtcgcaagggacagccaagcaagaccaagactaaggagaagcgctcgtgcttcaaatgtggtaagattggtcatttcattgctaactgtcccgataatgaaagtgaccaggaaaaggggaacaaaagggagaagaagaagcattacaagaaggccaaggacgaggcacatatcggaaaggagtgggattcagattgctcctcctccgactccgacaatgaaggactcgccgccaccgccttcaacaagtcatccctcttccccaacgagcgtcacacttgcctcatggcaagggagaagaaagtaagcactcatgatactagtacttatgcttcttcaagtgaggatgagtctagtgatgatgatgagatagactactcatgcttattcaaaggattagatagatctaaaattaataagattaatgagttgattgatgctttgaatgacaagaatagattactagaaaaacaagaggatcttttatatgaggagcatgataaatttgttagtgcacaaaattctcttgctctagaaattaaaaggaatgaaatgctctccagtgaattatctacttgtcatgaatccatctctaaattaaaaagtgttaatgatgatttgaatgctaagttagaaatagctagtaaatcaacatcttgtgtagaaattgttgaaacttgcaataggtgtaaagattttgacattgatgcttgtagtgaacacctagtttcaatttccaaacttaatgatgaattggctagtcttaatgctcaacttaagactagcaagagtaattttgataagctaaaatttgcaagggatgcctacacaattggtagacacccctcaattaaggatggacttggctacaagaaggaagccaagaacttgacaagccataaggctcccatctccgccaaggagaaagggaaggtccctatggatagtagtgtgcaaaagaaccatgcctttatgtaccatgataggagacaatctagaaatgcttataggagatgtaacgcatatggtacttttgattctcatgacatgtttgcttctagttcttcctatgtgcatgatagaaatgttggtaggagaaatgttgttcataatatgcctaggagaaatgttgttaatgttcctaggaaagtttatgcatccgggggttcaagctggattatcgacagcggatgcacaaaccatatgacgggggagaagaagatgttcacctcctacgtcaagaataaggattcccaagattcaattatattcggtgataggaatcaaggcaaggtaaaagggttagttgagtctcttggttacaatttgctatttgttagtcaactatgcaatatgggatataattgtctttttacaaatgtagatgtgtctgtctttagaagaagtgatggttcactagcctttaagggtgtattagacgacaagctttacttagttgattttgcaaaagaagaggccggtctagatgcatgcttaattgctaagactagcatgggctggctgtggcatcgccgcttagcacatgtggggatgaagaaccttcacaagcttctaaagggagaacacgtgataggtttgactaacgtacaattcgaaaaagatagaccttgtgcagcttgtcaagcaggtaaacaggtgggaggagcgcatcacagcaagaatgtgatgaccacatcaagacccctggagctgctacatatggacctcttcggacccgtcgcctatctaagcataggaggaagtaagtatggtttagtcattgttgatgatttttcccgcttcacttgggtgttctttttgcaggataagtctgaaacccaagggaccctcaagcgcttcctcaggagagctcaaaatgagtttgagctcaaggtgaagaagataaggagcgacaacgggtccgagttcaagaaccttcaagtggaggagttccttgaggaggagggaatcaagcatgagttctccgctccctacacacctcagcaaaatggtgtggtagagaggaagaacaggacgctcattgatatggcaaggactatgcttggagaattcaagacccccgagtgtttttggtcggaagccgtgaacacggcttgccacgccatcaacagggtctatcttcaccgcctcctcaagaagacctcatacgagcttctaaccggtaacaaacccaatgtatcgtactttcgtgtatttgggagtaaatgctacattctagtgaagaagggtaggaattccaaatttgctcccaaagctgtagaagggtttttactaggttatgattcaaatacaaaggcgtataggttcttcaacaaatcatcgggtttggttgaagtctctagcgacgttgtatttgatgagactaatggctctccaagagagcaagttgttgatcttgatgacgtagacgaagaagatgttccgacggctgctatacgaaccatggcgattggtgatgtgcgaccacaggaacaagatgagcaagatcaaccttcttcctcaactatggtgcatcccccaactcaagacgatgaacaggttcatcaacaggaggcgtgtgatcaagggggagcacaagatgatcatgtgatgggggaagaagcgcaaccggcacctccaacccaagttcgagcgatgattcaaagggatcatcccgtcgaccaaattctgtgtgatattagcaagggagtaactactcggtctcgattagttaatttttgtgaacattactcctttgtctcttctattgagcctttcagggtagaagaggccttgctagatccggactgggtgttggccatgcaagaggagctcaacaacttcaagaggaatgaagtttggacgctggtgcctcgtcctaagcaaaatgttgtgggaaccaagtgggtgttccgcaacaaacaagacgagcacggagtggtgacaaggaacaaggctcgacttgtggcaaaaggttatgcccaagtcgcaggtttggactttgaggagacgtttgctcctgtggctaggctagaatcaattcgtatcttgctagcatatgccgctcaccattctttcaggttgtaccaaatggatgtgaagagcgctttcctcaatgggccaatcaaggaggaggtgtacgtggagcaaccccctggcttcgaggatgaacggtaccccgaccacgtgtgtaagctctctaaggcgctctatggacttaagcaagccccaagagcatggtatgaatgccttagagatttcttaattactaatgctttcaaggttgggaaagccgatccaactcttttcactaagacatgtaatggtgatttgtttgtatgccaaatttatgtcgatgacataatatttggttctactaataaaaagtcttgtgaagagtttaacagggtgatgacgcagaaattcgagatgtcgatgatggacgagttgaactacttccttgggtttcaagtgaagcaactcaaggacggcaccttcatctcccaaacaaagtacacacaagacttgctgaagcggtttgggatgaaggacgccaagcccgcaaagactccgatggggaccgacggacacaccgacctcaacaaaggaggtaagtccgttgatcaaaaggcataccggtcaatgatagggtcgttactttacttatgtgctagtagaccggatattatgcttagcgtatgcatgtgtgctagatttcaatccgatcctaaggagtgtcacttagtggcagtgcagcgaatccttagatatttagttgctacgccttgcttcgggctctggtatccaaaggggtctacctttgacttgattggatattcggactccgactatgctggatgtaaggtcgataggaagagtacatcggggacgtgccaattcttaggaaggtccctggtgtcatggaactctaagaaacaaacttccgttgccctatccacagctgaggccgagtatgttgccgcaggacagtgttgcgcgcaactactttggatgaggcaaaccctcagggactttggctacaatctgagcaaagtcccactcctatgtgataatgagagtgctatccgcatggcggaaaatcctgttgagcacagccgcacaaagcacatagacatccgacatcactttttgagagaccaccagcaaaagggagatattgaagtgtttcatgttagcaccgagaaccagctagccgatatctttaccaagcctctagacgagaagaccttttgcaggttgcgtagtgagctaaatgtcctagattcgcggaacttggattga

SEQ ID NO: 4656 - DNA, 2379 bp, Zea mays
  Clone ID: TF_ZM4589.C1.o1.fg
atggatcctaagggaaaggggacggtggtcaacaacaacgagaaggagtctatcttcaatgagccgaaagatgacaagcctacggactcgggctcgagccacaaaagaagagacgggaaaaagaagacaaggcgcatcaaggagatagtctactacgacagcgacgaatcttcctcttcccaaaagtacgacgacgactacgagaaaaagaaaacggtcaattcgaacttttcttttgattactctcgtattcctcaatgtgcatatgctcatttactatccattccacttggtaaacctcctcattttgatggagaggactacggattttggagtcacaagatgcgtagtcacttgttctctctccatcctagcatatgggagatagtagagagtggaatgaaatttgatagctcgaatagccctttgtttatcaatgaacaaattcataaaaatgcacaagctactaatgttcttctagcttcattgtgcagggatgaataccacaaagtgagcggcttggacaatgccaagcagatctgggacaccctcaagatctcacatgagggcaacgacgtcaccatgctcaccaagatgcagttggtagagggcgaacttgggagattcgctatgataaggggggaggagccaacccaaacatacaatcggctcaagacccttgtcaacaagataaggagctatggaagcacgcgatggacggaccacgacgtcgtccgcctaatgctaaggtcctttactgttcttgatcctcatcttgtgaacaatattcgtgagaatcctagcgggcgaatgatgatcaaggaggcgagatacgtggatgatgcattaaatggcccaattcaagagcctcaaactattgctctcaaagcaacgaggagcaaggaggcgctacctagcaaggtggcacaaattgaggcggccgagcttaatgatgaagaaatggccctcatcatcaagcgtttcaagacggcgctaaggggtcgcaaggagcatcccaacaagaccaagacaaaggggaagcgctcatgcttcaaatgtggtaagattggtcactttatcgctaattgtcccgataatgatagtgacctggaaaagaagagtggaaaatgggaaaagaagaagaattacaagaaggcaaagggcgaggcacatattggaaaggagtgggattcggattgctccacgtccgactccgacaacgaaggactcgccgccaccgccttcaacaagtcatccctttttccaaacgagcatcacacatgcctcatggctaaggagaagaaaggattagatagatctaaaattgataagattaatgagttgattgatgccttgaatgacaagaatagattactagaaaaacaagaggatcttttatatgaggagcgagataaatttgttagtgcacaaaattctcttgctctagaaattaaaaggaatgaaatgctctcttgtgaattatctacttgtcatgaatccatctctaatttaagaagtgttaatgatgatttgaatgctaagttagagatcgctagtaaatctaactcttgtgtagaaaatgttgtaacttgcactaggtgtaaagatattaacattgatgcttgtagtgaacacctagctcgcatttctaaattaaatgacgaggtagctagtcttaatgcccaacttaagactagcaagagtgattttaataaactaaaatttgctagggatgcctacacggttggtagacacccctcaattaaggatgggcttggtttcaagagggaagccaagaacttaacaagccataaggctcccattcccgccaaggagaaagggaaggcccctatggctagtagtgctaaaaagaaccatgcttttatgtatatgataggagacatgctagaaatgcaaatagaagttatgatgcttttgattcatatgtttatgattctcatgccatgtttgcttctagttcttcctataagcatgatagagatatgtctaggagaaatgttgttcacactgcgtaggagaaatgttgttaatgttcctaggaaagttaatggaccttctacaatatatcatgctttaaatgcttccattgctatttgtagaaaagacaagaagatagttgctagaaaattaggggcaaaatgcaagggagacaaaacttgcttttgggtccctaaggatatttgtgctaaccttgtaggacccaacatgagttgggtttatgcatccgggggttcaagctggattatcgacagcggatgcacaaaccatatgacgggggagaagaagatgttcacctcctacgtcaaaaacaaggattcccaagattcaataatattcggtgatgggaaccaaggcaag

SEQ ID NO: 4657 - DNA, 5031 bp, Zea mays
  Clone ID: TF_ZM4611.C1.o2.fg
atggatcctaggggcaaggggacagtggtcaacgataaggagaaggagtccttcgtcaacgagcctaaagatgacaagcctaccgactcgagctcgggccacaaacaaagagatgggaagaagaagaagaagacgaggcgcatcaaggagatcgtctactacgacgacaacgacgagtcctcttcttcccaaaaggacgacgacaacgtctacgagaataagaagacgattaattcaaacttctcttttgattattctcgtattcctcaaagtaccaatgctcatttactctccattccacttgcctcattgtgcagggacgagtatcataaggtgagcggcttggacaatgccaagcagatctgggacaccctcaagatctcacatgaggggaacgacgtcaccatactcaccaagatggagttggtggaaggcgaactcgggagattcgcgatgataagaggggaggagccaacccagacgtacaacaggctcaaaaccctcgtcaacaagataaggagctatggaagcacgcgatggacggaccacgacgttgtccgcctaatgctaaggtcctttaccgtccttgatccacatcttatgaacaatattcgtgagaatcctaggtacacgaagatgacgcccgaggagatccttggaaagttcgtaagcgggtggatgatgatcaaggaggctagatacgtcgatgatgcattaaatggtccaatccaagagcctcaaactattgctctcaaggcaacaaggagcaaggaggcactacctagcaaggtggcgcaagttgaggcggccgggcttaatgaggaagaaatgacccttatcatcaagcggttcaagacgacgctaaagggtcgcaaggagcaccccaacaagaacaagacgaaggggaagcgctcctgcttcaaatgtggtaagattggtcattttatcgcaaattgtcccgataatgatagtgaccaggaaaagaagagtggaaagtgggaaaagaagaagaactacaagaaggcgaagggcgaggcacatcttggaaaggagtgggattcagattgctcctcgtccgactccgacaacgaaggactcgccgccaccgccttcaacaagtcatccctcttccccaacgagcatcacacttgcctcatggcaagggaaaagaaggtaagcactcgtaatactagtacttatgcttcttcaagtgaggatgagtctagtgatgatgatgaaatagattattcatgtttattcaaaggcctagatagaaccaaggttgataaaattaatgaattaattgatgccttgaatgataagaatatgttattagaaaagcaagagaatcttttgtatgaagagcatgataaatttgttagtgcacaaagttctcttgctctagaagttaaaaggaatgaaatgctttcttgtgaactatctacttgtcatgaaaccatttctactctaaaaggtattaatgatgatttaaatgctaaactagaagtagcaaataaatctaactcttgtgtagaacatgttataatttgcaataggtgcaaagattttaatgttgatgcttgtagtgaacacctagcttgcatttctaaattaaatgatgaagtggctagtcttaatgctcaacttaagactagcaagagtgaatttgacaagctaaaatttgcaagggatgcctacacgattggtagacacccctcaattaaggatggtcttggcttcaagagggaagtcaagaacttaacaagccaaaaggcttccatctccgccaaggagaaagggaaggcccctatggctagtagtgctcaaaagaaccatgccttcatgtatcatgataggagacattctagaaatgactatagaagttataatgattttgattctcatgcaatggttgcttctagctcctctattatgcatgatagaaacttagctaggagaaatgttattaataacatgcctagaagaaatgttgttcatgtgcctaggaaaacaaatagtgaaccttctacaatttatcatgctttaaatgcttcctttgctatttgtagaaaggataggaagataattgctagaaaattaggggcaaaatgcaagggagataaaacctgcatttgggtccctaaggctatttgtactaaccttgtaggacccaacatgagttgggtttatgcatccgggggatcaagctggattatcgacagcggatgcacaaaccacatgacgggggaaaagatgatgttctcttcctacgtcaagaacaaggatccccaagattcaatcatattcggtgatgggaaccaaggcaaggttaaaggcttaggcaagattgcaatctcaaatgagcactccatttctaatgtattcttagttgagtcgcttggatataatttgctatccaccttgtgcagcttatcaagcagggaaacaggtgggaagctctcatcatgccaaaaatgtgatgacaacatcaagacccctggagttacttcatatggacctcttcggacccgtcgcctatctaagcataggaggaagataaatctgaaacccaagggaccctggcgcttcctaaggagagctcaaaacgagtttgagctcaaggtgaagaagataaggagcgacaatgggtctgaattcaagaaccttcaagtggaggagtatcttgaggaggaaggaatcaagcacgagttctccgctccctacgcaccacagcaaaatggtgtggtagagaggaagaacaggacgcttatagacatggcgaggacgatgcttggagcattcaagacactcgagtgcttctggtcggaagctgtgaacacggcttgccacgccatcaaccgggtctaccttcatcgcctcctcaagaagacttcatatgagctgctaaccggtaacaaacccaatgtttcgtatttccgagtttttgggagtaaatgctacattctagtgaagaaaggtaggaatttcaaatttgctcccaaagccgtagaagggtttttgttaggttatgactcaaatacaaaggcgtatagggtcttcaacaaatcatcgggtttggttgaagtctctagcgacgttgtatttgatgagactaatggctctccaagagagcaagttgttgatcttgatgatgtagatgaagaagatgttccaacgaccgcaatgcgcaccatggcgattggagatgtgaggccaatggaacaaaaggagcaagatcaaccctcttcctcaacaatggtgcatcccccaactcaagaagatgaacaggttcatcaagaggaggcgtgtgatcaagggggagcacaagatgatcatgtaatggaggaagaaacacaaccgacacctccaacccaagttcgagcgatgattcaaagggatcatcccgtcgaccagattttgggtgacattagcaagggagtaactactcgttctcatttagttaatttttgtgagcattactcttttgtctcttctattgagcctttcagggtagaggaggccttgctagatccagactgggtgttggccatgcaggaggagctcaacaacttcaagagaaatgaagtttgtacactggtgcctcgtcccaagcaaaatgttgtgggaaccaagtgggtgttccgcaacaaacaagacgagcacggagtggtgacaaggaacaaggcacgacttgtggcaaaaggttatgcccaagtcgcaggtttggactttgaggagacttttgctcctgtggctaggctagagtccattcgtattttgctagcatatgccgctcaccattctttcaggttgttccaaatggatgtgaagagcgctttcctcaacgggccaatcaaggaggaggtgtacgtagagcaaccccctggcttcgaggatgaacggtaccccgaccacgtgtgtaagctctctaaggcgctctatggacttaagaaagccccaagagcatggtatgaatgccttagagactttttaattgctaatgctttcaaggttgggaaagtcgatccaactctttttactaagacttgtgatggtgatctttttgtgtgccaaatttatgtcgatgacataatatttggttctactaaccaaaagtcttgtgaagattttagcagggtgatgactcaaaagtttgaaatgtcgatgatgggcgagctaagctatttccttgggttccaagtgaggcaactcaaggatgggaccttcatctcccaaacgaagtacacgcaagacttgatcaagcggtttgggatgaaggacgccaagccggcaaagactccaatgggaaccgacggatacaccgacctcaacaaaggaggtaagtccgttgatcaaaaggcatataggtctatgatagggtctttactttatttatgtgctagtagaccggatattatgcttagcgtatgcatgtgtgctagatttcaatccgatccaagggaatgtcacttagtggcggtgaagcgaattcttagatatttagtcgctacgccttgcttcgggatctggtatccaaaggggtctacctttgacttgattggatattcagactccgactatgctggatgtaaggtcgataggaagagtacatcggggacgtgccaattcttaggaaggtccctggtgtcatggagttttaagaaacaaacttccgttgccctatccaccactgaggccgagtacgttgccacaggacagtgttgcgcgcaactactttggatgaggcaaaccctcagggactttggctacaatctgagcaaagtcccactcctatgtgataatgagagtgctatccgcatggcggataatcctgttgaacacagccgcacaaagcacattgacatccggcatcactttttgagagaccaccagcaaaagggagatatcgaagtgtttcatgttagcaccgagaaccagctagccgatatctttaccaagcctctagatgagaagaccttttgcaggctgcgtagtgagctgaatgtcttagattcgcggaacctggattga

SEQ ID NO: 4658 - DNA, 4785 bp, Zea mays
  Clone ID: TF_ZM4612.C4.o3.fg
atggatcctaagggaaaggggatggtggtcgacaacaacgagaaggagtctatcttcaacgagccgaagaatgacaagtctaccgacttgggctcaagccacaagcgcaaagatgggaagaagaagaagacaaggcgcatcaaggagatcgtctactacgacagcgacgaatcctcttcttcccaaaaggacgacgacaacgactacaggaagactgtcaattcgaacttttcgtttgattattctcgtattccacataattcgaattcgcatttgctttccattcctcttggcaaacctccacactttgatggggaggactacggattttggagtcacaaaatgcgtagtcatttattctctctccatccaagcatatgggaaattgtagagaatggaatgaaatttgatagctcggatagccctatgtttgttaatgaacagattcataaaaatgcacaagctactactgtgttgctagcctctttgtgcagggacaagtacaataaggtgagcggcttggacaatgccaagcagatatgggacaccctcaagatttctcatgaggggaacgacatcaccatgctcactaaaatggagttggtggagggcgagcttggaaggtttgcgacgataaggggcgaggagccaacccaaacatacaaccggctcaagacccttatcaacaaaataatgagctatggaagcacgcgatggacggaccatgacgtcgtccgactattactaaggtcctttaccattcttgatcctcatttggtgaataatattcgtgagaatcccaggtacaccaaaatgtcgcccgaagaagtcctaggaaatttcgtcagcgggcgaatgatgattaaggaagcaagatacgtggacgacgccttgaatggaccgatcaacgagccgcaacctcttgctctcaaagcaacaagaagcaaggaggcgctacctagcaaggtggcacaaattgaggcggccggacttaatgatgaagagatggctctcatcatcaaacgcttcaagacggtgctaaagggtcacaaggggcagccaagcaagaccaagacaaaggggaagcgctcatgcttcaagtgcggtaagattggtcattttatcgctaactgccccgataatgatagtaaccaggaacaggaaaacaagagggaaaagaagaagaattacaagaaggcaaagggcgaggcgcatctaggcaaggagtgggactcggactgctcctcttccgactccgacaatgaaggactcgccgccaccgccttcaacaagtcatccctcttccccaacgagcgtcacacatgccttatggcaagggagaagaaggtgagtactcgagactccacttatgcttcttctagtgataatgagtctagtgatgatgatgacatagactattcatgcttattcaagggcttagatagatctaagatagataaaattaatgaattaatcgatgccttgaatgataagaataggcttttagaaaagcaagaggatttgttgtatgaagaacatgacaaatttgtagaagcacaaaaatcacttgcattagagattaaaagaaatgaaatgctttcttgtgaggtgtctacatgtcatgattcaatttctagtttaaagagcataaatgatgatttaaatgctaaactagaaagatctagtaaatcaacatcttgtgtagagcatgttgtgatttgcactaggtgtaaagattttgacattgatgcttgtagtgaacacctagtttcaatttcaaaacttaatgatgaattggctagtcttaatgcccaacttaagactagcaaaagtgaatttgacaagttaaaatttgcaagggatgcctatacaattggaagacatccctcaattaaggatgggcttggcttcaagagggaagccaagaacttaacaagccataagactcccatctccgccaaggagaaagggaaggcccctatggctagtagagacaaactagaaatgcttatagaagttataataaatgttgctaggagaaatgctattcatcatgtgcctagaaagaatgttctttatgctcctaggaaagtagtgaatgaaccttctacagtttattgtgctttaaatgcctcctttgcaatctgtagaaaggatagaaaggtttatgcatccgggggttcaagctggattatcgacagcggatgcacaaaccatatgacgggggagaagaagatgttcacctcctacgtcaagaataaggattcccaagattcaattatatttggtgatgggaatcaaggcaaggataagtctgaaacccaagggaccctcaagcgcttcctcaggagagctcaaaatgagtttgagctcaaggtgaagaagataaggagcgacaacgggtccgaattcaagaaccttcaagtggaggagttccttgaggaagaaggaatcaagcacgagttctccgctccctacacaccacaacaaaatggtgtggtagaaaggaagaacaggacgctcatcgatatggtgaggacgatgctaggagagttcaagacccccgagtgcttttggacggaagccgtgaacacggcttgccacgccatcaacagggtctaccttcatcgcctcctcaagaagacctcatatgagctactaaccggtaacaaacccaatgtatcttactttcgtgtatttgggagcaagtgctacattctagtaaagaagggtagaaattctaagtttgctcccaaagctgtagaagggtttttattaggttatgactcaaatacaaaggcgtatagagtcttcaacaaatcatcgggtttggttgaagtctctagcgacgttgtatttgatgagactaatggctctccaagagagcaagttgttgatcttgatgatgtagatgaagaagatgtttcgacggccgctatacgaaccatggcgattggtgatgtgcgaccacaggaacaagatgagcaagatcaaccttcttcctcaactatggtgcatcccccaactcaagacgatgaacaggttcatcaacaggaggcgtgtgatcaagggggagcacaagatgatcatgtgatggaggaagaagcggaaccagcacctccaacccaagttcgagcggtgattcaaagggatcatcccgtcgaccaaattctgggggatattagcaagggagtaactactcggtctcgattagttaatttttgtgaacattactcctttgtctcttctattgagcctttcagggtagaggaggccttgctagatccggattgggtattggccatgcaggaggaactcaacaacttcaagcgcaatgaagtttggacactggtgcctcgtcctaagcaaaatgttgtgggaaccaagtgggtgttccgcaacaaacaagacgagcacggagtggtgacgaggaacaagactcgacttgtggcaaaaggttatgcccaagtcgcaggtttggactttgaggagacttttgctcctgtggctaggctagagtccattcgtatcttgctagcatatgccgctcaccattctttcaggttgttccaaatggatgtgaagagcgctttcctcaacgggccaataaaggaggaggtgtacgtggagcaaccccctggcttcgaggacgaacggtaccccgaccacgtgtgtaagctctctaaggcgctctatggacttaagcaagccccaagagcatggtatgaatgccttagagatttcttaagtgctaatgctttcaaggttgggaaagccgatccaactcttttcactaagacatgtgatggtgatttgtttgtgtgccaaatttatgtcgatgacataatatttggttctactaataaaaagtcttgtgaagagtttagcagggtgatgacgcagaaattcgagatgtcaatgatgggcgaattgaactacttccttgggttccaagtgaagcaactcaaggacggcaccttcatctctcaaacgaagtacacacaagacctgctgaagcggtttgggatgaaggacgccaagcccgcaaagactccgatgggaaccgacggacacaccgacctcaacaaaggaggtaagtccgttgatcaaaaagcataccggtcaatgatagggtctttactttacttatgtgctagtagaccggatattatgcttagcgtatgcatgtgtgctagatttcaatccgatcctaaggagtgtcacttagtggcagtgaagcgaatccttagatatttagttgctacgccttgcttcgggctctggtatccaaaggggtctacctttgacttgattggatattcagactccgactatgctggatgtaaggtcgataggaagagtacatcagggacgtgccaattcttaggaaggtccctggtgtcatggaactctaagaaacaaacttccgttgccctatccaccgctgaggccgagtatgttgccgcaggacagtgttgcgcgcaactactttggatgaggcaaaccctcagggactttggctacaatctaagcaaagtcccactcctatgtgataatgagagtgctatccgcatggcggaaaatcctgttgagcacagtcgcacaaagcacatagacatccggcatcactttttgagagaccaccagcaaaagggagatatcgaagtgtttcatgttagcaccgagaaccagctagccgatatctttaccaagcctctagatgagaagaccttttgcaggctgcgtagtgagctaaatgtcttagattcgcggaacttggattga

SEQ ID NO: 4659 - DNA, 4548 bp, Zea mays
  Clone ID: TF_ZM4613.C2.o1.fg
atggatcctaggggcaaggggatggtggtcaatgataaggaaaaggagtccttcgtcaatgatccaaaagatgacaagcctactgactcgggctcaagccacaaaagaaaagacgggaagaataagaaaacaaggcgcatcaaggagatcgtctactacgacgacagcgacgagtcctcttcttcccaaaaggacgacgacaactacgagaaaaagaaaccggtcaattcaaacttttcttttgattattctcgtattccacaaaataaaaatgctcatttactctccattccacttgttggtggagggcgaacttgggagattcgcaatgatcaggggcgaggagccaacccaaacgtacaaccggctcaagaccctcgtcaacaaaataaggagctatggaagcatgcgttgaacggcccaatccacgagcctcaaactgttgctctcaaagcaacaaggagcaaggaagtgctacctagcaaggtggcacaagttgaggcggcgggactcaatgaggaagagatggccctcatcattaagtgtttcaagacggcgctaaggggtcgcaaggagcatccaaataagaccaagacaaaggggaagcgctcatgcttcaaatgtggtaagattggtcattttatcgctaactgtcccgataatgatagtgaccaggaacaagggaacaagagggaaaagaagaaggcttacaagaagactaagggcgaggcacaccttggaaaggagtgggactcggattgttcgtcgtccgactccgacaacgaaggactcgccgccaccgccttcaacaagtcggccctcttccccaacgagcatcacacctgcctcatggcaagggaaaagaagatagaactaaggttgataaaaattaatgaattaattgacgccttgaatgataaaaataggttattagaaaagcaagaggatcttttgtatgaagaacatgataagtttgtagaggcacaaaaatcccttgctttagaaataaaaaggaatgaaatgctttcttgtgaattgtctatatgccatgactctatttctagcttaaagagcataaatgatgatttaaatgctaagttagaaatagctaataaatcaacatcttgtgtagaacatgttgcaatttgcaataggtgtaaagattttaatgttgatgcttgtagtgaacatctagtttcaatttctaatttgaatgatgaagtggctagtcttaatgcccaacttaagactagcaagagtgaatttgacaaactgaaatttgcaagggatgcctacacgattggtagacacccctcaattaaggatggtcttggcttcaagagggaagtcaagaacttaacgagccataaggcatccatctccgccaaggagaaagggaaggcccctatggctagtagtgttcaaaagaaccatgctttcatgtatcatgataggagacattctaggaatgttgatagaagttatgatgcttttgattctcatgccatgattgcttctagttcttctattatgcatgatagaaatttggctaggaaaaatgttgttcatcatatgcctagaagaaatgctcatgtacctaggaaaacaagcaatgaaccttctacaatttatcatgctttaaatgcttcctttgctatttgtagaaaggataagaaggtggttgctagaaaattaggggcaaaatgcaagggagataaaacttgcatttgggtccctaagactatttgtttatgcatccggggctcaagctggattatcgacagcggatgcacaaaccacatgacgggggaaaagaggatgttctcttcctacgtcaagaacaaggatccccaagactcaatcatattcggtgatgggaaccaaggcaaggtgaaagggttaggaaaaattgctatttcatccgagcactctatttctaatgtgttcttagttgagtcacttggatataacttgttgtctgtgagtcaactttgtaatatgggatataacggtttattcacaaatgtagatgtgtctgtctttagaagaagtgatggttcattagcttttaagggtgtactagacgacaaactttatttagttgattttgcaaaagaggaggccggtctagatgcatgcttaattgctaagactagcatgggctggttgtggcatcgccgtttagcacatgtggggatgaagaaccttcacaagcttctaaagggagaacacgtgataggtctaactaatgtaactttcgaaaaagatagaccttgtgcagcttgtcaagcagataaacaggtgggaagctctcatcatgccaaaaatgtgatgacaacatcaagacccctggagttacttcatatggacctcttcggacccgtcgcctatctgagcataggaggaagtaagtatggtcttgttatagttgatgatttttcccgcttcacttgggtattctttttgcaggataaatctgaaacccaagggaccctcaagcgcttcctaaggagagcccaaaacgagtttgagctcaaagtgaagaagataaggagcgacaatgggtccgagttcaagaaccttcaagtggaggagtatcttgaggaggaaagaatcaagcatgagttctccgctccctacacaccacaacaaaatggtgtggtagagaggaagaacaggacactactagatatggcgaggacgatgcttagtgaattcaagacgcccgaacggttttggacggaagccgtcagcacggcttgccacgccataaaccgggtctaccttcatcgcctcctcaagaagacttcatatgagcttctaaccggtaacaaacccaatgtgtcttactttcgtgtatttgggagcaaatgttacattctagtgaagaaaggtaggaattctaagtttgctcccaaagctgtagaagggtttttgttaggttatgactcaaatacaaaggtgtatagggtcttcaacaaatcatcgggtttggttgaagtctctagcgacgttgtatttgatgagactaatggctctccaagagagcaagttgttgatcttgatgatgtagatgaagaagacgttccaacggccgcaatgcgcaccatggcgattggagatcctttcagggtagaagaggccttgctagatccgaattgggtgttggccatgcaagaggagctcaacaacttcaagagaaatgaagtttggacgctggtgcctcgtcccaagcaaaacgttgtgggaaccaagtgggtgttccgcaacaaacaagacgagacacggggtggtgacaaggaacaaggcacgacttgtggcaaaaggttgttccaaatggatgtgaagagcgctttcctcaacgggccagtcaaggaggaggtgtacgtggagcaaccccctggctttgaggatgaacggtaccccgaccacgtgtgtaagctctctaaggcgctctatggacttaagcaagccccaagagcatggtatgaatgccttagagactttttaattgctaatgctttcaaggttgggaaagccgatccaactatgtttactaagacttgtgatggtgatcttttcgtgtgccaaatttatgtcgatgacataatatttggttctactaaccaaaagtcttgtgaagagtttagcagggtgatgactcaaaagtttgagatgtcgatgatgggcgagttaagctatttccttgggttccaagtgaagcaactcaaggatgggaccttcatctcccaaacgaagtacacgcaagacttgatcaagcggtttgggatgaaggacgccaagcccgcaaagactccaatgggaaccgacggacacaccgacctcaacaaaggaggtaagtccgttgatcaaaaggcataccggtctatgatagggtctttactttatttatgtgctagtagaccggatattatgctcagtgtatgcatgtgtgctagatttcaatccgatccaagggagtgtcacttagtggccgtaaagcgaattcttagatatttagtcgctacgccttgcttcgggatctggtatccaaaggggtctacctttgacttgattggatattcagactccgactatgctggatgtaaggtcgataggaagagtacatcagggacgtgccaattcttaggaaggtccctagtgtcgtggagctctaagaaacaaacttccattgccctatccaccgctgaggccgggtatgttgctgcaggacagtgttgcgcgcaactactttggatgaggcaaaccctccgggactttggctacaatctgagcaaagtcccactcctgtgtgataatgagagtgctatccgcatggcggataatcctgttgaacacagccgcacaaagcacattgacatccggcatcactttttgagagaccaccagcaaaagggagatatcgaagtgtttcatgttagcaccgagaaccagctagccgatatctttaccaagcctctagatgagtcgaccttttgcaagctgcgtagtgagctaaatgtcttagattcgcgaaacctagattga

SEQ ID NO: 4660 - DNA, 4296 bp, Zea mays
  Clone ID: TF_ZM4621.C2.o2.fg
atggatcctaagggcaaggggatggtggtcaatgataaggaggagtccttcgtcaacgatccaaaagatgacaagcctactaactcgggctcgagccacaaaagaaaagacgggacgaagaagaaaacaaggcgcatcaaggagatcgtctactacgacgacagcgacgagtcctcttcttcccaaaaggacaacgacgacaacgactacgagaaaaagaagacagttaactctaatttttctttcgattactctcgtattcctcaaagtaccattgctcatttactctccattccacttgcatcattgtgcagggatgaataccataaggtgagcggcttgggtaacgccaagcagatctgggacaccctcaagatctcgcatgaggggaacgacgtcaccatgctcaccaagatggagttggtggaaggagaactaggaaggtccttcactgtccttgatccacatcttgtaaacaatattcgtgagaatcctaggtacaccaagatgacgcccgaggaaatacttgggaagttcgtaagcggacggatgatgatcaaggaggcaagatacgttgatgatgcgttgaatggcccaatccacgagcctcaaatcgttgctctcaaagcaacgaggggcaaggaagtgctacctagcaaggtggcacaagttgaggcggcggggctcaatgaggaagagatggccctcatcatcaagcgtttcaagacggcgctaaggggtcgcaaggagcatcccaacaaaagcaagacaaagggaaagcgctcctgcttcaagtgtggtaagattggtcattttatcgctaattgtcccgataatgatagtgaccaggaacaagagaagaagagggaaaagaagaagaattacaagaaggctaagggcgaggcacatcttggcaaggagtgggactcggattgctcgtcgtccgactccgacaacgaaggactcaccgcctcggccttcaacaaatcgtccctcttccccaacgagcatcacacatgcctcatggcaaaggagaagaaggtatgtactcgaaacaatactacttatgcttcttcaagtgaagatgaatctagtgatgatgaaatagactatgcatatttgttcaagggcttagatcgaactaagattgataaaatcaatgaattgattgatgccttgaatgataagaatagattgctagaaaagcaagaggatcttttgtatgaagaacatgataaagttgtagaggcacaaaaatctcttgctttagaagtcaaaaggaatgaaattctttcttgtgaactatctacttgccatgagaccatttctagtttaaaaagtattaatgatgacttgaatgctaaactagaaatagctaataaatcaacctcttgtgtagatcatgttgtaatttgcaataggtgtaaagactttaatgttgatgcttgtagtgaacacctagtttgcatttctaaattaagtgatgaagtggctagtcttaatgcccaacttaagactagcaaaagtgaatttgataaactaaaatttgcaagggatgcctacacgattggtagacacccctcaattaaggatgggcttggctttaagagggaagccaagagcttaacaagtcataaggctcccatctccgccaaggagaaagggaaggctcctatgactaatagtagtcaaaagaatcatgctttcatttatggtgataagagatattttagaaatgttcataggagttgtaatgattcaaatgctatgtttgcttcaagttcttcctatatgcatggtagagatatgcctaggagaaatgttcatgttcctaggaaaattaatgaaccttctacaatttatcatgcttgcaatgcttcctttgcaatttgtagaaaggataagaaggtttatgcatccgggggatcaagctggattatcgacagcggatgcacaaaccacatgacgggggagaagaagatgttcacctcctacgtcaagaacaaggattcccaagagtcaatcatattcggtgatgggaatcaaggcaaggtcaaaggactagggaagattgccatttcatccgagcactctatttctaatgtgtttttagttgagtcacttggatataacttattgtctgtaagtcagctttgtaatatgggatataattgcttattcacaaatgtagatgtgtctgtctttagaaggagtgatggttcattagcttttaagggtgtattagacggtaaactctacttagttgattttgcaaaagaggaggccggtctagatgcatgcttaattgctaagactagcatgggctggctgtggcatcgccgcttagcacatgtggggatgaagaaccttcacaaacttctaaagggagaacatgtaataggtctaacaaatgtaaccttcgaaaaagacagaccttgtgcagcttgtcaagcaggcaaacaggtgggaagctctcatcataccaaaaatgtgatgaccacatcaagaactttggagttgcttcatatggacctcttcggacccgtcgcctatctaagcataggaggaagtaagtatggtcttgttatagttgatgatttttcccgcttcacttgggtattctttttgcaggataaatctaaaacccaagggaccctcaagcgctttctaaagagagctcaaaatgagtttaagctcaagaaaaacggtgtggtagagaggaagaacaggacgctcatagacatggcgaggacaatgcttggagaattcaagacacccgagcggttttggtcggaagccatgaacacggcttgccacgccataaaccgggtgtaccttcatcgcctcctcaagaagacttcgtatgagcttctaaccggtaacaaacccaatgtttcgtactttcgtgtatttgggagcaaatgttacattctagtaaagaaaggtagaaattctaagtttgctcccaaagctgtagaagggtttttgttaggttatgactcaaatacaaaggcgtatagggtcttcaacaaatcatcgggtttggttgaagtctctagcgacgttgtatttgatgagactaatggctctccaagggagcaagttgttgatcttgatgatgtagatgaagaagaagttccaacggccactatacacaccatggcgattgtagaagtgaggccacaggaacaaaaggagcaagatcaaccttcttcctcaacaatggtgcatcccccaactcaagacgatgaacaggaagagctcaataacttcaagagaaatgaagtttggacaatggtgcctcgtcctaagcaaaacgttgtgggaaccaagtgggtgttccacaacaaacaggacgagcacggagtggtgacaaggaacaaggctcgacttgtggcaaaaggttatgcccaagtcacaggtttggactttgaggagacttttgctcctgtagctatgctagagtcaattcgcatgttgttagcctatgctactcaccattctttcagattgttccaaatggatgtgaagagcgctttcctaaacgggccaatcaaggaggaggtgtacgtggagcaaccccctggcttggaggatgaacggtaccccgaccacgtgtgtaagctctctaaggcactctatggacttaagcaagccccaagagcatggtatgaatgccttagagactttttaattgctaatgctttcaaggttggaaaagccgatccaactttattcactaagacttgtgatggtgatctttttgtgtgccaaatttatgtcgatgacataatatttggttctactaaccaaaagtcttgtgaagagtttagcagggtaatgactcagaaattcgagatgtcgatgatgggcgagttgaactacttccttaggttccaagtgaagcaactcaaggacgccaccttcatctcccaaacgaagtacacacaagacttgctaaagcggtttggaatgaaggacgccaagcccgcaaagacaccaatgggaaccgacggacatgtcgacctcaacaaaggaggtaagtccgttgatcaaaaggcatatcggtctatgatagggtctttactttatttatgtgctagtagaccggatattatgcttagcgtatgcatgtgtgctagatttcaatctgatccaaaggaatgtcacttagtggctgtgaagcgaattcttagatatttagtcgctacgccttgcttcgggatctggtatccaaaggggtctacctttgacttgattggatattcagactccgactatgctggatgtaagtga

SEQ ID NO: 4661 - DNA, 2032 bp, Zea mays
  Clone ID: TF_ZM4621.C6.o3.fg
atggatcctaagggcaaggggatggtggtcaatgataaggaaaaggagtccttcgtcaacgatccaaaagatgacaagcctactgactcgggctcgagccacaaaagaaaagacgggaagaagaagaaaacaaggcgcatcaaggagatcgtctactacgacgacagcgacgagtcctcttcttcccaaaaggacaacgacgacaacgactatgagaaaaagaagacggttaactctaatttttctttcgattactctcgtattcctcaaagtaccaatgctcatttactctccattccacttggtaaacctcctcactttgatggagagggctacggattttggagtcacaaaatgcatagtcacttgttctctctccatccaagcatatgggagatagtagaaagtggaatgaaatttgatagtactgatagtcccatatttatcaatgagcaaattcacaaaaatgcacaagcttctactgttcttctagcatcattgtgcagggatgaataccataaggtgagcggcttggataacgccaagcagatctgggacaccctcaagatctcgcatgaggggaacgacgtcaccatgcacaccaagatggagttggtggaaggcgaactaggaaggttcgcaatgatcagaggagaggagccaacccaaacgtacaatcggctcaagaccctcgtcaaccaaataaggagctatggaagcacgcgatggacggaccacgatgtcgtccgcctaatgctaaggtccttcactgtccttgatccacatcttgtaaacaatattcgtgagaatcctaggtacaccaagatgacgcccgaggaaatacttgggaagttcgtaagcggacggatgatgatcaaggaggcaagatacgttgatgatgcgttgaatggcccaatccacgagcctcaaaccgttgctctcaaagcaacgaggggcaaggaagtgctacctagcaaggtggcacaagttgaggcgatggggctcaatgaggaagagatggccctcatcatcaagtgtttcaagacggcgctaaggggtcgcaaggagcatcccaacaaaagcaagacaaagggaaagcgctcctgcttcaagtgtggtaagattggtcattttatcgctaattgtcccgataatgataatgaccaggaacaagagaagaagagggaaaagaagaataattacaagaaggctaagggcgaggcacatcttggcaaggagtgggactcggattgctcgtcgtccgactccgacaacgaaggactcaccgcctcggccttcaacaaatcgtccctcttccccaacgagcatcacacatgcctcatggcaaaggagaagaaggtatgtactcgaaacaatactacttatgcttcttcaagtgaagatgaatctagtgatgatgaaatagactatgcatatttgttcaagggcttagatcgaactaagattgataaaatcaatgaattgattgatgccttgaatgataagaatagattgctagaaaagcaagaggatcttttgtatgaagaacatgataaagttgtagaggcacaaaaatctcttgctttagaagtcaaaaggaatgaaatgctttcttgtgaactatctacttgccatgagaccatttctagtttaaaaagtattaatgatgacttgaatgctaaactagaaatagctaataaatcaacctcttgtgtaaatcatgttgtaatttgcaataggtgtaaagactttaatgttgatgcttgtagtgaacacctagtttgcatttctaaattaagtgatgaagtggctagtcttaatgcccaacttaagactagcaaaagtgaatttgataaactaaaatttgcaagggatgcctacacgattggtagacacccctcaattaaggatgggcttggctttaagagggaagccaagagcttaacaagtcataaggctcccatctcctccaaggagaaagggaaggctcctatgactaatagtagtcaaaagaatcatgctttcatttatg

SEQ ID NO: 4662 - DNA, 927 bp, Zea mays
  Clone ID: TF_ZM4638.C8.o1.fg
atgatgatcaaggaggcaagatacgtcgatgatgcattgaatgacccaatccacgagcctcaaaccgtggctctcaaagcaacgaggagcaaggaggcgctacctagcaaggtggcgcaagttgaggcggccgggcttaacgaagaagaaatggccctcatcatcaagcggttcaagacaacactaaaaggtcgcaaggagcatcccaacaagaacaagacgaaggggaagcgctcatgtttcaaatgtggtaagattggtcattttatcgctaattgtcccgataatgatagtgaccaggaacaagagaagaagagggaaaagaagaagtcttacaagaaggctaagggcgaggcacaccttggcaaggagtgggactcggattgttcgtcgtctgactccgacaatgaaggactcgccgcctcagccttcaacaagacgtccctcttccccaacgagcatcacacatgcctaatggcaaaggagaagaaggatagattgttagaaaagcaagaggatcttttgtatgaagaacatgataaatttgtagaggcacaaaactctcttgctttagaagttaaaaggaatgaaatgctttcatgtgaattgtctacatgccatgaatctatctctagcctaaaaggtgttaatgatgatttgaatgctaagttagaaatagctagtaaatcaacctctcgtgaagaacatgttatgatttgcaataggtgcaaagattttaatgttgatgcttgtagtgaacacctagtttgcatttctaaactaaatgatgaagtggctagtcttaatgctcaacttaagactagcaaaaatgattttgataaactaaaatttgcaagggatgcctacacggttggtacccctcaattaaggatgggcttggtttcaagagggaagccaagaacttaa

SEQ ID NO: 4663 - DNA, 5034 bp, Zea mays
  Clone ID: TF_ZM4679.C2.o9.fg
atggatcctaagggaaaggggatgatgatcaacgacaaggagaaggagtccttcctcaatgagccaaaagacgacaagcccactgactcgagctcaagtcacaagaagaaggatgggaagaagaagaggcgcatcaagaagatagtctactacgacagtgacgagtcctcttcttcccaaaaagacgacgacgacgagaaaaagaaaacggtcaactcaaacttttcttttggttattctcgtattccgcaaaattccaatgctcatttgctttccattcctcttggtaaacctccacactttgatggagaggactacggattttggagtcacaaaatgcgtagccatttgttctctcttcatccaagtatatgggagatagtagaaaatggaatgcaatttgatagtatggataatcccatgtttatcaatgaacaaattcataaaaatgcacaagctaccactattcttttagcatccttgtgcagggaagagtatcataaggttggcggcttggataatgccaagcaaatttgggacatcctcaagatctcacatgaggggaacgacgccaccatgatcaccaagatggagttggtggaaggcgaactaagaaggttcacaatgatcaggggggaggagccaactcaaacgcacaacaggctcaagaccctggtcaacaaaatcaggagctatggaagcacgagatggcggaccacgacgtcgtacaccaagatgacgcccgaggaaatactcggagagtttgtaagcgggcgaatgatgatcaaggaggcaagatatgttgatgaggcattgaatggcccaatgccgatccacgagcctcaaactgttgctctcaaagcaacaagcagcagggaggggctacctagcaaggtggcgcaagttgaggcggccgagctaaataaggatgaaatggccctcatcatcaagcgcttcaagacggcgctcaaaggtcgcaaagagcatcccaacaagagcaagacgaagggaaagcgctcctgcttcaagtgtggtaagattggtcactttattgctaactgtcccgataatgatagtgaccaggaacaaggaaagaatgggaagagagagaaaaagaaggtctcaagaaggctaagggcaaggcacaccttggaaaagaatgggactcggattgttcttcgtccgactccgacgacgaaggactcgccgccacggccttcatcaaatcgtctctcttccccaacgagcatcacacttgcctcatggcaaaggagaagaagatgtaaggattttaatgttgatgcatgtgttgagcaccttacttctattacaaaattaaatggtgaagtggctagtcttaatgcccaacttaagactagcaaaaatgactttgataaattaaatattgctacggatgcctacactgttggtagacacccctcaattaaggatgaacttggctttaagagcggatgcacaaaccacatgacgggggagaacaagatgttcacctcctacgtcaagaacaaagattcccaagattcaatcatatttggtgacgggagtcaaggcaaggttaaaggactaggaaagatagctatttcatccgagcattccatatctaatgtgtttttggttgaatcgctcagaaggagtgatggttcattagcttttaagggtgtactagacggcaaactctatttagttgacttttcgaaggaggaggccaatctagatgcatgcttaatcgctaagactagcatgggctggctgtggcatcgccgtctagcacatgtgcggatgaagaaccttcacaaacttctaaagggagaacatgtgttaggtctaacaaatgtaactttcgaaaaagatagaccttgtgcagcttgtcaagcaggtaaacaggtgggaagctctcatcatagcaaaaacgtgatgaccacatcaagacctttggagctacttcacatggacctcttcggacccgtcgcctacctcagcatcgagggaagtaagtatggtcttgttattgttgatgatttttcccgcttcacttgggtattctttttgcaggataaaacagaaacccatgggacactaaagcgcttcctaaggagagctcaaaacgaatttgagctcaaggtgaaaaagataaggagcgacaacgggtccgaattcaagaatcttcaagtggaggagtaccttgaggaggaaggagttaagcacgagttctccgctccctacacaccacaacaaaacggtgtggtagagaggaagaacaggacgcttttagacatggcaaggacgatgctcagtgaattcaagacgcccgaacggttttggacggaagctgtgaacactgcttgtcatgccataaaccgggtttatcttcatcgcctcctcaagaagacgtcgtacgaactcctaactgtgaagaaaggtaggaattccaaatttgctcccaaagctgtagaagggtttttgttaggttatgactcaaatacaaaggcgtatagagtcttcaacaaatcatcgggtttggttgaagtctctagcaacgttgtatttgatgagactaatggctctccaagagagcaaattgatcttgatgatgtagatgaagaagatgttccaacggccgcaatacgcaccatggcgattggagatgtgcgaccacaggaacaaaaggagcaagatcaaccttcttcctcaacaatggtgcaccctccaactcaagatgatgaacaggttcatcaagaagaggcgtgtgatcaagggggagcacaagatgatcatgttatggaggaagaagcaccacaggctcctccaactcaagtccgagcgacgattcaaaggaatcatcccgtcgaccagatattgggtgatataagcaagggagtaactactcgctctagattagctaatttttatgagcattactcgtttgtctcttctattgaacctttcagggtagaagaggccttgctagatccggactgggtgttggccatgcaggaagagctcaacaacttcaagcgaaatgaagtttggacccttgtgccacgtccaaagcaaaacattgtgggaaccaagtgggtgttccgcaacaaacaggacgagcacggggtggagacaaggaacaaagctagacttgtggcaaaaggttatgcccaagtcgcaggtttggactttgaggagacttttgctcctgtggctagggtagaatctattcgtattttgttagcctatgccgctcaccattctttcaagttgttccaaatggatgtgaagagcgctttcctcaacgggccaatcaaggaggacgtgtatgtagagcaaccccctggctttgaggatgaacggtaccccgaccacgtgtgtaagctctctaaggcgctctatggacttaagcaagccccaagagcatggtatgaatgccttagagactttctaattgctaatgctttcaaggttgggaaagccgatccaactttattcactaagacttgtgatggtgacttatttgtatgccaaatttatgtcgatgacataatatttggttctactaaccaaaagtcttgtgaagagtttagcagggtgatgactcaaaaatttgagatgtcgatgacgggcgagttgaactacttccttgggttccaagtgaagcaactcaaggatggcaccttcatctcccaaacgaagtacacacatgatttgatcaagcggtttgggatgaaggacgccaagctcgcaaagactccaatgggaaccgacagacatgtcgacctcaacaaaggaggtaagtccgttgatcaaaaggcataccggtctattataggttctttgctttatttatgtgctagtagaccggatattatgctaagcgtatgcatgtgtgctagatttcaatccgacccaagggagtgtcaccttgtggccgttaagcgaattcttagatatttagttgctacgccttgcttcgggatctggtatccaaaggggtcaacctttgaattaattggatattcggactctgattatgctggatgcaaggttgataggaagagtacatcagggaagtgccaattcttaggaaggtccctggtgtcttggagttataagaaacaaacttctgttgccctatccaccgctgaggccgagtatgttgccgcaggacagtgttgcgtgcaactactttgcatgaggcaaaccctccgggactttggctacaatctgagcaaagtcccacttctatgttataatgagagtgcaatccgcatggcggacaatcctgttgaacacagccgcactaagcacatagacattcggcatcactttttgagagaccaccagcaaaagggagatatcaaagtgttttatgttagcaccgagaaccagctagccgatatctttaccaagcctttagatgagaagaccttttgtaggctgcgtattaggttgggacaagaggctaccgtatgcaaaattctcctacaacaacagctatcaagccagtctgaagatgtcaccattcgaaacgctctatgggaggcattgcagaactccattgcattgggaccaacccgaagaagggaactcagtttcgaagtgggagactatgtctacttgaaagtgtcacccatcagaggaaccaaaaggtttggagtcaaaggcaagctagcccctcgctatattggcccgtaccagattcaggcaagacgtggagaagtggcttatcaactcagcttaccagagaacctgtctgcagtgcatgatgtgtttcatgtgtctcagttgaagaaatgcttgagagtgccagaagagaagttgccaacggaagaccttgaagttcaagaagatctgacttatattgagaagccaacgcagattctggagacagcaaatcgggtcactaggaggaacaccatcaggatgtgcaaagtcaaatggggccatcactcagaagaagcaacctgggaaagagaagatgatctgagagcccagtaccctgaactctttgctagccagccctga

SEQ ID NO: 4664 - DNA, 2976 bp, Zea mays
  Clone ID: TF_ZM4679.C4.o4.fg
atgcatcctaagggaaaggggatggtgatcaacgacaaggagaaggagtccttcatcaatgaaccaaaagacgacaagcccactgactcgggctcaagtcataagaagaaggatgggaagaagaagaggcgcatcatgaagatagtctactacaatagcgacgagtcctcttcttcccaaagagacgacgacgacgagaaaaagaaaatggtcaactcaaacttttctttttattattctcgcattccgcaaaattcgaatgctcatttgctttccattcctcttggtaaacccccacactttgatggagaggactacggattttggagtcacaaaatgtgtagccacttgttctctcttcatccaagtatatgggagatagtagagaatggaatgcaatttgatagtacggataatcccatgtttatcaatgaacacaaaaatgcacaagctaccactgttctattagcatccttgtgcagggaagagtaccataaggtgagcggcttggataacgccaagaaaatttgggacaccctcaagagctcacatgaggggaatgacgtcaccatgatcaccaagatggagtttgtggaaggcgaactaggaaggttcgcaatgatcaggggggaggagccaactcaaacgtacaataggctcaagaccctggtcaacaaaatcaggagctatggaagcacgagatggacggaccacgatgtcgtccggcttatgctaaggtccttcactgtccttgatcctcatcttgttaactctatccatgaaaatcctaggtacaccaagatgacgcccaaggaaatactcagaaagtttgtaagcgggcgaatgatgatcaaggaggcaagatatgttgatgaggcgtttaatggcccaatgccgatccacgagcctcaaaccattgctctcaaagcaacaagtagcagggaggcgctacctagcaaggtggcgcaagttgaggcggtcaggctaaatgaggaagaaatggccctcatcatcaagcgcttcaagacagcgctcaaaggtcgcaaggagcatcccaacaagagcaagacgaagggaaagcgctcctgcttcaagtgtggtaagattggtcactttattgctaactgtcctgataatgatagtgaccaggaacaaggaaagactggaaagagagagaacaagaaggtttacaagaaggctaagggcgaggcacaccttggaaaagaatgggactcggattgttcttcgtccgactccgacgacgaaggactcgccgccacggcctttaacaaatcgtctctcttccccaacgagcatcacacttgcctcatggcaaaggagaagaaggtaagcactcgaaatactattgcatatgcttcttcaagtgatggtgaatctagtgatgatgaagtagactacgcaagtttattcaaaggcttagatagaactaaaattgataagatcaatgaattaattgatgcgttgaatgagaagaatagattgctagaaaaacaagaggatcttttatatgaagagcatgataaatttgtaaatgtgcaaaagtctcttgctttagaagtcaaaagaaatgaaatgctttcaagtgaattatctacttgtcatgagtcaatttctagtctaaagagtgtcaatgatgacttaaatgctaagctagaagtagcaaataaatctagctcatgtattgaacatgtagtaatttgtaacaggtgtaaggattttaatgttgatgcatgtgttgagcaccttacttctattgcaaaattaaatggtgaagtggctagtcttaatgcccaacttaagactagcaaaaatgactttgataaactaaaatttgcaagggatgcctacactattggtagacacccctcaattaaggatgggcttggctttaaaagggaagccaagaacttaacaagccaaagagctcccattttcaacaaggaaaagggaaaggctcctatggctaatagtagtcaaaagaatcatgcatttatttatgatagaaaattttctagaaatgcttatcataataggagttgtaatgcttatgattcacatgccatgattgcttcaagttcttcctttgtgcatggtagagatatgcctaggagaaatgttgttaatgtgcctaggaaaatgcataatgaaaatgctactgatattcatgcctacaactctgattttgtactcacatgtaaaaatgagaaagtggttgctaggaaattaggggccaaatgtaagggagacaaggcatgcatttgggtccctaaggctattgttactaaccttgtttatgcatccgggggctcaagctggattatcgacatcggatgcacaaaccacatgacgggggagaagaagatgttcacctcctacgtcaagaacaaagattcccaagattcaatcatattcggtgacgggaatcaaggcaaggttaaaggactaggaaaaattgctatttcatccgagcattccatctctaatgtgtttttagttgaatcggtcgggtataacttgttgtccgttagtcaactctgtagtatgggttacatttgtttatttaacaatgtagatgtgtccgtctttagaaggtgtgatggttcattagcttttaagggtgtactagacggcaaactttatttagttgatttttcgaaagaagaggccggtctagatgcatgcttaattgctaagactagcatgggctggctgtggcatcgtcgtctagcacatgttgggatgaagaaccttcataagcttctaaagggggagcatgtgttaggtctaaaaaatgtatctttcgaaaaagatagaccttgtgcagcttgtcaagcaggtaaacaggtggggagtactcatcatagcaaaaatgtgatgaccacatcaagacccctggagatgctgcatatggacctcttcggacctgtcgcctacctcagcatcgggggaagataa

SEQ ID NO: 4665 - DNA, 1660 bp, Zea mays
  Clone ID: TF_ZM4681.C2.o6.fg
atggatcctaagggcaaggggattgtgatcaatgacaaggagaaggagtcattcatcaatgagcccaaggatgacaagcctaccgactcgggctcgggccacaaacgcaaagatgggaagaagaagaagacaagacgcatcaaggagattgtctactacgacgacaacgatgagtccacttcctcccaaaaggacaacgacgacaacgactacgagagaaggaaaccgattcatagaaatgcacaagctactactgtgttgctagcctccttgtgcagggacgagtaccataaggtgagcggcttggacaatgccaagcagatctgggacaccctcaagatctctcatgaggggaacgacgtcaccttactcaccaaaatggagttggtggagggcgagcttggaagatttgcaatgataaggggcgaggagccaacccaaacatacaaccggctcaagacccttatcaacaaaataaggagctacggaagcacgcgatggacggatcacgacatcgtccgcctaatgctaaggtcttttactgtacttgatccacatttggtgaacaatattcgtgaaaatcctaggtacaccaagatgtcacccgaagaagtccttggaaagttcgtaagcgggagaatgatgatcaaggaggcaaggtacgtggacgacgcgttgaacggtccaacccatgagcctcaacccattgctctcaaggcaacgaggagcaaggagacgctacctagcaaggtggcacaagttgaggcggccgggctcaatgatgaagagatggccctcatcatcaagcgcttcaagacggcgctaaagggtcgcaagggacagccaagcaagaccaagacaaagaggaagcgttcatgcttcaaatgcggtaagattggtcattttattgctaactgtcccgataatgaaagtgaccaggaacaagggagcaagagggagaagaagaaggcatacaagaaagctaagggcgaggcacatcttggaaaggagtgggactcggactgttcgtcatccgactccgaaaatgaaggactcgccgccaccgccttcaacaagtcatccctcttccccaacgagcgtcacacatgcctcatggcaaaggagaagaaggtatgtactcgagacagtactacttatgattcttctagtgatgatgaatctagtgatgaagaaatagattactctagtttgttcaaaggattggatagaactaaagtagataagattaatgaattgattgatgccttgaatgaaaaggatagactcttagaaaaacaagaggaccttttatatgaagagcatgacaaatttgtagaggcacaaaaatcttatgctttagaagttaaaagaaatgaaatgctttcttatgaactatcttcttaccatgagacaatttctagcttaaggagcatgaatgatgatttgaatgctaagttagagatagctagtaaatctaactcttgtgtagaacatgttatgatttgcaagaggtgtaaagattttgacattgatgcttgtagtgaacacctagtgtcaatttctaaattgaatgatgaagtggctagtcttagtgcccaacttaagactagcaaaaacgaatttgataagttaaaatttgcaagggatgcctacacgattg

SEQ ID NO: 4666 - DNA, 4953 bp, Zea mays
  Clone ID: TF_ZM4685.C2.o11.fg
atggatcctaagggcaaggggatggtggtcaatgataaggagaaggagtccttcgtcaatgatccaaaggatgacaagcctactgactcaggctcgggccacaaaagaaaagacgggaggaagaagaagacaaggcgcatcaaggagatagtctactacgacagcaacgaatcttcctcttcccaaaaggacgacgacaatgactacaagaaaaagaagacggttaattcaaacttttcctttgattattctcgtattccgcaaagttccaatgctcacttgctttccattccccttggtaaacctccccactttgatggagaggactacagattttggagtcacaaaatgcgtagccacttgttctctctccatccaagtatatgggagatagtagaaaatggaatgcactttgatagtacagatagtcccatgttcattaatgagcaaattcacaaaaatgcacaagctactactgttcttctagcttcattgtgcagggatgaataccataaagtgagcggcttggacaacgccaagcagatttgggacaccctcaaaatctcacatgaggggaacgacgtcaccatgctcaccaagatggagttggtggagggcaaacttgggagattcgcaatgatcaggggcgaggagccaacccaaatgtacaaccggctcaagaccctcgtcaacaaaataaggagctatggaagcacgcgatggacggaccacgacgtcgtccgcctaatgctaaggtcttttactgtccttgatccacatcttgtgaacaatattcgtgagaatcctaggtacaccaagatgacgcccgaagagatacttggaaagtttgtaagcgggcggatgatgatcaaggaggcaagatacgttgacgatgcgttgaacggtccaattcacgagcctcaaaccgttgctctcaaagcaacaaggagcaaggaggcgctacctagcaaggtggcacaagttgaggcagctggacttaatgatgaagaaatgaccctcatcatcaagcgctttaagacgatgctaaggggtcgcaaggagcatcccaacaagaccaagacaaaggcgaagcgctcatgcttcaaatgtggtaagattggtcattttatcgctaattgtcccgataatgatagtgaccaggaacaagggaacaagagggaaaagaagaaggcttacaagaaagctaatggcgaggcacaccttggaaaggagtgggactcggattgttcgtcgtccgactccgacaacgaaggactcgccgccaccgccttacaacaagtcggccctcttccccaacgagcatcacacctgcctcatggcaagggaaaagaagaacatgttgtagtttgcaataggtgtaaagattttaatgttgacgcttgtagtaaacacctagtttcaatttctaaattgaatgatgaagtggctagtcttaatgcccaacttaagactagcaagagtgaatttgacaaactaaagtttgcaagggatgcctacacaattggtagacacccctcaattaaggatggtcttggcttcaagagggaagtcaagaacttaacaagccataaggcttccatctccgccaaggagaaagggaaggcccctatggctagtagtactcaaaagaaccatgctttcatgtatcatgataggagacattctaggaatgcttttagaagttatgatgcttttgattctcatgccacgattgcttctagctcttctattatgcatgatagaaatttggctaggaaaaatgttgtttatcatatgcctagaagaaatattgttcatgttcctaggaaagtaatgaatgaaccttctacaatttattatgcttgcaatgcttcctttgctatttgtagaaaggataagaagattatcgacagcggatgcacaaaccacatgacgggggaaaagaggatgttctcctcctacgtcaagaacaaggatcctcaagattcgatcatattcggtgatgggaaccaaggcaaggtgaaagggttaggaaaaattgctatttcatccgagcactctatttctaatgtgttcttagttgagtcgcttggatataacttgttgtctgtgagtcaactttgtaatatgggatataactatttattcacaaatgtagatgtgtctgtctttagaagaagtgatggttcattagcttttaagggtgtactagacgacaaactttatttagttgattttgcaaaagaggaggtcggtctagatgcatgcttaattgctaagactagcatggactggctgtggcatcgccgtttagcacatgtggggatgaagaaccttcacaagcttctaaagggagaacacgtgataggtctaactaatgtaactttcgaaaaagttagaccttgtgcagcctgtcaagcaggtaaacaggtgggaagctctcatcatgccaaaaatgtgatgacaacatcaagacccctggagttacttcatatggacctcttcggacccgtcgcctatctaagcataggaggaaggaccctcaagcgcttcctaagtagagcccaaaacgagtttgagctcaaagtgaagaagataaggagcgacaatgggtccgaattcaagaaccttcaagtggaggagtatcttgaggaggaaggaatcaagcacgagttctccgctccctacacaccacagcaaaatggtgtggtagagaggaagaacaggacactactagacatggcaaggacgatgcttggtgaattcaagacgcccgaacggttttggacggaagccgtaagcacggcttgccacgctataaaccgggtctaccttcatcgcctcctcaagaagacttcatatgagcttaactgcaaatgttacattctagtgaagaagggtaggaattctaagtttgctcccaaagctgtagaagggtttttgttaggttatgactcaaatacaaaggcgtatagggtcttcaacaaatcatcgggtttggttgaagtctctagagacattgtatttgatgagactaatggctctccaagagagcaagttgttgatcttgatgatgtagatgaagaagatgttccgatggccgcaatacgtaccatggcgattggtgatgtacgaccacaggaacaaaatgagcaagatcaaccttcttcctcaacaatggtgcatcccccaactcaagacgatgaacaggttcatcaagaagaggcgtgtgatcaagggggagcacaagatgttcatgtgatagaggaagaagcacaaccaacacctccaactcaagttcgagcgacgattcaaaggaatcatcccatcgaccagattttgggtgacattagcaagggagtaactactcgctctagattagttaatttttgtgagcattactcttttgtctcttctattgagcctttcagggtagaagaggccttgctagatccggactgggtgttggccatgcaggaagagctctataacttcaaaagaaatgaagtttggacgctggtgcctcgtcccaagcaaaatgttgtgggaaccaagtgggtgttccgcaacaaacaggacgagcacgggatggtgacgaggaacaaggctcgacttgtggcaaaaggttatgcccaagttgcaggtttggactttgaggagacatttgctcctgtggctaggctagagtccattcgtattttgctagcatatgccgctcaccattctttcaggttgttccaaatggatgtgaagagcgctttcctcaacgggccaatcaaggaggaggtatacgtggagcaaccccctggcttcaaggatgaacggtaccccgaccacgtgtgtaagctctctaaggcgctctatggacttaagcaagccccaagagcatggtatgaatgccttagagactttttaattgctaatgatttcaaggttgggaaagccgatccaactctttttactaagacttgtaatggtgatctttttgtgtgccaaatttatgtcgacgtcataatatttggttctactaaccaaaagtcttgtgaagagtttagcagggtgatgactcaaaagtttgagatgtcgatgatgggcgagttaagctatttccttgggttccaagtgaagcaactcaaggatgggaccttcatatcccaaacgaagtacacgcaagacttgatcaagcggtttgggatgaaggacgccaagcccgcaaaaactccaatgggaaccgacggacacaccaacctcaacaaaggaggtaagtccgttgatcaaaaggcataccagtctatgatagggtctttactttatttatgtgctagtagactggatattatgcttagtgtatgcatgcgtgctagatttcaatccgatccaagggagtgtcacttagtggccgtgaagcgaattcttagatatttagtcgctacgccttgcttcgggatctggtatccaaaggggtctacctttaacttgattggatattcagactccgactatgctggatgtaaggtcgataggaagagtacatcggggacgtgccaattcttaggaaggtccctggtgtcgtggagttctaagaaacaaacctccgttgccctatccaccgctgaggccgagtatgttgccgcaggacagtgttgcgcgcaactactttggataaggcaaaccctcagggactttggctacaatctgagcaaagtcccactcctatgtgataatgagagtgttatccacatggcggataatcctgttgaacacagccgcacaaagcacatagacatccggcatcactttttgagagaccaccagcaaaagggagatatcgaagtgttttatgttagcaccgagaaccagctagccgatatctttaccaagcctctagatgagtcgaccttttgtaggttgcgtagtgagctaaatgtcttagattcgcggaacctggattga

SEQ ID NO: 4667 - DNA, 2946 bp, Zea mays
  Clone ID: TF_ZM4687.C1.o5.fg
atggatcctaagggcatggggatggtggtcaatgataaggaggagtccttcgtcaatgatccaaaggatgacaagcctactgactcaggctcgggccacaaaagaaaagacgggaggaagaagaatataaggcgcatcaaggagatagtctactacgacagcgacgaatcttcttcttcccaaaaggacgacgacaacgactatgagaaaaagaagacggttaactcaaacttttcctttgattattctcgtattccgcaaagttccaatgctcatttgctttccattcccctcgctactactgttcttctagcttcattgtgcagggatgaataccataaggtgagcggcttggataacgccaaggagatttgggacaccctcaaaatctcacatgaggggaacgacgtcaccatgctcaccaagatggagttggtggagggcgaacttgggagattcgcaatgattaggggcgaggagccaacccaaacgtacaaccggctcaagaccctcgtcaacaaaataaggagctatggaagcacgcgatggacggaccacgacgtcgtccgcctaatgctaaggtattttactatccttgatccacatcttgtgaacaatattcgtgagaatcctaggtacaccaagatgacgcccgaggagatacttggaaagtttgtaagcgagcggatgatgatcaaggaggcaagatacgttgacgatgcgttgaacggcccaatccacgagcctcaaaccgttgctctcaaagcaatgaggagcaaggaagtgctacctagcaaggtggcacaagttgaggcggcgggactcaatgaggaagagaaggccctcatcattaagcgtttcaagacggcgctaaggggtcgcaaggagcatcccaacaagaccaagacaaaggggaagcgctcatgctttaaatgtggtaagattggtcattttatcgctaattgtcccgataatgatagtgaccaggaacaagggaacaagagggaaaagaagaaggcttacaagaaggctaagggcgaggcacaccttggaaaggagtgggactcggattgttcgtcgtccgactccgacaaacgaaggactcgccgccaccgccttcaacaagtcggccctcttccccaacgagcatcacacctgcctcatggcaagggaaaagaagaatctagagatgacgaaatagactattcatgtttattcaagggcctagatagaactaaggttgataagattaatgaattaattgatgcattgaatgataagaataggttattagaaaagcaagaggatctcttgtatgaagaacatgataagtttgtagaggcacaaaaatctcttgctttagaaattaaaaggaatgaaatgctttcttatgaattgtctacatgccatgactctatttctagcttaaagagcataaatgatgatttgaatgctaagttagaaatagctaataaatcaacatcttgtgtagaacatgttgcaatttgcaataggtgtaaagattttaatattgatgcttgtagtgaacatctagtttcaatttctaatttgaatgatgaagtggctagtcttaatgcccaacttaagactagcaaaagtgaatttgacaaactaaaatttgcaagggatgcctacacgattggtagacacccctcaattaaggatggtcttggcttcaagagggaagtcaagaacttaacaagccataaggcttccatctccatcaaggagaaagggaaggcccctatggctagtagtgctcaaaagaaccatgctttcatgtatcatgataagagacattctaggaatgtttatagaagttatgttgcttttgattctcatgccatgattgcttctagttcttctattatgcatgatagaaatttggctaggaaaaatgctatgcctagaagaaatgttgttcatgttcctaggaaagtaaactatgaatcttctacaaattttcatacttgcaatgcttccttcactatttgtagaaaggataagaaggtgattgctaggaagttatgggaaagatgcaagggagataaaacttgcatttgggtccctaagacaattgtcactaaccttgtaggacccaacaagagttggctttgtaacatgggatataactgcttattcacaaatgtagatgtgtctgtctttagaaggagtgatggttcattagcttttaagggtgtattagacggcaaactctatttagttgattttgcaaaagaggaggccggtctagatgcatgcttaatcgctaagactagcatgggctggctgtggcatcgccgcttagcacatgtggggatgaagaaccttcacaaacttctaaagggagaacatgtgataggtctaacaaatgttactttcgaaaaagatagaccttgtgcagcttgtcaagcagggaaacaggtgggaagctctcatcataccaaaaatgtgatgacaacatcaagacctttggagttacttcatatggacctcttcggacccgtcacctacctaagcttaggaggaagtaagtatggtcttgttatagttgatgatttttcccacttcacttgggtattctttttgcaggataaatctgaaactcaagggaccctcaagcgcttcctaaggagagctcaaaatgagtttgagctcaaggtgaagaagataaggagcgacaacgggtccgagttcaagaaccttcaagtagaggagtaccttgaggaggaagggatcaagcatgagttctccgctccctacacaccacagcaaaacggtgtggtagagaggaagaataggacgctcatagacatggcgaggacaatgcttggagctgtaacacctcaagtgttaccatggctagagcacaccttggtactgaggactgtgatcacatgtggtagaaacttaaggagaacataa

SEQ ID NO: 4668 - DNA, 4986 bp, Zea mays
  Clone ID: TF_ZM4707.C2.o4.fg
atggatcctaagggaaaggggatggtggtcgacaacaacgagaaggagtctatcttcaacgagccgaagaatgacaagtctaccgacttgggttcaagccacaagcgtaaagatgggaagaagaagaagacaaggcgcatcaaggagatcgtctactacgacagcgacgaatcctcttcttcccaaaaggacgacgaccacaacgactacgagaaaaggaaaccggttaattcgaacttttcttttgactactctcgtattccgcaaagttcaaattcgcatttgcttcccattccacttggcaagccccctcactttgatggagaggactacggattttggagccacaaaatgcgtactcacttgttctctctccatcctagcatatgggagattgtagagagtggaatgcaatttgatagctcggatagccctatgtttataaatgaacagattcataaaaatgcacaagctactactgtgttgctagcctctttgtgcagggacgagtacaataaagtgagcggcttggacaatgccaagcagatatgggacaccctaaagatttctcacgaagggaacgacatcaccatgctcactaaaatggagttggtggagggcgagcttggaaggtttgcgatgataaggggcgaggagccaactcaaacatacaaccggctcaagacccttatcaacaaaataaggagctatggaagcacgagatggacggaccatgacgtcgtccgactattactaaggtcctttaccattcttgatcctcatttggtgaataatattcgtgagaatcccaggtacaccaaaatgtcgcccgaagaagtcctaggaaaattcgtcagcgggcgaatgatgatcaaggaagcaaggtacgtggacgacgccttgaatggaccgatcaacgagccgcaaccttttgctctcaaagcaacaagaagcaaggaggcgctacctagcaaggtggcacaaattgaggcggccggacttaatgatgaagagatggctctcatcattaaacgcttcaagacggtactaaagggtcacaaggggcagccaagcaagaccaagacaaaggggaagcgctcatgcttcaagtgcggtaagattggtcattttatcgctaactgccccgataatgatagtgaccaggaacagggaaataagagggaaaagaagaagaattacaagaaggcaaagggcgaggcgcatctaggcaaggagtgggactcggactgctcctcttccgactccgacaatgaaggactcgccgccaccgccttcaacaaatcaaccctcttcccaaacgagcgtcacacatgccttatggcaagagagaagaaggtatgtactcggaactctacctatgcttcttcaagtgaggacgaatctagtgatgaggatgaagtagattactcgtgtttgtttaaaggcctagatagaaccaaggtagacaaaattaatgaattgattgatgccttgaatgagaagaacatacttttagaaaagcaagaggatttgttgtatgaagaacatgataaatttgtagaagctcaaagatctcatgctctagaagttaaaagaaatgaaatgctttcttgtgaattatcttcttgccatgatacaatttttaaattaagaagcattaatgatgatttgaatgctaagttagaaattgctagtaaatccacctcttgtatagaaaatgttgtaacgtgcactaggtgtaaagatattaacattgatgcctatagtgaacacctagcttgcatttctaaattaaacgaagaggtagctagtcttaatgcccaacttaagactagcaaaagtgattttgagaaactaaaatttgctagggatgcctacacggttggtagacacccctcaattaaggatgggcttggcttcaagagggaagccaagaacttaacaagccataaggctcccatctccgccaaggagaaagggaaggcccctatggcaagtagcattaaaaggaatcatgcttttatatatcatgataggagacaaactagaaatgcttataggagttataatgcatatgatgattttaactctcatgccatgtttgcttctagttcttcctttatgcatggtagaaatatgtctaagaaaaatgctatgcctagaaagaatgttactcatgctcctaggaaagtagtgaatgaaccttctacaatttattgtgctttaaatgcttcctttgctatttgtagaaaggataagaaaattgttgctagaaaattaggggcaaaatgcaaggaagacaaaacttgcatttgggtccctaaggatatttgcactaaccttgtaggacccaacatgagttgggtttatgcatccgggggttcaagctggattatcgacagcggatgcacaaaccatatgacgggggagaagaagatgttcacctcctacgtcaagaataaggattcccaagattcaattgtattcgatgatgggaatcaaggcaaggataagtctgaaacccaagggaccctcaagcgcttcctcaggagggctcaaaatgagtttgagcttaaggtgaagaagataaggagcgacaacgggtccgagttcaagaaccttcaagtggaggaattccttgaggaggaaggaatcaagcacgagttctccgctccctacacaccacagcaaaatggtgtggtagagaggaagaacaggtcgctcatcgatatggcgaggacgatgctaggagagttcaagacccccgagtgcttttggacggaagccgtgaacacggcttgccatgccatcaacagggtctaccttcaccgcctcctcaagaagacttcgtatgagctgctaaccggtaacaaacccaatgtatcttactttcgtgtatttgggagcaagtgctacattctagtgaagaaaggtagaaattctaagtttgctcccaaagcagtagaagggtttttattaggttatgactcaaatacaaaggcgtatagagtcttcaacaaatcatcgggtttggttgaagtctctagcgacgttgtatttgatgagactaatggctctccaagagagcaagttgttgattgtgatgatgtagatgaagaagatgttccaacggccgcgatacgaaccatggcgattggtgatgtgcgaccacaggaacacttggagcaagctcaaccttcctcctcaaccatggtgcatcccccaacccaagatgacgaacaggtacctcaagtggaggcgtgtgatcaagggggagcacaagatgatcatgtgatggaggaagaagcgcaaccggcacctccaacccaagttcgagcgatgattcaaagggatcatcccgtcgaccaaattctgggtgacattagcaagggagtaactactcgatctcgattagttaatttttgtgagcattactcctttgtctcttctattgagcctttcagggtagaggaggccttgctagatccggactgggtgttggccatgcaggaggagctcaacaacttcaagaggaatgaagtttggacactggtgcctcgtccgaagcaaaatgttgtgggaaccaagtgggtgttccgcaacaaacaggacgagcacggggtggtgacgagaaacaaggctcgacttgtggcaaaaggttatgcccaagtcgcaggtttggatttcgaggagacttttgctcctgtggctaggctagaatcaattcgtatcttgctagcatatgccgctcatcattctttcaggttgtaccaaatggatgtgaagagcgctttcctcaatgggccaatcaaggaggaggtgtacgtggagcaaccccctggcttcgaggatgaacggtaccccgaccatgtgtgtaagctctctaaggcgctctatggacttaagcaagccccaagagcatggtatgaatgccttagagactttctaattgttaatgctttcaaggttgggaaagccgatccaactctttttacaaagacatgtgatggtgatttgtttgtgtgccaaatttatgtcgatgacataatatttggttctactaaccaaaagtcttgtgaagagtttagcagggtgatgacgcagaaattcgagatgtcgatgatgggcgagttgaaatacttccttgggttccaagtgaagcaactcaaggacggcaccttcatctcccaaatgaagtacacgcaagatttgctaaagcggtttgggatgaaggacgccaagcccgcaaagactccgatgggaaccgacggacacaccgacctcaacaaaggaggtaagtccgttgatcaaaaagcataccggtccatgataggttctttgctttatttatgtgctagtagaccggatattatgcttagcgtatgcatgtgtgctagatttcaatccgatcctaaggaatgtcacttagtggcggtgaagcgaatccttagatatttagttgctacgccttgcttcgggctctggtatccaaaggggtctacctttgacttggttggatactcagactccgactatgctggatgtaaggtcgataggaagagtacatcggggacgtgccaattcttaggaaggtccctggtgtcgtggaattctaagaaacaaacctccgttgccctatccaccgctgaggccgagtacgttgccgcaggacagtgttgcgcgcaactactttggatgaggcaaaccctcagggactttggctacaatctgagcaaagtcccactcctatgtgacaatgagagtgctatccgcatggcggaaaatcctgttgaacacagtcgcacaaagcacatagacatccggcatcactttttaagagaccaccagcaaaagggggatatcgaagtgtttcatgttagcaccgagaaccagctagccgatatctttaccaagcctctagatgagaagaccttttgcaggctgcgcagtgagctaaatgtcttagattcgcggaacttggattga

SEQ ID NO: 4669 - DNA, 855 bp, Zea mays
  Clone ID: TF_ZM4711.C1.o5.fg
atggatcctaagggaaaggggatggtgatcaacgacaaggagaaggagtccttcatcaatgagccaaaagacgacaagcccactgactcgggctcaagtcacaagaagaaggatgggaagaagaagaggcacatcaagaagatagtctactacgacagcgacgaggaagagtatcataaggtgggcggcttggataatgccaagcaaatttgggacaccctcaagatctcacatgaggggaacgacgccaccatgatcaccaagatggagttggtggaaggcgaactaggaaggtacaccaagatgacgcccgaggaaatactcggaaagtttgtaagcgagcgaatgatgatcaaggaggcaagatatgttgatgaggcgttgaatgacccaatgcctatccacgagcctcaaaccgttgctctcaaagcaacaagcagcagggaggggctacctagcaaggtggcacaagttgaggctgccagactaaatgaggatgaaatggccctcatcatcaagcgcttcaagatggcgctcaaaggtcgcaaggagcatcccaacaagagcaagacgaagggaaagcgctcctgcttcaagtgtggtaagattggtcactttattgctaactgtcccgataatgatagtgaccaggaacaaggaaagaatgggaagagagagaacaagaaggtttacaagaaggctaagggcgaagcacatcttggaaaagaatgggactcggattgttcttcgtccgactccgacgacgaaggactcgccgccacggccttcaacaaatcgtctctcttccccaacgagcatcacacctgcctcatggcaaaggagaagaagatctga

SEQ ID NO: 4670 - DNA, 4824 bp, Zea mays
  Clone ID: TF_ZM4714.C5.o4.fg
atggatcctaaagggaagggaatcgtgatcaacgacaaggagaaggagttcttcgtcaacgagccaagggatgacaagtccaacgactcgggctcgggccacagccgcaaagatgggaagaagaagaagacaagacgcatcaaggagatcgtctactacgacagcgatgagtctacttcctcccaaaaggacgacgaccacaacgaatacgagagaaagaaaccggtcaattcgaacttttcttttgattactctcgtattcctcaaagtactaatgctcatttattatctattccacttggtaaacctcctcattttgatggagaggactacggattttggagtcacaaaatgcgtagtcacttgttctctctccatcctagcatatgggagattgtagaaagtggaatgcactttgatagtacggatagtcccatgtttattaatgaacagattcataaaaatgcacaagctactactgtgttgctagcctctttgtgcagggacgagtaccataaggtgagcggcttggacaatgccaagcagatctgggacaccctcaagatctctcatgaggggaatgatgtcaccttgctcaccaagatggagttggtggagggcgagcttggacggttcgcaatgataaggggcgaggagccaactcaaacatacaaccggctcaagacccttatcaacaaaataaggagctacggaagcacgcgatggacggatcacgacgtcgttcgcctaatgctaaggtcctttactgttcttgatcctcatttggtgaacaatattcgtgaaaatcctaggtacaccaagatgtcgcccgaagaagttctggggaagttcgtaagcgggcgaatgatgatcaaggaggcaagatatgtggacgacgcgttgaacgatcctattcatgagtctcaacccattgctctcaaggcaacgaggagcaaggaggcgctaccgagcaaggtggcgcaagttgaggcggccgggctaaataatgaggagatggccctcatcattaagcgcttcaagacggtgcttaaaggtcgcaagggacagccaagcaagaccaagacaaaggagaagcgctcgtgcttcaaatgtggtaagattggtcatttcattgctaactgtcccgataatgaaagtgaccaggaaaaggggaacaaaagggagaagaagaagcattacaagaaggccaagggcgaggcacatatcggaaaggagtgggattcagattgctcctcctccgactccgacaatgaaggactcgccgccaccgccttcaacaagtcatccctcttccccaacgagcgtcacacttgcctcatggcaagggagaagaaagtaagcactcatgatactagtacttatgcttcttcaagtgaggatgagtctagtgatgatgatgagatagattactcatgcttattcaagggattagatagatctaaaattaataagattaatgagttgattgatgctttgaattacaagaatagattactagaagaacaagaggatcttttatatgaggagcatgataaatttgttagtgcacaaaattctcttgctctagaaatcaaaaggaatgaaatgctctctagtgaattatctacttgtcatgaatccatctctaaattaaaaagtgttaatgatgatttgaatgctaagttagaaatagctagtaaatcaacatcttgtgtagaaattgttgaaacttgcaataggtgtaaagattttgacattgatgcttgtagtgaacacctagtttcaatttccaaacttaatgatgaattggctagtcttaatgctcaacttaagactagcaagagtaattttgataagctaaaatttgcaagggatgcctacacaattggtagacacccctcaattaaggatggacttggctacaagaaggaagccaagaacttgacaagacataaggctcccatctccgccaaggagaaagggaaggcccctatggctagtagtgtgcaaaagaaccatgcctttatgtaccatgataggagagaatctagaaatgcttataggagatgtaacgcatatgatgcttttgattctcatgacatgtttgcttctagttcttcttatgtgcatgatagaaatgttggtaggagaaatgttgttcataatatgcctaggagaaatgttgttaatgttcctaggaaagtttatgcatccgggggttcaagctggattatcgacagcggatgcacaaaccatatgacgggggagaagaagatgttcacctcctacgtcaagaataaggattcccaagattcaattatattcggtgatgggaatcaaggcaaggataagtctgaaacccaagggaccctcaagcgcttcctcaggagagctcaaaatgagtttgagctcaaggtgaagaagataaggagcgacaacgggtccgagttcaagaaccttcaagtggaggagttccttgaggaggaaaggatcaagcacgagttctccgctccctacacaccacagcaaaatggtgtggtagagaggaagaacaggacgctaatcgatatggcgaggacgatgcttggagaattcaagacccccgagcgtttttggtcggaagccgtgaacacggcttgccacgccatcaacagggtctaccttcatcgcctcctcaagaagacttcgtatgagctactaaccgataacaaacccaatgtatcttactttcgtgtatttgggagcaggtgctacattctagtgaagaagggtagaaattctaaatttgctcccaaagctgtagaagggtttttgttaggttatgactcaaatacaaaggcgtatagagtcttcaacaaatcatcgggttttgttgaagtctctagcgacgttgtatttgatgagactaatggctctccaagagagcaagttgttgattgtgatgatgtagatgaagaagatgttccgacggccgctatacgaaccatggcgattggagaagtgcggccacaggaacaagatgaacgagatcaaccttcatcctcaacaacggtgcatcccccaactcaagacgatgaacaggttcatcaaaaggaggcgtgtgatcaagggggagcacaagatgatcacgtgatggaggaagaagcgcaaccggcacctccaacccaagttcgagcggtgattcaaagggatcatcccgtcgaccaaattttgggtgacattagcaagggagtaactactcgatctcgattagttaatttttgtgagcattactcctttgtctcttctattgagcctttcagggtagaggaggccttgctagatccggattgggtattggccatgcaggaggaactcaacaacttcaagcgcaatgaagtttggacactggtgcctcgtcccaagcaaaatgttgtgggaaccaagtgggtgttccgcaacaaacaggacgagcacggggtggtgacgaggaacaaggctcgacttgtggcaaaaggttatgcccaagtcgcaggtttggactttgaggagacgtttgctcctgtggctaggctagaatcaattcgtatcttgctagcatatgccgctcaccattctttcaggttgtaccaaatggatgtgaagagcgctttcctcaatgggccaatcaaggaggaggtgtacgtggagcaaccccctggcttcgaggatgaacggtaccccgaccacgtgtgtaagctctctaaggcgctctatggacttaagcaagccccaagagcatggtatgaatgccttagagacttcttaattgctaatgctttcaaggttgggaaagccgatccaactctttttactaagacttgcgactgtgatctttttgtgtgccaaatttatgccgatgacataatatttggttctactaaccaaaagtcttgtgaagagtttagcagggttatgatgcagaaattcgagatgtcgatgatgggcgagttgaactacttccttgggtttcaagtgaagcaactcaaggacggcaccttcatctcccaaacaaagtacacgcaagacttgctaaagcggtttgggatgaaggacgccaagcccgcaaagactcctatggggaccgacggacacaccgacctcaacaaaggaggtaagtccgttgatcaaaaagcataccggtcaatgatagggtctttactttatttatgtgctagtagaccggatattatgcttagcgtatgcatgtgtgctagatttcaatccgatcctaaggagtgtcacttagtggcggtgaagcgaattcttagatatttggttgctacgccttgcttcgggctctggtatccaaaggggtctacctttgacttggttggatactcagattccgactatgctggatgtaaggtcgataggaagagtacatcaaggatgtgccaattcttaggaaggtccctggtgtcgtggaactctaagaaacaaacctccgttgccctatccaccgctgaggccgagtatgttgccgcagggcagtgttgcgcacaactactttggatgaggcaaactcttcgggactttggctacaatctgagcaaagtcccactcctatgtgacaatgagagtgctatccgtatggcggaaaatcctgttgaacacagccgcacaaagcacattgacatccggcatcactttttgagagaccaccagcaaaagggagatatcgaagtgtttcatgttagcaccgagaaccagctagccgatatctttaccaagcctctagatgagaagaccttttgcaggctgcgtagtgagctaaatgtcttagattcgcggaacttggattga

SEQ ID NO: 4671 - DNA, 4974 bp, Zea mays
  Clone ID: TF_ZM4715.C2.o2.fg
atggatcctaagggcaaggggatggtggtcaatgataaggagaaggagtccttcgtcaatgacccaaaggagaacaagcctactgactcgggctcgagccgcaaaagaaaagatggaaggaagaagaaaacaaggcgcatcaaagagatagtctactacgacagcgacggatcctcttcttcccaaaaggacgacgacaacgactacgagaaaaagaagacggttaattcaaacttctcttttgattattctcgtattcctcaaagtaccaatgctcatttactctccattccacttgatggagttggtggaaggcgaactcgggagattcgcgatgataagaggggaggagcaacccagacatacaacaggctcaagaccctcgtcaacaagataaggagctatggaagcacgcgatggacggaccacgacgtcgtccgcctaatgctaaggtcctttattgtacttgatccacatctggtaaacaatattcgtgaaaatcctaggtacaccaagatgtcgcccgaagaaatccttgggaaatttgtaagcggacggatgatgatcaaggaggcgagatacgtggatgatgcattgaatggcccaatccacgagcctcaaaccgttgctctcaaagcgacaaggagcaaggaggcactacctagcaaggtggcgcaaattgaggcggtcgggcttaatgaggaagaaatgacccttatcatcaagcggttcaagacggcgctaaagggtcgcaaggagcaccccaacaagaacaagacgaaggggaagcgctcctgcttcaaatgtggtaagattggtcattttatcgctaattgtcccgataatgatagtgaccaggaaaagaagagtggaaagtgggaaaagaagaactacaagaaggcgaagggcgaagcacatcttggaaaggacgaggatgaatctagtgatgatgatgaaatagaatattcatgcttattcaagggcttagatagaactaagattgataagattaacgaattgattgatgctttgaatgataagaatagattactagaaaaacaagagaaccttttatatgaagagcatgataaatttgttagtgcacaaaattctcttgctttagaagttaaaaggaatgaaatgctttcttgtgaactatctacttgtcatgaaaccatttctactttaaaaggtgttaatgatgatttaaatgctaaagtagaagtagcaaataaatctaactcttgtgtagaacatgttatgatttgcaataagtgcaaagattttaatgttgatgcttgtagtgaacacctagtttgcatatctaaattaaatgatgaagtggctagtcttaatgcccaacttaagactagcaagagtgaatttgacaagctaaaatttgcaagggatgcctacacgattggtagacacccctcaattaaggatggtattggcttcaagagggaagtcaagaacttaacaagccataaggcttccatctccgccaaggagaaagggaaggcccttatggctagtagtgctcaaaagaaccatgccttcatgtaccatgataggagacattctagaaatgtttatagaagttatgatgcttttgattctcatgccatggttgcttctagttcttctattatgcatgatagaaatttagctcggaaaaatgctatgcctagaaaaaatattgttcatgttcctaggaaattaatgaatgaaccttctacaatttattatgctttaaatgcttcctttgctatttgtagaaaggataagaaagtagtggctagaaaattaggggcaaaatgcaagggagataaaacttgcatttgggtccctaaagctatttgtactaaccttgtaggacccaacatgagttgggtttatgcatccgggggctcaagctggattatcgacagcggatgcacaaaccacatgacgggggaaaagaggatgttctcttcctacgtcaagaacaaggatccccaagattcaaccatattcggtgatgggaaccaaggcaaggtgaaagggttaggaaaaattgctatttcttccgagcactctatttctaatgtattcttagttgagtcgcttggatataatttgttatccgtaagtcaatcatgtaatatggggtataattgtctattcacaaatgtagatgtgtctgtctttaaaagaagtgatggttcattagcttttaaaggtgtattagacgacaaactctatttagttgattttgcaaaagaggaggccgatctagatgcatgcttaattgctaagactagcatgggctggctgtggcatcgccgcttagcacatgtggggatgaagaaccttcacaagcttctaaagggagaacacgtgataggtctaactaatgttactttcgaaaaagatagaccttgtgcagcttgtcaagcagggaaacaggtgggaagctctcatcatgccaaaaatgtgatgacaacatcaagacccctggagttacttcatatggacctcttcggacccgtcgcctatctaagcataggaggaagtaagtatggtcttgttataattgatgatctttcccgcttcacttgggtattctttttgcaggataaatctgaaacccaagcgaccctcaagcgcttcctaagaagagctcaaaatgagtttgagctcaaggtgaagaagataaggagcgacaatgggtccgaattcaagaacattcaagtggaggagtatcttgaggaggaaggaatcaagcacgagttctccgctccctacacaccacaacaaaatggtgtggtagagaggaagaacaggacgctcatagacatggcgaggatgatgcttggagagttcaagacccccgagcgtttttggtcggaagccgtgaacacggcttgccacgccatcaaccgggtctaccttcatcgcctcctcaagaagacttcgtatgagctactaaccatttttgggagtaaatgctacattctagtgaagaagggtagaaattccaaatttgctcccaaagcggtagaagggtttttgttaggttatgactcaaatacaaaggcgtatagggtcttcaacaaatcatcgggtttggttgaagtctctagcgacgttgtatttgatgagactaatggctctccaagagagcaagttgttgatcttgatgatgtagatgaagaagacgtgccaacggccgcaatacgcaccatggcgattggagatgtgcggccacaggagcaaaatgcgcgagatcaaccttcttcctcaacaatggtgcatcctccaactcaagacgatgaacaggttcatcaagaggagacgtgtgatcaagggggagcacaaaatgatcatgtaatggaggaagaagcacaacaggcacctccaactcaagtccgagcggtgattcaaagggatcatcccgtcgaccagattttgggtgacattagcaagggagtaactactcgatctcgattagttaatatttgtgagcattactcctttgtctcttctattgagcctttcagggtagaggaggccttgctagatccggactgggtgttggccatgcaagaggagctcaataacttcaagagaaatgaagtttggacactggtgcctcgtcccaagcaaaatgttgtgggaacaaagtgggtgttccgcaacaaacaagacgagcacggggtggtgacaaggaacaaggcacgacttgtggcaaaaggttatgcccaagtcgcaggtttggactttgaggagacttttgctcctgtggctaggctagagtccattcgtatattgctagcatatgccgctcaccattctttcaggttgttccaaatggatgtcaagagcgctttcctcaacgggccaatcaaggaggaggtgtacgtggagcaaccccctggcttcgaggatgaacggtaccccggccacgaatgtaagctctctaaggcgctctatggacttaagcaagctccaagagcatggtatgaatgccttagagattttttaattgctaatgcttttaaggttgggaaagtcgatccaactctatttactaagacttgtgatggtgatctttttgcgtgccaaatttatgtcgatgacataatatttggttctactaaccaaaagtcttgtgaagagtttagcagggtgatgactcaaaagtttgagatgtcgatgatgggcgagctaagctacttccttgggttccaagtgaagcaactcaaggatgggaccttcatctcccaaatgaagtacacgcaagacttgatcaaacggtttgggatgaaggacgccaagcccgcaaagactccaatgggaaccgacggacacaccgacctcaacaaaggaggtaagtccgttgatcaaaaggcataccggtctatgatagggtctttactttatttatgtgctagtagaccggatattatgcttagcgtatgtatgtgtgctagatttcaatccgatccaagggagtgtcacttagtggctgtgaagcgaattcttagatatttagtcgctacgccttgcttcgggatctggtacccaaaggggtctacctttgacttgattggatattcagactctgactatgttggatgtaaggtcgataggaagagtacatcggggacgtgccaatacttaggaaggtccctggtgtcatggagttctaagaaacaaacctctgttgccctatccaccgctgagaccgagtatgttgcagcaggacagtgttgcgcgcaactactttggatgaggcaaacccttagggactttggctacaatctaagcaaagtcccactcctatgtgataatgagagtgctatccgcatagcggataatcctgttgaacacagccgcacaaagcacatagacatccggcatcattttttgagagaccaccagcaaaaggggatatcgaagtgtttcatgttagcaccgagaaccagctag

SEQ ID NO: 4672 - DNA, 5052 bp, Zea mays
  Clone ID: TF_ZM4783.C4.o4.fg
atggatcctaagggaaaggggatggtggtcaacgacaatgagaaggagtccatcttcaacgagccaagggatgacaaagccaatgactctggctcgagtcaaaataagaaggatggaaagaagaagaggcgtatcaagaagattgtctactacgacagcgacgaatcttcctcttctcaaaaggatgacgaatacgaggagaaaaagaaaatggttaactcgaacttttctttcgattattctcgtattccgcataattccaatgctcatttgctttccattccacttggtaaacctccccactttgatggagaggactacggattttggagtcacaaaatgcgtagccacttgttctctcttcatccaagtatatgggagatagtagaaaatggaatgcgatttgatagttcggataactccatgtttatcaatgaacaaatccataaaaatgcacaagctactactgttcttttagcatccttgtgcagggaagagtacaataaagtgagcggcttggacaacgccaagcagatttgggacaccctcaagatctcgcatgaggggaacgacgccaccatgctcactaagatggagttggtggaaggcgaactaggaaggttcgcgatgatgaagggagaggagccaactcaaacgtacaataggctcaagaccctggtcaacaagataagaagctatggaagcatgagatggacggaccacgacgtcgtccgacttatgctaaggtccttcactgtccttgatcctcatcttgtaaactatattcgtgagaatcctaggtacatcaagatgacgcccgagaaaatactcagaaagttcgtaagcgggcgaatgatgatcaaggaggcaagatatgttgatgatgcattgaatggcccaatgccgatctacgagcctcaaactgttgctctcaaagcaacaagtagcagggagacgctacctagcaaggtggcgcaagttgaggcggccgggctgaatgaggacgaaatggccctcatcatcaagcgcttcaagacggcgctcaaaggtcatagggagcatccaaacaagagcaagacaaagggaaagcgctcctgcttcaagtgtggtaagattggtcactttattgctaactgtcccgataatgatagtgaccaggaacaaggaaagaccggaaagtgggaaaagaagaagacctacaaaaaggcgaagggcgaggcacaccttggaaaggagtgggatctggattgctcctcatccgactccgacaacgaaggactcaccgccacagccttcaacaagtcatctctcttccccaacgagcatcacacctacctcatggcaaaggagaagaaggtaagtactcgaagtacccatacatatgcttcttcaagtgatgatgaagtagactacgcaagcttattcaaaggtttagatagaactaaaattgataagatcaatgaattaattgatgcttcgaatgagaagaatagattgttagaaaagcaagaggatcttttatatgaagagcatgataaatttgttagtgcgcaaaattctcttgctctagaagttaaaagaaatgaaatgctttcatgtgaactatctacatgccatgaatctatttctagcttaaagagtattaatgatgatttaaatactaagttagaaatagctaataaatcaagctctcttgtagaacatgttgtgatttgcaataggtgtaaggattttaatgttgatgcttgtagtgaacacttaatttccatttttaaattaaatgatgaagtggctagtcttaatgcccaacttaagactagcaagaatgattttgataaactaaaatttgcaagggatgcctacactattggtagacacccctcgattaaggatggtcttggctttcaaagggaaaccaagaacttaacaggccaaagagctcctattttcaacaaggaaaaagggaaggctcctatggctagtagtaatcaaaagaatcatgcatttatttatgataggaaattttctagaaatgttcatcatgataggagttgtaatgcttataattcaaatgtcatgattgcttcaagttcttcctttatgcatagtagagatatgcctaggaaaaatgtcattcatcatatgcctaggagaaaagttgttaatcatatgcctaggaaagtgtataatggagttaccactgtctttcatgcttgcaatactaagtttattctttcatgtaaaaatgaaaaagtaattgctaaaaaggtgggggccaaatgcaagggagacaagacttgcatttgggtccctaaggctatagtaactaaccttgtaggacccaacaagagttggattatcgacagcggatgcacaaaccacatgacgggggagaaaaagatgttcacctcctacgtcaagaacaaagattcccaagattcaatcatattcggtgacgggaaacaaggcaaggttaaaggactaggaaagattgctatttcatccgagcactccatttctaatgtgtttttagttgagtcgctcgggtataacttgttgtccattagtcaactatgtaatatgggttataattgcttatttacaaatgtagatgtgtctgtctttagaaggagcgatggttcattagcttttaagggtgtactagacgacaaactctatttagttgattttgcaaaggaagaggccggtctagatgcatgcttaattgctaatactagcatgggctggctgtggcatcgcagtcttgctcatgtggggatgaagaaccttcacaaacttctaaagggagaacatgtgttaggtctaacaaatgtgactttcgaaaaagatagaccttgtgcagcttgtcaagcaggtaaacaagtgggaaatgcacatcacaacaagaacgtgatgaccacatcaagacccctggagttgctgcatatggacctcttcggacccgtcgcctacctcagcatcgggggaagtaagtatggtcttgttatagttgatgatttttcccgcttcacttgggtattctttttgcaggataagtctgaaacccaagggacccttaagcgcttcctaaggagagctcaaaacgagtttgagctcaaggtgaaaaagataagaagcgacaatgggtccgagttcaagaaccttcaagtggaggagtaccttgaggaggaaggaatcaagcacgagttctccgctccctacacaccacagcaaaatggtgtggtagagaggaagaataggacactcatagacatggcgaggacgatgcttggagagttcaagacggtcgagcggttttggtcggaagctgtgaacacggcttgccatgccataaaccgggtctaccttcatctactcctcaagaagacttcgtatgagcttctaaccagtaacaaacccaacgtttcatactttcgtgtatttgggagtaaatgttatattctagtgaagaaaggtaggaattccaaatttgctcccaaagctgtagaagggtttttgttaggttatgactcaaatacaaaggcgtatagagtcttcaacaaatcatcgagtttggttgaagtctctagcaacattgtatttgatgagattaatggctctccaagagagcaagttgatattgatgatgtagatgaagaagatgttccaacggccgcaatacgcaccatggcgattggagatgtgcgaccacaggaacaaaaggagcaagatcaaccttcttcctcaacaatggtgcatcccccaactcaagatgatgaacaggttcatcacgaagagacggtagaagaggccttgctagatccggactgggtgttggccatgcaggaagagctcaacaacttcaagcgaaatgaagtttggacactggtgcctcgtcccaagcaaaatgttgtgggaaccaagtgggtgttccgcaacaaacaagacgagcacggggtggtgacaaggaacaaggcacgacttgtggcaaaaggttatgcccaagtcgcaggtttggactttcaggagacttttgctcctgtggctaggctagagtctatttgcatattgttagcctatgccactcaccattctttcaggttgttccaaatggatgtgaagagcgctttcctcaacgggccaatcaaggaggaggtgtacgtagagcaaccccctggctttgaggatgaacggtaccccgaccatgtgtgtaagctctctaaggcgctctatggacttaagcaagccccaagagcatggtatgaatgccttagagactttttaattgctaatgctttcaaggttgggaaagccgatccaactttattcactaagacatgtgatggcgatttatttgtgtgccaaatttatgtcgatgacataatatttggttctactaaccaaaagtcttgtgaagagtttagcagggtgatgactcaaaaatttgagatgtcgatgatgggcgagttgaactacttcctcgggttccaagtgaagcaactcaaggacgacaccttcatttcccaaacgaagtacacgcaagacttgatcaagcgttttgggatgaaggatgccaagcccgcaaagactccaatgggaaccgatggacatgtcgacctcaacaaaggagggtcaacctttgacttaattggatactcagactccgattatgctggatgcaaggttgataggaagagtacatcagggacgtgccaattcttaggaaggtccctggacagtgttgcgcggcaactactttggatgaggcaaaccctccgggactttggctacaatctgagcaaagtcccactcctatgtgataatgagagtgctatccgcatggcggacaatcctgttgaacacagccgcactaagcacatagacatccgacatcactttttgagagaccaccagcaaaagggagatatcgaagtgttttatgttagcaccgagaaccagctagccgatatctttaccaagcctttagatgagaagaccttttgtaggctgcgtagtgagctaaatgtcttagattcgcagaacttggattga

SEQ ID NO: 4673 - DNA, 4989 bp, Zea mays
  Clone ID: TF_ZM4840.C3.o2.fg
atggatcctaaggggaagggaatcgtgatcaacgacaaggagaaggaatccttcgtcaacgagcccaaagaagacaagcctaccgactctggctcgggccatagacggagggaagggaagaagaagaagacaaggcgcatcaaggagatcgtctactacgacgacagcgacgaatcttcctcttcccaaaaggacgacgaccacaacgactacgagcaaaggaaaccggttaattctaacttttcctttgactactctcgtattccgcaaagttcaaattcacatttgctttccattccactcggcaagcccccacactttgatggagaggactacggattttggagccacaaaatgcgtagtcacctattttctctccatcctagtatatgggagattgtagatagtggaatgcactttaatagttcggatagtcctatattcattaatgagcaaatccataagaatgcacaagctactactgttcttctagcttcattgtgcagggatgaatataacaaagtgagtggcttagataacgccaagcaaatctgggataccctcaagatctctcatgagggaaatgacgctaccttgctcaccaaaatggagttggtggagggcgagcttggacggttcgcgatgataaggggcgaggagccaactcaaacatacaaccggctcaagacccttatcaacaaaataaggagctacggaagcacgcgatggacggaccacgacgtcgtccgactaatgctaaggtcctttaccgttcttgatcctcatttggtgaataatattcgtgagaatcccaggtacaccaaaatgtcgcccgaagaagtcttaggaaaattcgtcagcgggcgaatgatgatcaaggaggcaaggtacgtggacgacgccttgaatggaccgatcaacgaaccacaaccttttgctctcaaagcaacaagaagtaaggaggcgctacctagcaaggtggcacaaattgaggcggtaggacttaatgatgaagagatggctctcatcatcaaacgcttcaagacggtgctgaagggtcacaaggggcagccaagcaagaccaagacgaaggggaagcgctcatgcttcaagtgcggtaagattggtcattttattgctaactgccccgataatgatagtgaccaggaaaagggaaacaagagggaaaagaagaagcattacaagaaagcaaagggcgaggcacatctaggcaaggagtgggactcggattgctcctcttccgactccgacaatgaaggactcgccgccaccgccttcaacaaatcaaccctcttccccaacgagcgtcacacatgccttatggcaagggagaagaaggtatgtactcgcaactctacctatgcttcttcaagtgaggacgaatctagtgatgatgatgaagtagattattcatgtttgttcaagggcttagatagatctaagatagacaaaattaatgaattaattgatgccttgaatgaaaagaatatacttttagaaaagcaagaggatttgttatatgaagaacatgataagtttgtagaggcacaaaaatcccttgcattagaaattaagagaaatgaaatgcttgcttgtgaagtgtcaacatgccatgattctatttctaacttaaagagcataaacgatgatttaaatgctaaactagtagaagcaaataaatccaactcgtgtgttgaatatgttgaaatttgcactaggtgtaaggatattgatattaatgcttgtagcgaacacttagtttctatttcaaaattgaatgatgaattagctagtcttaatgctcaacttaagactagcaagagtaattttgataaactaaaatttgctagggatgcctacacggttggtagacacccctcaattaaggatgggcttggcttcaagagagaagtcaagaacttgacaagccataaggctcctatctccgccaaggagaaagggaaggctcctatggctagtagcactaaaaagaaccatgcttttttgtatcatgatagaagtgcttataggggttataatgcttatgatgattgtgatgctcatagttcttcctttatgcatggtagaaatatgtctaggaaaaatgctatgcctagaaagaatgttattcatgctcctaggaaagtagtgaatgaaccttctacaatttattgtgctttaaatgcttcctttgttatttgtagaaaggataagaaaattgttgctaggaagttaggggcaaaatgcaagggagacaaaacttgcatttgggtccctaaggatatttgcactaaccttgtaggacccaacatgagttgggtttatgcatccgggggttcaagctggattatcgacagcggatgcacaaaccatatgacgggggagaagaagatgttcacctcctacgtcaagaataaggattcccaagattcaatcatattcggtgatgggaatcaaggcaagatagaccttgtgcagcttgtcaagcaggataagtctgaaacccaagggaccctcaagcgcttcctcaggagagctcaaaatgagtttgagctcaaggtgaagaagataaggagcgacaacgggtccgagtttaagaaccttcaagtggaggagttccttgaagaggaagggatcaagcacgagttctccgctccctacacaccacagcaaaatggtgtggtagagaggaagaacaggacgctcatcgacatggcgaggacgatgctaggagagttcaagacccccgagtacttttggacggaagccgtaaacacggcttgccacgccatcaacagggtctaccttcatcgcctcctcaagaagacgtcgtatgagctactaaccggtaacaaacccaatgtatcctactttcgtgtatttgggagcaagtgctacattctagtgaagaagggtagaaattcaaaatttgctcccaaagctgtagaagggtttttgttaggttatgactcaaatacaaaggcgtatagagtcttcaacaaatcatcaggtttggttgaagtctctagtgacgttgtatttgatgagactaatggctctccaagagagcaagttgttgattgtgatgatgtagatgaagaagatgttccaacggccgcaatacgaaccatggcgattggagacgttcggccacaggaacaagatgaacgagatcaaccttcttcctcaactatggtgcatcccccaactcaatacattgaacaggttcatcaacaggaggcgtgtgatcaagggggagcacaagatgatcatatgatggaggaagaagcgcaaccggcacctccaacccaagttcgagcggtgattcaaagggatcatcccgtcgaccaaattctgggtgacattagcaagggagtaactactcggtctcgattagttaatttttgtgaacattactcctttgtctcttctattgagcctttcagggtagaggaggccttgctagatccggactgggtgttggccatgcaggaggagcttaacaacttcaagcgcaatgaagtttggacactggtgcctcgtccgaagcaaaatgttgtgggaaccaagtgggtgttccgcaacaaacaggacgagcacggggtggtgacgaggaacaaggctcgacttgtggcaaaaggttatgcccaagtcgcaggtttggactttgaggagacgtttgctcctgtggctaggctagaatcaattcgtatcttgctagcatatgccgctcaccattctttcaggttgtaccaaatggatgtgaagagcgctttcctcaacgggccaatcaaggaggaggtgtacgtggagcaaccccctggcttcgaggatgaacggtaccccgaccatgtgtgtaaactctctaaggcgctctatggacttaagcaagccccaagagcatggtatgaatgccttagagactttttaattgctaatgctttcaaggttgggaaagccgatccaactctttttacaaagacatgtgatggtgatttgtttgtgtgccaaatttatgtcgatgacataatatttggttctactaaccaaaagtcttgtgaagagtttagcagggtgatgacgcagaaattcgagatgtcgatgatgggcgagttgaactacttccttgggttccaagtgaagcaactcaaggacggcaccttcatctcccaaacgaagtacacgcaagatctgctaaagcggtttgggatgaaggacgccaagcccgcaaagactccgatggggaccgacggacacaccgacctcaacaaaggaggtaagtccgttgatcaaaaagcataccggtcaatgataggttctttgctttacttatgtgctagtagaccggatattatgcttagcgtatgcatgtgtgctagatttcaatccgatcctaaggagtgtcacttagtggcggtgaagcgaattcttagatatttggttgctacgccttgcttcgggctctggtatccaaaggggtctacctttgacttagttggatactcagactccgactatgctggatgtaaggtcgataggaagagtacatcggggacgtgccaattcttaggaaggtccctggtgtcatggaactctaagaaacaaacatccgttgccctatccaccgctgaggccgagtacgttgccgcaggtcagtgttgcgcgcagctactttggatgaggcaaaccctccgggactttggctacaatctgagcaaagtcccactcctatgtgacaatgagagtgctatccgcatggcggagaatcctgttgagcacagccgcacaaagcacatagacatccggcatcactttttgagagaccaccagcaaaagggagatatcgaagtgtttcatgttagcaccgagaaccagctagccgatatcttcactaagcctctagatgagaagaccttttgcaagttgcgtagtgagcttaatgtcttagattcgcggaacctggattga

SEQ ID NO: 4674 - DNA, 4872 bp, Zea mays
  Clone ID: TF_ZM4869.C1.o9.fg
atggatcctaaagggaagggaatcgtgatcaacgacaaggagaaggagtccttcgtcaacgagccaagggatgacaagtccaacgactcgggctcgggccacagacgcaaagatgggaagaagaagaagacaagacgcatcaaggagatcgtctactacgacagcgatgagtctacttcctcccaaaaggacgacgaccacaacgaatacgagaaaaagaaaccggtcaattcgaacttttcttttgattactctcgtattcctcaaagtactaatgctcatttattatctattccacttggtaaacctcctcattttgatggagaggactacggattttggagtcacaaaatgcgtagtcacttgttctctctccatcctagcatatgggagattgtagaaagtggaatgcactttgatagtacggatagtcccatgtttattaatgaacagattcataaaaatgcacaagctactactgtgttgctagcctctttgtgcagggacgagtaccataaggtgagcggcttggacaatgccaagcagatctgggacaccctcaagatctctcatgaggggaacgatgtcaccttactcaccaagatggagttggtggagggcgagctaggacggttcgcaatgataaggggcgaggagccaactcaaacatacaaccggctcaagacccttatcaacaaaataaggatctacggaagcacgcgatggacggatcacgacgtcgtccgcctaatgctaaggtcctttaccgttcttgatcctcatttggtgaacaatattcgtgaaaatcctaggtacaccaagatgtcgcccgaagaagttctggggaagttcgtaagcgggcgaatgatgatcaaggaggcaagatatgtggacgacgcgttgaacggtcctattcatgagcctcaacccattgctctcaaggcaacgaggagcaaggaggcgctaccgagcaaggtggcgcaagttgaggcggccgggctaaataatgaggagatggccctcatcattaagcgcttcaagacggcgcttaaaggtcgcaagggacagccaagcaagaccaagacaaaggagaagcgctcgtgcttcaaatgtggtaagattggtcatttcattgctaactgtcccgataatgaaagtgaccaggaaaaggggaacaaaagggagaagaagaagcattacaagaaggccaagggcgaggcacatatcggaaaggagtgggattcggattgctcctcctccgactccgacaatgaaggactcgccgccaccgccttcaacaagtcatccctcttccccaacgagcgtcacacatgccttatggcaagggagaagaaggaaatagattactctagtttgttcaagggattggatagaactaaagtagaaaagattaatgaattgattgatgccttgaatgaaaaggatagactcttagaaaaacaagaggatcttttatatgaagagcatgacaaatttgtagaggcacaaaaatcttatgctttagaagttaaaagaaatgaagtgctttctagtgaattatcttcttgtcatgaaaccattgctactttaaaaggtgttaataatgatttaaatgctaaactagaagtggctagtaaatctaactcttgtgtagaacatgttatggtttgcactaggtgtaaagattttaatgttgatgcttgtagtgaacacctagtttcaatttctaaattgaatgatgaagtggctagtcttaatgcccaacttaagactagcaaaagcgaatttaataaattaaaatttgcaagggatgcctatacgattggtagacatccctcaattaaggatggacttggcttcaagagggaagccaagaacttaacaagccataaggctcccattcccgccaaggagaaagggaaggcccctatggctggtagtgctaaaaagaaccatgcttttatgtatcatgataggagacatactagaaatgcaaatagaagttataatgtttttgattcatatgtttatgattctcatgacatgtttgcttctagttctttctatgtgcatgataggaatgttggtaggagaaatgttgttcataatatgcctaggagaaatgttgttaatgttcctaggaaagttaatgagccttctacaatatatcatgctttgaatgcttcctttgcaatttgtagaaaggatagaaaggtgattgctaggaagttaggggcaaaatgcaagggtgataaaacttgcatttggatccctaaggaaattgtgactaaccttgtaggacccaacaagagttgggtttatgcatccgggggttcaagctggattattgacagcggatgcacaaaccatatgacgggggagaagaagatgttcacctcctacgtcaagaataaggattcccaagattcaataatattcggtgatgggaatcaaggcaaggtaaaagggttagatgtgtctgtctttagaagaagtgatgattcactagcttttaagggtgtattagacggcaaactttatttagttgattttgaaaaagaggaggataagtctgaaacccaagggaccctcaagcgcttcctcaggagagctcaaaatgagtttgagctcaaggtgaaaaagataaggagcgacaacgggtccgaattcaagaaccttcaagtggaagagttccttgaggaggaagggatcaagcacgagttctccgctccctacacaccacaacaaaatggtgtggttgagaggaagaacaggacgctaatcgatatggcaaggacgatgcttggagaattcaagacccccgagcgtttctggtcagaagccgtgaacacggcttgccacaccatcaacagggtctaccttcatcgcctcctcaagaagacttcgtatgagctactaaccggtaacaaacccaatgtatcttactttcgtgtatttgggagcaagtgctacattctagtaaagaagggtagaaattctaagtttgctcctaaagctgtagaagggtttttgttaggttatgactcaaatacaaaggcatatagagtcttcaacaaatcatcgggtttggttgaagtctctagcgatgttgtatttgatgagactaatggctctccaagagagcaagttgttgattgtgatgatgtagatgaagaagatgttccgacggctgctatacgaaccatggcgattggagaagtgcggccacaggaacaagataaacgagatcatccttcttcctcaacaacggtgcctcccccaactcaagacgatgaacaggttcatcaacaggaggcgtgtgatcaagggggagcacaagatgatcatgtgatggaggaagaagcgcaaccggcacctccaacccaagttcgagcgatgattcaaaggaatcatcccgtcgatcaaattctgggtgatattagcaagggagtaacaactcgatctcgattagttaatttttgtgagcattactcctttgtctcttctattgagcctttcagggtagaggaggccttgctagatccggactgggtggtggccatgcaggaggagctcaacaatttcaagcgcaatgaagtttggacactggtgcctcatcccaagcaaaatgttgtgggaaccaagtgggtgttccgcaacaaacaagacgagcacggggtggtgacaaggaacaaggctagacttgtggcaaaaggttatgcccaagtcacaggtttggactttgaggagacttttgctcctgtggctaggctagaatcaattcgtatcttgctagcatatgctgctcaccattctttcaggttgtaccaaatggatgtgaagagcgctttcctcaatgggccgatcaaagaggaggtgtacgtagagcaaccccctggcttcgaggatgaacggtaccccgaccatgtgtgtaagctctctaaggcgctctatggacttaagcaagccccaagagcatggtatgaatgccttagagactttctaattgttaatgctttcaaggttgggaaagccgatccaactctttttactaagacatgtgatggtgatttgtttgtgtgccaaatttatgtcgatgacataatatttggttctactaaccaaaagtcttgtgaagagtttagcagggtgatgacgcagaaattcgagatgtcgatgatgggcgagttgaactatttccttgggttccaagtgaagcaactcaaggacggcaccttcatctcccaaacaaagtacacgcaagatctgctaaagcgatttgggatgaaggacgccaagcccgcaaagactccgatggggaccgacggacacaccgacctcaacaaaggaggtaagtccgttgatcaaaaagcataccggtcaatgatagggtctttactttatttatgtgctagtagaccggatattatgcttagcgtatgcatgtgtgctagatttcattccgatcctaaggagtgtcacttagtggcggtgaagcgaattcttagatatttggtcgctacaccttgcttcgggatctggtatccaaaggggtctaactttgacttgattgggtactcagattccgactatgctggctgtaaggtcgataggaagagtacatcggggacgtgccaattgttaggaaggtccctggtgtcatggaactctaagaaacaaacctccgttgccctatccaccgctgaggccgagtacgttgccgtaggacagtgttgcgcacaactactttggatgaggcaaacccttcgggactttggctacaatctgagcaaagtcccactcctatgtgataatgagagtgtatccgcatggcggaaaatcctgttgagcacagccgcacaaagcacatag

SEQ ID NO: 4675 - DNA, 3072 bp, Zea mays
  Clone ID: TF_ZM4878.C20.o2.fg
atggatcctaagggaaaggggatagtggtcaacaacgagaaggagtctatcttcaacgagccgaaggatgacaagcctaccgactcgggttcaagccacaagcgcaaagacgggaagaagaagaagacaaggcgcatcaaggagatcgtctactacgacagcgacgaatcttcctcttcccaaaaggacgacgacgactacgagaaaaagaaaacggtcaattcaaacttttcttttgattactctcgtattcctcaaagtacaaatgctcatttattatctgttccacttggtaaacctcctcattttgatggagaagactacggattttggaatcacaaaatgcgtagtcacttgttctctctccatcctagcatatgggagattgtagagagtggaatgcactttgatagtacggaaagtcccatgtttattaatgagcaaatccataaaaatgcacaagctactactgttcttctagcttcattgtgcagggatgaataccacaaagtgagcggcttggataacgccaagcagatctgggacaccctcaagatttcacatgagggaaacgacgtcaccttgctcactaagatggagttggtagagggcgagcttggacgattcgcgatgataaggggcgaggagccgacacaaacatacaaccggctcaagacccttatcaacaaaataaggagctacggaagcacgcgatggacggaccacgacgtcgtccgattgatgctaaggtcctttaccgttcttgatcctcacttggtgaataacattcgtgagaatcccaggtacaccaaaatgtcgcccgaagaagtccttggaaaattcgtaagcgggcgaatgatgatcaaggaagcgaggtacgtggacgacgctctaaacggtccaatcaatgagcctcaacccgttgctctcaaggcaacaaggagcaaggaggcgttacccagcaaggtagcacaaattgaggccgccagacttaatgatgaagagatggccctcatcatcaagagattcaagacagcgcttaagggtcgcaagggacagccaagcaagaccaaagccaaggggaagcgctcatgtttcaaatgcggtaagattggtcattttattgctaactgtcccgataatgaaagtgaccaggaacacgggagcaagagggaaaagaagaaaaattacaagaaggccaagggcgagacacatctaggaaaggagtgggactcggattgctcctcctccgactccgacaatgaaggactcgccgccaccgccttcaacaagtcatctctcttccccaacgagcgtcacacatgccttatggcaagggagaagaaggtatgtagtcgaaactctacttatgcttcttcaagtgaggacgaatctagtgatgaggatgaaatagattattcatgtttatttaagggcctagatagaaccaaggtagataaaattaatgaattaattgatgccttgaatgataagaataggcttttagaaaaacaagaagatttgttgtatgaagaacatgataaatgtgtagaagcacaaaaatctcatgctttagaagttaaaagaaatgaaatgctttcttgtgaattatcttcttgccatgagacaatttctagcttaaggagcattaatgatgatttgaatgctaagatagaaatagctagtaaatcaacaacttgtgtagaaaatgttgttatttgcaatagatgtaaagactttgatattgatgcttgtaatgaacacatagcttctattgcaaagttaaatgatgaaatggctagtcttaatgcccaacttaaggctagcaaaagtgattttgataaactaaaatttgctagggatgcctacacgattggtagacacccctcaattaaggatgggcttggcttcaagagggaagccaagaacttaacaagccataaggctcccatcttcgccaaggagaaagggaaggcccccatggcaagtagtactaaaaagaaccatgcttttatgtacaatgatagaagacagtctcataggagttgtaatacttttgattcacatgcctatgactcttatgcaataaaggataggaagatagttgctaggaaattaggggcaaaatgcaagggtgataaagcttgcatttgggtccctaaggaaattgtgactaaccttgtaggacccaacaagagttgggtttatgcatccgggggctcaagctggattatcgacagcggatgcacaaaccatatgacgggggagaaggagatgttcacctcctacgtcaagaataaggattcccaagattcaatcatattcggtgatgggaaccaaggcaaggtgaaaggtttaggcaagattgcaatatccaatgagcactctatctctaatgtgtttttagttgagtctcttggatataatttactatctgtcagtcaattatgtaatatggggtataattgtctatttacaaatgtagatgtgtctgtctttagaagaagtgatggttcactagcatttaagggtgtgctagacggcaaactttatttagttgattttgcaaaagaggaggccggtctagatgcatgcttaatcgctaagactagcatgggctggctgtggcatcgccgcttagcacatgtggggatgaagaaccttcacaagcttctaaagggggaacacgtgataggtttgactaacgtgcaattcgaaaaagatagaccttgtgcagcgtgtcaagcaggtaaacaagtgggaggagcacatcacagcaagagtgtgatgaccacttcaagacctctggagctgctgcatatggacctcttcggacccgtcacctatctgagcataggaggaagtaagtatggtttagttattgtggatgacttttcccgcttcacttgggtgttctttttgcaggataagtctgaaacccaagggaccctcaagcgcttcctaaagagagctcaaaatgagtttgagctcaaggtgaagaagataaggagcgacaacgggtccgagttcaagaaccttcaagtggaggagtttcttgaggaggaagggtga

SEQ ID NO: 4676 - DNA, 4809 bp, Zea mays
  Clone ID: TF_ZM4879.C3.o2.fg
atggatcctaagggaaaggggatggtggtcgacaacaacgagaaggagtctatcttcaacgagccgaagaatgacaagtctaccgacttgggctcaagccacaagcgcaaagatgggaagaagaagaagacaaggcgcatcaaggagatcgtctactacgacagcgacgaatcctcttcttcccaaaaggacgacgacaacgactacaggaagacggtcaattcgaacttttcatttgattattctcgtatgccacatagttcgaattcacatttgctttccattcctcttggcaaacctccacactttgatggggaagactacggattttggagtcacaaaatgcgtagtcacttattctctctccatccaagcatatgggagattgtagagaatggaatgaaatttgatagttcggatagtcccatgttcattaatgagcaaattcataagaatgcacaagctactactgttctattagcatccttgtgcagggaagagtacaataaggtgagcggcttggacaatgccaagcagatatgggataccctcaagatctctcacgaggggaacgacatcaccatgcttactaagatggagttggtggagggtgagcttggaagatttgcgatgataaggggcgaggagccaacccaaacatacaaccggctcaagacccttatcaacaaaataaggagctatggaagcacgcgatggacggaccagacgtacaccaaaatgtcgcccgaagaagtcctaggaaaattcgtcagcgggcgaatgatgattaaggaagcgaggtacgtggacgacgccttgaatggaccgatcaacgagccacaacctcttgctctcaaagcaacaagaagcaaggaggcgctacctagcaaggtggcacaaattgaggcggccggacttaatgatgaagagatggctctcatcatcaaacgcttcaagatggtgctaaagggtcacaaggggcagccaagcaagaccaagacaaaggggaagcgctcatgcttcaagtgcggtaagattggtcattttatcgctaactgccccgataatgatagtgaccaggaacagggaaacaagagggaaaagaagaagaattacaagaagaccaagggcgaggcacatcttggaaaggaatgggattcggattgctcctcttccgactccgacaacgagggactcgccgccaccgccttcaacaaatcaaccctcttccccaacgagcgtcacacatgccttatggcaagggagaagaaggtatgtactcggaactctacctatgcttcttcaagtgaggacgaatctagtgatgaggatgaagtagattactcatgtttgtttaagggcctagatagaaccaaggtagacaaaattaatgaattgattgatgccttgaatgataagaatatgcttttagaaaagcaagaagatttgttgtatgaagaacatgataaatttgtagaagctcaaagatctcatgctctagaagttaaaagaaatgaaatgctttcttgtgaaatatcttcttgccatgagacaatttctaaattaaggagcattaatgatgatttgaatgctaagttagagatcgctagtaaatctaccacttgtgtagaaaatgttataatgtgcactaggtgtaaagatattaaccttgatgcttatagtgaacacctagcttgcatttctaaattaaatgaagaggtagctagtcttaatgcccaacttaagactagcaaaagtgattttgagaaactaaaatttgctagggatgcctacacggttggtagacacccctcaattaaggatggacttggcttcaagagagaagccaagaacttaacaagccataaggctcccattcccgccaaggagaaagggaaggcccctatggctagtagtgtgcaaaataaccatgcgtttatataccatgacaggagacaatctagaaatgcttataggaattgtaatgcatatgatgctattaattctcatgccatgtttgcttctagttcttcttatgtgcatgatagaaatgtttgtaggagaaatgttgttcataatatgcctaggagaaatggtgttaatgttcctaggaaagctaatgaaccttctacaatatatcatgctttaaatgcttcatttgctatttgtagaaaagataggaagatagttgctagaaaattaggggcaagatgcaagggagacaaaacttgcatttgggtccctaaggatatttgtgctaaccttgtaggacccaacatgagttgggtttatgcatccgggggttcaagctggattatcgacagcggatgcacaaaccatatgacgggggagaagaagatgttcacctcctacgtcaagaataaggattcccaagattcaattatattcggtgatgggaatcaaggcaaggataagtctgagacccaaggaaccctcaagcgcttcctaaggagagctcaaaacgagtttgagctcaaggtgaagaagataaggagcgacaacggatccgaattcaagaaccttcaagtggaagagttccttgaggaagaaggaatcaagcacgagttttccgctccctacacaccacaacaaaatggtgtggtagagaggaagaacaagacgctcatcgatatggcgaggacgatgctaggagagttcaagacccccgagtgcttttggacggaagccgtgaacacggcttgccacgccatcaacagggtctaccttcatcgcctcctcaagaagacatcgtatgagctactaaccggtaacaaacccaatgtatcttactttcgtgtatttgggagcaagtgctacattctagtgaagaagggtagaaattctaagtttgctcccaaagctgtagaagggtttttgttaggttatgattcaaatacaaaggcgtatagggtcttcaacaaatcatctggtttggttgaagtctcttgcgacgttgtatttgatgagactaatggctctccaagagagcaagttgttgatcttgatgatgtagatgaagaagatgttccaacggccgcgatacgcaccatgacgattggagatgtccggcctcgggaacaattagagcaagatcaaccgtcttcctcaactatggtgcatcccccaactcaagacgatgaacaggttcatcaacaggaggcgtgtgatcaagggggagcacaagatgatcatgtgatggaggaagaagcggaaccggcacctccaacccaagttcgagcaatgattcaaagggatcatcccgtcgacctaattctgggtgacattagcaagggagtaactactcggtctcgattagttaatttttgtgaacattactcctttgtctcttctattgagcctttcagggtagaagaggccttgctagatccggactgggtgttggccatgcaagaggagctcaacaacttcaagaggaatgaatgggtgttccgcaacaaacaagacgagcacggagtggtgacaaggaacaaggctcgacttgtggcaaaaggttatgcccaagtcgcaggtttggactttgaggagacttttgctcctgtggctaggctagagtccattcgtatcttgctagcatatgccgctcaccattctttcaggttgttccaaatggatgtgaagagcgctttcctcaacgggccaatcaaggaggaggtgtacgtggagcaaccccctggcttcgaggatgaacgataccccgaccacgtgtgtaagctctctaaggcgctctatggacttaagcaagccccaagagcatggtatgaatgccttagagatttcttaattgctaatgctttcaaggttgggaaagtcgatccaactcttttcactaagacatgtgatggtgatttgtttgtgtgccaaatttatgtcgatgacataatatttggttctactaataaaaagtcttgtgaagagtttagcagggtgatgacgcagaaattcgagatgtcaatgatgggcgagttgaactacttccttgggttccaagtgaagcaactcaaggacgacaccttcatctctcaaacgaagtacacgcaagacctgctgaagcggtttgggatgaaggacgccaagcccgcaaagacgccgatggggaccgacggacacaccgacctcaacaaaggaggtaagtccgttgatcaaaaggcataccggtcaatgatagggtcattactttacttatgtgctagtagaccggatattatgcttagcgtatgcatgtgtgctagatttcaatccgatcctaaggagtgtcacttagtggcagtgaagcgaatccttagatatttagttgctacgccttgcttcgggctctggtatccaaaggggtctacctttgacttgattggatattcagactccgattatgctggatgtaaggtcgataggaagagtacatcggggacgtgccaattcttaggaaggtccctggtgtcatggaactctaagaaacaaacttccgttgccctatccaccgctgaggccgagtatgttgccgcaggacagtgttgcgcgcaactactttggatgaggcaaaccctcagggactttggctacaatctgagcaaagtcccactcctatgtgataatgagagtgctatccgcatggcggaaaatcctgttgagcacagccgcacaaagcacatagacatccggcatcactttttgagagaccaccagcaaaagggagatatcgaagtgtttcatgttagcaccgagaaccagctagccgatatctttaccaagcctctagatgagaagatgtag

SEQ ID NO: 4677 - DNA, 4668 bp, Zea mays
  Clone ID: TF_ZM4879.C4.o2.fg
atggatcctaaggggaagggaatcgtgatcaacgacaaggagaaggagtccttcgtcaacgagcccaaagatgacaagcctaccgactccggctcgggtcatagacgaaaggaagggaagaagaagaagacaaggcgcatcaaggagatcgtctactacgacgacagcgatgagtctacttcttcccaaaaggacgacgacaacgactacaggaagacggtcaattcgaacttttcatttgattattctcgtattccacatagttcgaattcgcatttgctttccattcctcttggcaaacctccacacttcgatggggaggactacggattttggagtcacaaaatgcgtagtcacttattctctctccatccaagcatatgggagattatagagaatggaatgaaatttgatagctcggatagccctatgcttataaatgaacaaatccatagaaatgcacaagctactactgttctcttagcatctttgtgcagggaagagtacaataaggtgagcggcttggacaatgccaagcagatatgggacaccctcaagatctctcacgagggcaacgacgtcaccatgctcaccaagatggaattggtggagggcgaacttgggagattcgctatgataaggggggaggagccaacccaaacatacaaccggctcaagacccttgtcaacaagataaggagctatggaagcacgcgatggacggatcacgacgtcgtccgcctaatgctaaggtccttcaccgttcttgatcctcatctcgtaaacaatattcgtgagaatcccaggtacacgacgatgacgcccgaggaggtactcggaaaattcgtaagcaggcggatgatgatcaaggaggcgagatacgtcgacgacgcgttgaacggtccaatccacgagcctcaacccattgctctcaaggcaacgaggagcaaggaagcgctaccaagcaaggtggcgcaagttgaggtggccgggctaaataatgaggagatggccctcatcattaagcgcttcaagacggcgcttaaaggtcgcaagggacagccaagcaagaccaagactaaggagaagcgctcgtgcttcaaatgtggtaagattggtcatttcattgctaactgtcccgataatgaaagtgaccaggaaaaggggaacaaaagggagaagaagaagcattacaagaaggccaagggcgaggcacatatcggaaaggagtgggattcagattgctcctcctccgactccgacaatgaaggactcgccgccaccgccttcaacaagtcatccctcttccccaacgagcgtcacacttgcctcatggcaagggagaagaaagtaagcactcatgatactagtacttatgcttcttcaaaacatgttacaatctgtaggaggtgtaaagatttcgatgttgatgcttgtagtgatcatttagtttcaatttccaaattaaatgaggaattggctagtcttaatgcccaacttaagactagcaagaatgaatttgataagctgaaatttgcaagggatgcctacacgattggtagacacccctcaattaaggatggacttggctacaagagggaagccaaggacttgacaagccataaggctcctatctccgccaaggagaaagggaaggctcctatggctagtagtactaaaaggaaccatgcttttatgtatcatgataagagacaaactagaaatgcttataggagttataatgcttatgatgattttgactctcatgccatgtttgcttctagttcttcctatatgcatggtagaaatatgtctaggagaaatgctattcatcatgtgcctagaaagaatattattcatgctcctaggaaagtagtgaatgaaccttctacaatttattgtgctttaaatgcttcctttgctatttgtagaaaggataggaaaatagttgctaggaagttaggggcaaaatgcaagggagacaaaacttgcatttgggtccctaaggatatttgcactaaccttgtaggacccaacaagagttgggtttatgcatccgggggctcaagctggattatcgacagcggatgcacaaaccatatgacgggggagaagaagatgttcacctcctacgtcaagaataaggattcccaagattcaataatattcggtgatgggaaccaaggcaaggataagtctgaaacccaagggaccctcaagcgcttcctcaggagagctcaaaatgagtttgagctcaaggtgaagaagataaggagcgacaacgggtccgagttcaagaaccttcaagtggaggagttccttgaggaggaagggatcaagcacgagttctccgctccctacacaccacaacaaaatggtgtggtagagaggaagaacagggcgctaatcgatatggcgaggacgatgcttggagaattcaagacccccgagcgtttttggtcggaagccgtaaacacggcttgccacgccatcaacagggtctaccttcatcgcctcctcaagaagacttcatatgagctgctaaccggtaacaaacccaatgtatcttacttttgtgtatttgggagcaaatgctacattctagtgaagaagggtagaaattctaagtttgctcccaaagctgtagaagggtttttattaggttatgactcaaatacaaaggcgtatagagtcttcaacaaatcatcgggtttggttgaagtctctagcgacgttgtatttgatgagactaatggctctccaagagagcaagttgttgatcttgatgatgtagatgaagaagatgttccgacggccgctatacgaaccatggcgattggagaagttcggccacaggaacaagatgaacgagatcaaccttcttcctcaactatggtgcatcccccaactcaagacgatgaacatgttcatcaacaggaggcgtgtgatcaagggggagcacaagatgatcacgtgatggaggaagaagcgcaaccggcacctccaacccaagttcgagcggtgattcaaagggatcatcccgtcgaccaaattttgggtgacattagcaagggagtaactactcgatctcgattagttaatttttgtgagcattactcctttgtctcttctattgagcctttcagggtagaggaggccttgctagatccggattgggtattggccatgcaggaggaactcaacaacttcaagcgcaatgaagtttggacactggtgcctcgtcccaagcaaaatgttgtgggaaccaagtgggtgttccgcaacaaacaggacgagcacggggtggtgacgaggaacaaggctcgacttgtggcaaaaggttatgcccaagtcgcacgtttggactttgaggagatgtttgctcctgtggctaggctagaatcaatccgtatcttgctagcatatgccgctcaccattctttcaggttgtaccaaatggatgtgaagagcgccttcctcaacgggccaatcaaggaggaggtgtacgtggagcaaccccctggctttgaggatgaacggtaccccgaccatgtgtgtaagctctctaaggcactctatggacttaagcaagccccaagagcatggtatgaatgccttagagacttcttaattgctaatgctttcaaggttgggaaggccgatccaactcttttcactaagacttgtgacggtgatctttttgtgtgccaaatttatgtcgatgacataatatttggttctactaataaaaagtcttgtgaagagtttagcagggtgatgacgcagaaattcgagatgtcaatgatgggcgagttgaactacttccttgggttccaagtgaagcaactcaaggatggcaccttcatctctcaaacgaagtacacgcaagacttgctaaagtggtttggaatgaaggacaccaagcccgcaaagactccgatgggaaccgacggacacaccgacctcaacaaaggaggtaagtccgttgatcaaaaagcataccggtcaatgataggatcgttactttacttatgtgctagtagaccggatattatgcttagcgtatgcatgtgtgctagatttcaatccgatcctaaggagtgtcactcagtggcagtgaagcgaatccttagatatttagttgctacgccttgcttcgggctctggtatccaaaggggtctacctttgacttgattggatattcagactccgactatgctggatgtaaggtcgataggaagagtacatcggggacgtgccaattcttaggaaggtccctggtgtcatggaactctaagaaacaaacttctgttgccctatccaccgctgaggccgagtatgttgtcgcaggacagtgttgcgcgcaactactttggatgaggcaaaccctcagggactttggctacaatctgagcaaagtcccactcctatgtgataatgagagtgctatccgcatggcggaaaatcctgttgagcacagccgcacaaagcacatagacatccggcatcactttctgagagaccaccagcaaaagggagatatcgaagtgtttcatgttagcaccgagaaccagctagccgatatctttaccaagcctctagacgagaagaccttttgcaggctgcgtagtgagctaaatgtcttagattcgcggaacttggattga

SEQ ID NO: 4678 - DNA, 1873 bp, Zea mays
  Clone ID: TF_ZM4884.C14.o1.fg
atggatcctaaggggaagggaatcgtgatcaacgacaaggaaaaggagtccttcgtcaacgagccaaaagatgacaaatccaatgactctggctcgggccacaagcacaaagatgggaagaagaagaagacaaggcgcatcaaggagatcgtctactacgacagcgacgaatcctcttcttctcaaaaggacgacgacaacgactacaggaagacggtcaattcgaacttttcatttgattattctcgtattccacatagttcgaattcgcatttgctttccattcctctcggcaaacctccacactttgatggggaggactacggattttggagtcacaaaatgcgtagtcatttattctctctccatccaagcatatgggagatcgtagagaatggaatgaaatttgatagctcggatagccctatgtttattaatgaacaaattcataaaaatgcacaagctactactgtgttgctagcctctttgtgcagggacgagtacaataaggtgagctgcttggacaatgccaagcagatatgggacaccctcaagatttctcacgaggggaacgacatcaccatgctcaccaaaatggagttggtggagggcgagcttggaaggtttgcaatgataaggggcgaggagccaacccaaacatacaaccggctcaagacccttatcaacaaaataaggagctacggaagcacgcgatggacggatcacgacggcgtccgcctaatgctaaggtcattcaccgttcttgatccttatctcgtgaacaatattcgtgagaatcccaggtacacgaagatgacgcccgaggaggtactcggaaaattcgtaagcgggcggatgatgatcaaggaggcaagatacgtggacgacgccttaaatggaccgatcaacgagcatcaaccccttgctctcaaggcaacaagaagcaaggaggcgctacctagcaaggtggcacaaattgaggcggccggacttaatgatgaagagatggctctcatcatcaaacgcttcaagacggtgctaaaaggtcacaaggggcagccaagcaagaccaagacaaaggggaagcgctcatgcttcaagtgcggtaagattggtcattttatcgctaactgccccgataacgatagtgaccaggaacaggggaacaagagggaaaagaagaagaattacaagaaggccaagggcgaggcacacatcggaaaggagtgggattcggattgctcctccgactccgacaatgaaggactcgccgccaccgccttcaacaagtcatccctcttccccaacgagcgtcacacatgccttatggcaagggagaagaaggtgagtactcgagactccacttatgcttcttctagtgataatgagtctagtgatgatgatgacatagactattcatgcttattcaagggcttagatagatctaagatagacaaaataaatgaattgattgatgccttgaatgataagaatgtgcttttagaaaggcaagaggatttgttgtatgaagaacatgacaagtttgtagaagcacaaaaatcacttgcattagagattaagagaaatgaaatgctttcttgtgaattgtctacatgtcatgattcaattgctagtttaaagagcataaatgatgatttaaatactaaactagaaaaatctagtaaatcaacatcttgtgtagaacatgttgagatttgcactaggtgtaaagatttcgatgttgatgcctgtagcgatcatttagtttcaatttccaaactaactgaggaattggctagtcttaatgcccaacttaagactagcaagaatgaatttgataaactaaaatttgcaagggatgcctacacgatcg

SEQ ID NO: 4679 - DNA, 4929 bp, Zea mays
  Clone ID: TF_ZM4892.C2.o7.fg
atggatcctaaggggaagggaattgtgatcaacgacaaggagaaggagtccttcgtcaatgagccaagggatgacaagtccaacaactcgggctcgggccacaagcgaaaagatgggaagaagaagaagacaagacgcatcaaggagatcgtctactacgacagcgatgagtcctcttcttcccaaaaggacgacgacaacgactacaggaagacggtcaattcgaacttctcatttgattattcgcgtattccacatagttcgaattcgcatttgctttccattcctcttggcaaacctccacactttgatggggaggactacggattttggagtcacaaaatgcgtagtcacttattctctctccatccaagcatatgggagatagtagagaatggaatgaaatttgatagctcggatagccctatgcttataaatgaacaaattcatagaaatgcacaagctactactgttctcttagcatctttgtgcagggaagagtacaataaggtgagcggcttggacaatgccaagcagatatgggacaccctcaagatctctcacgaggggaacgacatcaccatgctcaccaagatggagttggtggagggcgagcttggacgattcgccatgataaggggagaagagccaactcaaacttacaaccggctcaagacccttatcaacaaaataaggagctacggaagcacgcgttggacggatcacgacgtcgtccgcctaatgctcaggtcctttaccgttcttgatcctcatctcgtgaacaatattcgtgagaatcccaggtacacgatgatgacgcccgaggaagtacttggaaaattcgtgagcgggcggatgatgatcaaggaggcaagatacgtcgacgacgcgttgaacggtccactccacgagcctcaacccattgctctaaaggcaacaaggaacaaggagtcgctacctagcaaggtggcgcaagttgaggcggccgggctcaatgatgaagagatggctctcatcatcaagagattcaagacggtgctgaagggtcacaaggggcagccaagcaagaacaagacaaaggggaaacgctcatgcttcaagtgcggtaagattggtcattttatcgctaactgccccgataacgatagtgaccaggaacagggaaacaagagggaaaagaagaagaattacaagaaggccaagggcgaggcgcatctaggcaaggagtgggattcggattgctcctcctccgactccgacaatgagggactcgccgccactgccttcaacaaatcggccctcttccccaacgagcatcacacttgcctcatggcaagggaaaagaagactagcaaaagtgattttgaaaaactaaaatttgctagggatgcctacacggttggtagacacccctcaattaaggatgggcttggcttcaagagggaagccaagaacttaacaagccataaggctcccattcccgccaaggagaaagggaaggcccctatggctagtagtgcaaaaaggaaccatgcctttatgtatcatgataggagacatgctagaaatgcttgtaatgattttgattcatatgtttatgattctcatgccatgtttgctcctagttcttcatatgtgtatgatagaaatgttactaggagaaatgttgttcctaaaaagaatgttattcatgctcctaggaaagtagcaaatgaaccttctaccatttattatacttgcaatgctccctttgctatttgtagaaaggacaagaaggtttatgcatccgggggttcaagctggattatcgacagcggatgcacaaaccatatgacgggggagaagaagatgttcacctcctacgtcaagaataaagattcccaagattcaattatattcggtgatgggaatcaaggcaaggtaaaaggtttagtagagtctcttggatataacttgctatctgttagtcaattatgcaatatggggtataactgtctattcacaaatatagatgtgtctgtctttagaaggtgtgatggttcactagcatttaagggtgtattagacggcaaactttacttagttgattttgcaaaagaggaggccggtctagatgcatgcttaattgctaagactagcatgggctggctgtggcatcgccgcttagcacatgtggggatgaagaaccttcacaagcttctaaagggagaacatgtaataggtctaactaatgttcaattcgaaaaagatagaccttgtgcagcttgtcaagcagggaaacaagtgggaggctctcatcacaccaaaaatgtgatgacgacatcaagacccttggagatgctgcatatggacctcttcggacccgtcgcctatctgagcataggaggaagtaagtatggtctagttattgtagatgatttttcccgcttcacttgggtgttctttttgcaggaaaaatccgaaacccaagggaccctcaaacgcttcctcaggagagctcaaaatgagtttgagctcaaagtgaagaagataaggagcgacaacgggtccgagttcaagaaccttcaagtggaggagttccttgaagaggaagggatcaagcacgagttctccgctccctacacaccacagcaaaatggtgtggtagagaggaagaacaggacgctcatcgacatggcgaggacgatgctaggagagttcaagacccctgagtgcttttggacggaagccgtgaacacggcttgccacgccatcaacagggtctaccttcatcgcatcctcaagaatacgtcgtatgagctactaaccggtaacaaacccaatgtatcgtactttcgtgtatttgggagtaagtgctacattctagtaaagaagggtagaaattctaagtttgctcccaaagctgtagaagggtttttattaggttatgactcaaatacaaaggcgtatagagtcttcaacaaatcatcgggtttggttgaagtctctggcgacgttgtatttgatgagactaatggctctccaagagagcaagtggttgattgtgatgatgtagatgaagaagacattccaacggccgcaatacgcaccatggcaattggagaagtgcggccacaggaacaagatgaacgagaacaaccttctccctcaactatggtgcatcccccaactcaagacgatgaacaggttcatcaacaggaggtgtgtgatcaagggggagcacaagatgatcatgtgttggaggaagaagcgcaaccggcacctccaacccaagttcgtgcgatgattcaaagagatcatcccgtcgaccaaattttgggtgacatcagcaagggagtaactactcgatctcgattagttaatttttgtgagcattactcctttgtctcttctattgagcctttcagggtagaagaggccttgctagatccggactgggtgttggccatgcaagaggagctcaacaacttcaagaggaatgaagtttggacactggtgcctcgtcccaagcagaatgttgtgggaaccaagtgggtgttccgcaacaaacaggacgagcgcggggtggtaacgagaaacaaggctcgacttgtggcaaaaggttatgcccaagtcgcaggtttggatttcgaggagacttttgctcctgtggctaggctagaatcaattcgtatcttgctagcatatgccgctcaccattctttcaggttgtaccaaatggatgtgaagagcgctttcctcaacgggcctataaaggaggaggtgtacgtagagcaaccccctggcttcgaggatgaacggtaccccgaccacgtgtgtaagctctctaaggcgctctatggacttaagcaagccccaagagcatggtatgaatgccttagagatttcttaattgctaatgcgttcaaggttgggaaagccgatccaactcttttcactaagacatgtgatggtgatttgtttgtgtgccaaatttatgtcgatgacataatatttggttctactaatcaaaagtcttgtgaagagtttagcagggtgatgacgcagaaattcgagatgtcgatgatgggcgagttgaactacttccttgggttccaagtgaagcaactcaaggacggcactttcatctcccaaacgaagtatacgcaagatctgctaaagcggtttgggatgaaggacgccaagcccgcaaagactccgatgggaaccgacggacacaccgacctcaacaaaggaggtaagtccgttgatcaaaaagcataccggtcaatgatagggtctttactttatttatgtgctagtagaccggatattatgcttagcgtatgcatgtgtgctagatttcaatccgatcctaaggagtgtcacttagtggcggtgaagcggattcttagatatttggttgctacgccttgcttcgggctctggtatccaaaggggtctacctttgacttggttggatactcagactccgactatgctggatgtaaggtcgataggaagagtacatcggggacgtgccaattcttaggaaggtccctggtgtcgtggaactctaagaaacaaacttctgttgccctatccaccgctgaggccgagtatgttgccgcaggacagtgttgcgcgcaactactttggatgaggcaaaccctcagggactttggctacaatctgagcaaagtcccactcctatgtgataatgagagtgctatccgtatggcggaaaatcctgttgagcacagccgcacaaagcacatagacatccggcatcactttttgagagaccaccagcaaaagggagatatcgaagtgtttcatgttagcaccgagaaccagctagccgatatctttaccaagcctctagatgagaagaccttttgcaggctgcgtagtgagctaaatgtcttagattcgcggaacttggattga

SEQ ID NO: 4680 - DNA, 1999 bp, Zea mays
  Clone ID: TF_ZM4893.C6.o7.fg
atggatcctaaagggaagggaatcgtgatcaacgacaaggagaaggagtccttcgtcaacgagccaagggatgacaagtccaacgactcgggctcgggccacagacgcaaagatgggaagaagaagaagacaagacgcatcaaggagatcgtctactacgacagcgatgagtctacttcctcccaaaaggacgacgaccacaacgaatacgagagaaagaaaccggtcaattcgaacttttcttttgattactctcgtattcctcaaagtactaatgctcatttattatctattccacttggtaaacctcctcattttgatggagaggactacggattttggagtcacaaaatgtgtagtcacttgttctctctccatcctagcatatgggagattgtagaaagtggaatgcactttgatagtacggatagtcccatgtttattaatgaacagattcataaaaatgcacaagctactactgtgttgctagcctctttgtgcagggacgagtaccataaggtgagcggcttggacaatgccaagcagatctgggacaccctcaagatctctcatgaggggaatgatgtcaccttgctcaccaagatggagttggtggagggcgagcttggacggttcgcaatgataaggggcgaggagccaactcaaacatacaaccggctcaagacccttatcaacaaaataaggagctacggaagcacgcgatggacggatcacgacgtcgtccgcctaatgctaaggtcctttaccgttcttgatcctcatttggtgaacaatattcgtgaaaatcctaggtacaccaagatgacgcccgaagaagttctggggaagttcgtaagcgggcgaatgatgatcaaggaggcaagatatgtggacgacgcgttgaacggtcctattcatgagcctcaacccattgctctcaaggcaacgaggagcaaggaggcgctgccgagcaaggtggtgcaagttgaggcggccgggctaaataatgaggagatggctctcatcattaagcgcttcaagatggcgcttaagggtcacaaggggcagccaagcaagaccaagacaaaggggaagcgctcatgcttcaagtgcggtaagattggtcattttatcgctaactgccccgataacgatagtgaccaggaacagggaaacaagagggaaaagaagaagaattacaagaaggccaagggcgaggcacatatcggaaaggagtgggattcagattgctcctcctccgactccgacaatgaaggactcgccgccaccgccttcaacaagtcatccctcttccccaacgagcgtcacacttgcctcatggcaagggagaagaaagtaagcactcatgatactagtacttatgcttcttcaagtgaggatgaatctagtgctgaggatgaagtagattattcatgtttgtttaagggcctagatagaaccaaggtagacaaaattaatgaattgattgatgccttgaatgataagaatatgcttttagaaaagcaagaggatttgttgtatgaagaacatgataaatttgtagaagcacaaaaatctcatgctctagaagttaaaagaaatgaaatgctttcttgtgaattatcttcttgccatgagacaatttctaaattaaggagcattaatgatgatttgaatgctaagctagagattgctagtaaatctacctcttgtgtagaaaatgttgtaacgtgtactaggtgtaaagatattaacattgatgcttatagtgaacacctagcttgcatttctaaattaaatgaagaggtagctagtcttagtgcccaacttgagactagcaaaagtgattttgagaaattaaaattcgctagggatgcctacacggttggtagacacccctcaattaaggatgggcttggcttcaagagggaagtcaagaacttaacaagccataaggctcccatctccgccaaagagaaagggaaggcccctatggcta

SEQ ID NO: 4681 - DNA, 4968 bp, Zea mays
  Clone ID: TF_ZM4904.C1.o5.fg
atggatcctaagggaaaggggatagtgatcaatgacaaggaggagtccttcatcaatgagccgaaagacgacaagcccactgactcaggctcaagtcataagaagaaggatgggaagaagaagaggcgcatcaagaagatcgtctactacgacgacagcgacaagtcctcttcttcccaaaaggacaacgacgacaacgactacgagaaaaagaagacggttaactcgaacttttcttttgattactcttgtattccgcatagttcaaatgcacatttgctttccattcctcttggcaaacctccacactttgatggagaggactacagattttggagtcacaaaatgcgtagtcacttgttctctctccatccaagtatatgggagatagtagaaaatggaatgcaatttgatagcacggatagtcccctattcatcaatgagcagattcataaaaatgcacaagctactactgtgttgttagcctcattgtgcaaggatgaataccataaggtgagtggcttggataacgccaagcagatttgggacaccctcaggatctctcatgagggaaatgacgtcaccatgctcaccaagatggagttggtggagggcaaacttgggagattcgcaatgatcaggggggaggagccaacccaaacatacaacaggctcaagaccctcgtcaacaaaataaggagctatggaagcacgcgatggacggaccacgacgtcgtccgcctaatgctaaggtctttcactgtccttgatccacatcttgtaaacaatattcgtgaaaatcctaggtacaccaagatgtcgcccgaagaaatacttggaaagttcgtaagcgggcggatgatgatcaaggaggcaaggtacgtcgatgaggcgttgaatggtccaattcatgagcctcaagccattgctctcaaggcaacaaatagcaaggaggcgctacctagcaaggtggcacaagttgaggcggcggggctcaatgaggaagaaatggccctcatcatcaagcgcttaaagacgacgctaaagggtcgcaaggagcatcccaaaaagaccaagacgaagggaaagcgctcctgcttcaagtgtggtaagattggtcactttattgctaactgtcccgataatgatagtgaccaggaacaaggaaagaatgggaaaagagagaacaagaaggtttacaagaaggctaaaggcgaggcacaccttggaaaggagtgggattcggattgctcttcgtccgactccgacgacgaaggactcgccgccaccgccttcaacaaatcgtctctcttccccaacgagcatcacacctgcctcatggcaaaggagaagaaggtaagcactcgaaatgctattacttatgcctcttctagtgatgatgaatctagtgatgatgaaatagactatgctagtttgttcaagggcttagatagaactaaaatcgataagatcaatgaattgattgatgctttgaatgataagaatagattgttagaaaagcaagaggatcttttgtatgaagaacatgataaatttgtagaggcacaaaaatctcttgctttagaagttaaaaggaatgaaatgctttcttgtgaactatctacttgccatgagaccatttctagtttaaaaagtgttaatgatgatttaaatgctaaactagaagtagcaaatagatctaactcttgtgtagaacatgttgtgatttgcaatagggatgcctatacgatcggtagacacccctcaattaaggatggacttggctttaagagggaagccaagaacttaacaagtcataaggctcccatctccgccaaggagaaagggaaggctcctatgactaatagtagtcaaaagaatcatgctttcatttatggtgataagagatattctagaaatgctcatagaagttgtaatgcttatgattcaaatgtcatgtttgcttcaagttcttccattatgcatgatagaaattttgctaggaaaaatgttgttcatcatatgcctagaagaaatgttgttcatgtacctaggaaagtttatgcatcagggggatcaagctggattatcgaaagcggatgcacaaaccacatgacgggggagaagaagatgttcacctcctacgtcaagaacaaagattcccaagactcaatcatattcggtgacgagaatcaaggcaaggttaaaggactaggaaaaatagcaatttcttccgagcattctatctctaatgtgtttctagttgaatcgcttggatataatttgttgtccattagtcaattatgtaatatgggatataattgcttattcaccaatgtagatgtgtctgtctttagaaggagtgatggttcattagcttttaagggtgcattagacgacaaactctacctagttgattttgcaaaagaggaggccggtctagatgcatgcttaattgctaagactagcatgggctggctgtggcatcgtcgtttagcacatgtggggatgaagaaccttcacaaacttctaaagggtgaacatgttataggtctaacaaatgtaaccttcgaaaaagatagaccttgtgcagcttgtcaagcaggtaaacaggtgggaagctctcatcataccaaaaatgtgatgaccacatcaagacctttggagttgtttcatatggacctcttcggacccgtcgcctatctaagcataagaggaagtaagtatggtcttgttattgttgatgacttttcccgcttcacttgggtattctttttgcaggataaaacagaaacccaagggaccctcaagcgcttcctaaggagagctcaaaatgagtttgagctcaaggtgaagaagataaggagcgacaacgggtccgagttcaaaaaccttcaagtggaggagtaccttgaggaggaaggaatcaagcacgagttctccgctccctacacaccacagcaaaatggtgtggtagagaggaagaaccggatgctcatagacatggcgaggacaatgcttggagaatttaagacgcctgagcggttttggtcggaagctgtgaacacagcttgccacgccataaaccgggtctatctccatcacctcctcaagaagacatcatacgagcttctaaccggtaacaaacccaacgtttcgtattttcgagtttttgggagtaaatgctacactctggtgaagaaaggtagaaattcaaaatttgctcccaaagctgtagaagggtttttgttaggttatgactcaaatacaaaggcgtatagagtcttcaacaaatcatcgggtttggttgaagtctctagcgacgttgtatttgatgagactaatggctctccaagagagcaagttgagcttgatgatgtagatgaggatgatgttccaatggacgcgattcgtaccatggcaattggagacgtacgaccgcaggaacacaaggaacaagatcaaccttcttcctcaacgacggtgcaccccccaacccaagatgatgaacaggtacctcaagaggaggcgtgtgatcaagggggaacacaagatgtccaagttgaagaggaagaagcaccacaggcccctccaactcaagttcgagcgatgattcgaaggaaccatcccgtcgaccagattttgggtgacattatcaagggagtaaccacttgctctagattagttaatttttgtgagcattactcttttgtctcttctattgagcctttcagggtagaagaggctttgctagatccggactgggtgttggccatgcaggaagagctcaacaacttcaagagaaatgaagtttggacattggtgcctcgtcccaagcaaaacattgtgggaaccaagtgggtgttccgcaacaaacaagacgagcacggggtggtgacaaggaacaaggcacgacttgtggcaaaaggttatgcccaagtcacaggtttggactttgaggagacttttgctcctatggctaggctagagtcgattcgtattttgttagcctatgctgctcaccattctttcaggttgtaccaaatggatgttaagagcgctttcctcaacgggccaatcaaggaggaggtgtacgtggagcaaccccctggctttgaggatgaacggtaccccgaccatgtgtgtaagctctctaaggcgctctatggacttaagcaagccccaagagcatggtatgaatgccttagagactttttaattgctaatgctttcaaggttgggaaagccgatccaactcttttcactaagacatgtgatggtgacttatttgtgtgccaaatttatgtcgatgacataatatttggttctactaaccaaaagtcttgtgaagagtttagcagggtgatgactcaaaagttcgaaatgtcgatgatgggcgagttgaactacttccttgggttccaagtgaagcaactcaaggatggcactttcatctcccaaacgaagtacacacaagacttgatcaagcggtttgggatgaaggacgccaagcccgcaaagactccaatgggaactgacggacacgtcgacctcaacaaaggaggtaagttcgttgatcaaaaagtataccggtccatgatagggtctttactttatttatgtgctagtagaccggatattatgcttagtgtatgcatgtgttctagatttcaatccgatccaagggagtgtcacttagtggctgtgaagcgaattcttagatatttagtcgctacgccttgcttcgggatctggtatccaaaggggtctacctttgacttaattggatattcagactccgactatgctggatgtaaggtcgataggaagagtacatcggggacgtgccaattcttaggaaggtccctggtgtcgtggagttctaagaaacaaactttcgttgccctatccaccgctgaggccgagtatgttgccgcaggacagtgttgcgcgcaatactttggatga

SEQ ID NO: 4682 - DNA, 5322 bp, Zea mays
  Clone ID: TF_ZM4904.C1.o7.fg
atggtgatcaacgacaatgagaagtccatcttcaacgagccgagggacgacaaagccaatgactccggctcaagtcaaaagaagaaggatggaaagaagaagaggcgcatcaagaagatcgtctactacgacagcgacgaatcttcctcttctcaaaaggacgacgaatacgaggagaaaaagaaaacggttaactcgaacttttctttcgattattctcgtattccgcaaaattccaatactcatttgctttccattccacttggtaaacctccacactttgatggagaggactacggattttggagtcacaaaatgtgtagccacttgttctctcttcatccaagtatatgggagatagtagaaaatggaatgcagtttgatagttcggataactctatgtttatcaatgaacaaatccataaaaatgcacaagctactactgttcttttagcatcattgtgcagggatgaatatcataaggtgagtggcttggataacgccaagcagatttgggacaccctcaagatctcgcatgaggggaacgacgtcactatgctcaccaagatggagttggtggaaggcaaactaggaaggttcgcaatgatcaggggggaggagccaacccaaacgtacaacaggctcaagaccctggtcaacaaaaaaaggagctacggaagcacgagatggacggaccacgatgtcgtccggcttatgctaaggtccttcactatccttgatcctcatcttgttaactctattcgtgagaatcctaggtacaccaagatgacacccgaggaaatacttggaaagtttgtaagcgggcgaatgatgatcaaggaggcaagatatattgatgaggtgttgaatggcccaatccacgagcctcaaaccgtttctctcaaagcaacaagtagcagggaggcgctacctagcaaggtggcgcaagtcgaggcggtcgggctaaatgaggatgaaatggccctcatcatcaagcgcttcaagacggcgctcaaaggtcgcaaggagcatcccaacaagagcaagacaaagggaaagcgctcctgcttcaagtgtggtaagattggtcactttattgctaactgtcccgataatgatagtgaccaagaacaaggaaagagtgggaagtgggaaaagaagaaggcctacaaaaatgcgaagggcgaggcacaccttggaatagagtgggactcagattgctcctcgtccgactccgacaacgaaggactcgccgcctcggccttcaacaagtcggctcttttccccaacgagcatcacacctgcctcatggcaaaggaaaagaaggtaagtactagaagtactattatgtatgcttcttcaagtgatgatgagtctagtgatgatgaagtagactatgctagcttattcaaaggcttagataaaactaaaattgataagatcaatgaattaattgatgctttgaatgagaaaaatagattgttagagaagcaagaggatcttttatatgaagagcatgataaatttgttagtgcacaaaattctcttgctttagaagttaaaagaaatgaaatgctttcatgtgaattatctacatgccatgaatctatttcgagcttaaagagtattaataatgatttaaatactaagttagaaatagctaataaatcaatctcttgtgtagaccatgttgtgatttgcaataggtgtaaggattttaatgttgatgcttgtagtgaacacctaatttccatttccaaattaaatgatgaagtggctattcttaatgcccaacttaagactagcaagaatgaatttgacaaactaaaatttgcaagggatgcctacactattggtagacacccctctattaaggatgggcttggctttcgaagggaagctaagaacttaacaagtcataaggctcccattttcaacaaggaaaaagggaaggctcctatgactagtaatagtcaaaagaaccatgctttcatgtaccatgataggaaattttctagaaatgttcatcatgataggagttgtaatgtgtatgactcaaatgccatgattgcttcaagttcttcatttgtgcatggtagagatatgcctaggaagaatgttactcatcatatgcctaggacaaatgttgttaatcatatgcctaggaaagtgtataatagacttaccactgtctttcatgcttgcaatactaagtttgttctttcatgtagaaatgaaaaagtaattgctaaaaatgtgggggccaaatgcaagggagacaagacttgcatttgggtccctaaggctattgtaactaaccttgtaggacccaacaagagttgggtttatgcatccgggggctcaagctggattatcgacagcggatgcacaaaccacatgacgggggagaagaagatgttcacctcctacgtcaagaacaaagattcccaagattcaatcatattcggtgacgggaatcaaggcaaggttaaaggactaggaaagattgctatttcatccgagcactccatatctaatgtgtttttagttgagtcgctcgggtataacttgttgtccgttagtcaattatgcaatatgggatacaattgcttattcacgaatgtagatgtgtctgtctttagaaggagtgatggttcattagcttttaagggtgtactagacgacaaactctatttagttgattttgcaaaggaggaggccggtctagatgcatgcttaattgctaagactagcatgggctggctgtggcatcgccgtctagcacatgtggggatgaagaaccttcacaaacttttaaagggagaacatgtgttaggtctaaaaaatgataaatctgaaacccaagggactctcaagcgcttcctaaggagagctcaaaatgaatttgagctcaaggtgaagaagataaggagcgacaacgggtccgagttcaagaaccttcaagtggaggagtaccttgaggaggaaggaatcaagcacgagttctccgctccctacacaccacaacaaaacggtgtggtagagaggaagaacaggacgctcatagacatggcgaggacaatgcttggagagttcaagacgcccgagcggttttggtcggaagccgtgaacacggcttgccacgccataaaccgggtctaccttcatcgcctcctcaagaagacttcgtatgagcttctaaccggtaacaaacccaacgtttcatactttcgtgtatttgggagtaaatgctacattctagtaaagaaaggtaggaattctaaatttgctcccaaggctgtagaagggtttttgttaggttatgactcaaatacaaaggcgtatagagtcttcaacaaatcatcgggtttggttgaagtctctagcgacgttgtatttgatgagactaatggctctccaagagagcaagttgatcctaatgatgtagatgaatatgatgttccaacggacgtaattcacaccatggcgattggagatgtgcgaccacaggaacaccaagagcaagatcaaccttcttcctcaacaatggttcaccccccaattcaagacgatgaacaggttcatcaagaagaggcgtgtgatcaagggggagcacaagatgatcatgttatagaggaagaagcacctcaagcccctccaacccaagttcgagcgacaattcaaaggaagcatcccgtcgaccaaatattgggtgatataagcaagggagtaactactcgctctagattagttaatttttgtgagcattactcttttgtctcttctattgagcctttcagggtagaagaggccttgctagatccggactgggtgttggccatgcaggaagagctcaacaacttcaagcgaagtgaagtttggacactggtgcctcgtcccaagcaaaacgttgtgggaaccaagtgggtgttccgcaacaaacaagacgagcacggggtggtgacaagaaacaaggcacgacttgtggcaaaaggttatgcccaagtcgcaggtttggactttgaggagatttttgctcctgtagctaggctagagtccattcgcattttgttagcctatgccgctcaccattctttcaggttgttccaaatggatgtgaagagcgctttcctcaacgggccaatcaaggaggaggtgtacgtagagcaaccccctggctttgaggatgaacggtaccccgaccacgtgtgtaagctctctaaggcgctctatggacttaagcaagccccaagagcatggtatgaatgtcttagagactttctaattgtaaatgctttcaaggttgggaaagccgatccaactttattcactaagacttgtgatggtgacttatttgtatgccaaatttatgtcgatgacataatatttggttctactaaccaaaagtcttgtgaagagtttagcagggtgatgactcaaaagtttgagatgtcgatgatgggcgagttgaactacttccttgggttccaagtgaagcaactcaaggacggcaccttcatctcccaaacgaagtacacgcaagacttgatcaagcggtttgggatgaaggacgccaagcccgcaaagactcccatgggaaccgacggacatgttgacctcaacaaaggaggtaagtccgttgataaaaaggcatgccggtctatgataggttccttgctttacttatgtgctagtagaccggatattatgctaagcgtatgcatgtgtgctagatttcaatccaacccaagggagtgtcaccttgtggccattaagcgaatccttcgatatttagttgctacgccttgcttcgagatctggtatccaaaggggtcaacctttgacttaattggatactcagactccgattatgctggatgcaaggttgaaaggaagagtacatcagggacgtgccaattcttaggaaggtccctggtgtcttggagttctaagaaacaaacttctgttgccctatccaccgctgaggccgaatatgttgccgcaggacagtgttgcgcgcaactactttggatgaggcaaaccctcagggactttggctacaatctgagcaaagtcccactcctatgtgataatgagagtgcaatccgcatggcggataatcctgttgaacacagccgcactaagcacatagacatccgacatcactttttgagagaccaccagcaaaagggagatatcgaagtgttttatgtaagcaccgagaaccagctagtcgatatctttaccaagcctctagatgagtcaaccttttgcaggctgcgtagtgagctaaatgtcttagattcgcggaacttggattga

SEQ ID NO: 4683 - DNA, 3996 bp, Zea mays
  Clone ID: TF_ZM4940.C1.o6.fg
atgaatcctcttcttcccaaaaaagacgacggcaacgtctacgagaataagaagacggttaattcaaacttctcttttgattattctcatattcctcaaagtaccaatgctcatttactctccattccacttggtaaacctcctcattttgatggagaggactacagattttggagtcacaaaatgagtagtcacttgttctctctccatcctagtatatgggagatagtagagagtgaaatgaaatttgatagctcagatagtcctttgtttatcaatgaacagattcataaaaatgcacaagctactactgtgttgttagcctcattgtgcagggacgagtatcataaggtgagcggcttggacaatgccaagcagatctgggacaccctcaagatcttacatgaggggaacgacgtcaccatgctcaccaagatggagttggtggaaggcgaactcgggagattcgcgatgataagaggggaggagccaacccagacgtacaacaggctcaaaaccctcgtcaacaagataaggagctatggaagcacgcgatggacggaccacgacgttgtccgcctaatgctaaggtcctttaccgtccttgatccacatcttgtgaacaatattcgtgagaatcctaggtacacgaagatgacgcccgaggagatccttggaaagttcgtaagcgggcggatgatgataaaggaggctagatacgtcgatgatgcattaaatggtccaatccaagagcctcaaaccattgctctcaaggcaacaaggagcaaggaggcactacctagcaaggtggcgcaagttgaggcggccgggcttaatgatgaagagatggccctcatcatcaagcggttcaagatggcgctaaagggtcgcaaggagcaccccaacaagaacaagacgaaggggaagcgctcctgcttcaaatgtggtaagattggtcattttatcgctaactgtcccgataatgatagtgaccaggaaaagaagagtggaaagtgggaaaagatgaagaactacaagaaggcgaagggtgaggcacatcttggaaatgagtgggattcggattgctcctcgtccgactccgacaacgaaggactcgccgccaccgccttcaacaagtcatcgctcttccccaacgagtatcacacttgcctcatggcaagggaaaagaaggtaaacactcgtaatactagtacttatgcttcttcaagtgaggatgagtctagtgatgatgatgaaatagattattcatgtttattcaagggcctagatagaaccaaggttgataaaattaatgaattaattgatgccttgaatgataagaataggttattagaaaagcaagaggatcttttgtatgaagagcatgataaatttgttagtgcacaaaattctcttgctctagaagttaaaaggaatgaaatgctttcttgtgaactatctacttgtcatgaaaccatttctactttaaaagatgttaatgatgatttaaatgctaaactagaagtagcaaataaatccaactcttgtgtagaacatgttatgatatgcaataggtgcaaagatgttgatgttgatgcttgtagtgaacacctaatttgcatttctaaattaaatgatgaagtggctagtcttaatgcccaacttaagactagcaagagtgaatttgagaagctaaaatttgcaagggatgcctacacaattggtagacacccctcaattaaggatggtcttggcatcaagaaggaagtcaagaacttaacaagccataaggctcccatctccgccaaggagaaagggaaggcccctatggctagaagtgctcaaaagaaccatgccttcatgtatcatgataggagacattctagaaatgtttatagaagttatgatgcttttgattctcatgctatggttgcttctagttcttctattgtgcatgatagaaatttagctaggagaaatgctattaatcacatgcctagaagaaatgttgttcatgtgcccaggaaaacaaatagtgaaccttctacaatttaccatgctttaaatgcttcctttgctatttgtagaaaggataggaagataattactagaaaattaggggcaaaatgcaagggagataaaacttgcatttgggtccctaagactatttgtactaaccttgtaggacccaacatgagttggtacctaagacccaagcctaaatttgccttgcaggtttatgcatccgggggctctagctggattatcgacagcggatgcacaaaccacatgacgggggaaaagaggatgttctcttcctacgtcaagaacaaggatccccaagattcaatcatattcggtgatgggaaccaaggcaagattaaaggcttaggcaagattgcaatctcaaatgagcactctatttctaatgtattcttagttgagtcgcttggatataatttgttatccgtaagtcaattatgtaatatgggatataattgtctattcaccaatgtagatgtgtctgtctttagaagaagtgatggttcattagcttttaagggtgtattagacgacaaactctatttagttgattttgcaaaggaggaggccggtctagatgcatgcttaattgctaagactagcatgggctggctgtggcatcgccgcttagcacatgtggggatgaagaaccttcacaagcttctaaagggagaacacgtgattggtctaactaatgttactttcgaaaaagatagaccttgtgcagcttgtcaagcagggaaacaggtgggaagcactcatcatgcaaaaaatgtgatgactacatcaagacccctggagttacttcatatggatctcttcggacccgtcgcctatctaagcataggaggaagtaagtatggtcttgttatagttgatgatttttcccgcttcacttgggtattctttttgcaggataaatctgaaacccaagggaccctcaagcgcttcctaaggagagctcaaaacgagtttgagatcaaggtgaagaagataagaaacgacaatgggtccgagttcaagaatcttcaagtggaggagtatcttgaggaggaaggaatcaagcacaagttctccgctccctacacaccacaacaaaatggtgtggtagagaggaagaacaggacgcttatagacatggcgaggacgatgcttggagagttcaagacccccgagcgcttttggtcggaagccgtgaacacagcttgccacgccatcaaccgggtctaccttcatcgcctcctcaagaagacttcgtatgagctactaaccggtaacaaacccaatgtttcgtattttcgagtttttgggagtaaatgctacattctagtgaagaagggtaggaattccaaatttgctcccaaagccgtagaagggtttttgttaggttatgtctcaaatacaaaggcgtatagggtcttcaacaaatcatcgggtttggttgaagtctctagcgacgttgtatttgatgagactaatggctctccaagagagcaagttgttgatcttgatgatgtagatgaagaagacgttctaatggccgcaatgcgcaccatggtgattggagatgtaaggccaatggaacaaaaggagcaagatcaaccctcttcctcaacaatggtgcatcccccaactcaagaagatgaacaggttcatcaagaggaggcgtgggatcaagggggagcacaagatgatcaagtaatggaggaagaagcacaaccggcacctccaactcaagtccgagcgatgattcaaagggatcatctcgtcgaccaaattttgggtgacattagcaagggagtaactactcgatctcgattagttaatttttgtgagcattactcttttgtctcttctattgagcctttcagggtagaggaggccttgctagatccggactgggtgttggccatgcaagaggagctcaataacttcaagagaaatgaagtttaa

SEQ ID NO: 4684 - DNA, 4752 bp, Zea mays
  Clone ID: TF_ZM4940.C2.o17.fg
atggatcctaagggaaaggggattgtgatcaatgataaggagaaggagtccttcgtcaacaagccaaaagatgacaagcctaccgactcgggctcgggtcacaaacgaagagatgggaagaagaagaagacgaggcgcatcaaggagattgtctactacgacgacagtgacgagtccacttcttctcaaaaggacaacgacgacaacgactacgacaaaagaaagacagttaattcaaacttttctttcgactactctcgtattccgcaaagtacaattactcatttgctctccattccacttggcaaacctcctcactttgatggagaggactacggattctggagtcacaaaatgtgtagtcacttgttctctctccatccaagcatatgggagatagtagagagtggaatgaaatttgatagtaatgatagtcccatgttcattaacgagcaaattcataaaaatgcacaagctactactgttcttctagcttcattgtgcagggacgaataccataaggtgagtggcttggataatgccaagcagatctgggacaccctcaagatctcacatgaggggaacgacgtcaccatgctcaccaagatggaattggtggaaggcgaactcaggagattcgcgatgataagcggggaggagccaacccaaacatacaacaggctcaagaccctcatcaacaagataaggagctatggaagcacacgatggatggaccacgacgtcgtccgcctaatgctaaggtcctttaccgtccttgatccacatcttgtgaacaatattcgtgagaatcctaggtacacgaagatgacgcccgaggagatccttggaaagttcgtaagcgggcggatgatgatcaaggaggcgagatacgtggacgacacgttgaacggtccaatccatgagcctcaacccattgctctcaaggcaacaaggagcaaggaggcgctacctagcaaggtagcacaagttgaggcggccgggcttaatgatgaagaggtggcccttatcatcaagcggttcaagacgacgctaaaggttcgcaaggagcatcccaacaagaacaagacgaaggggaagcgctcctgcttcaaatgtggtaagattggtcattttatagctaattgtcctgataatgatagtgaccaggaaaagaagagtggaaaatgggaaaagaagaagaattacaagaaggcgaagggcgaggcacatcttggaaaggagtgggattcggattgctcctcgtccgactccgacaatgaaggactcgcagccaccgccttcaacaagtcatcactcttccccaacgagcatcacagatgcctcatggcaaaggagaagaaggtatgtactcgaaacaatactacttatgcttcttcaagcgaggatgagtctagtgatgatgatgaaatagattattcatgcttgttcaaaggcttagatagaactaagatcgataagattaatgaattgattgatgctttgaatgacaagaataggttattagaaaagcaagaggatttgttgtatgaagaacatgataaatttgtaggggcacaaaaatctcatgctttagaagttaaacgaaatgaaatgcttgcttgtgaactatctacttgccatgagacaatttctagcttaaggagcataaatgatgatttgaaagctaagtcagaaatagctagtaaatcaacatcttgtgtagaaaatgttgtaacttgcaataggtgtaaagattttgatattgatgcttgtagcaaacacctagcttcaatgtctaaattaaacgatgaagtggctagtcttaatgcacaacttaagactagcaaaagtgaatttgataaacacccctcaattaaggatggacttggcttcaagagggaagccaagaacttaacaagccataaggctcccatctccgcaaaggagaaagggaaggcccctatggctattagtgctaaaaagaaccatgctttcatgtatcatgataggagatattctagaaatgcctatagaagttatgatacttatgactcatatgctatgactgcttctagttcccatgttgtgcatgatagagatatacctaggagaaatgttgttcctaggaaaattaatgaaccttctacaatatatcatgcttgcaatgattcctttgctatttgtagaaaggataagaaagtttatgcatctgggggttcaagctggattatcgacagcggatgcacaaaccacatgacgggggagaagaagatgttcacctcctacgtcaagaacaagggtccccaagattcaatcatattcggtgatgggaaccaaggcaaggtgaaaggcttagtcaagattgcaatctcaaatgaacactctatttctaatgtgtttttagttgattcacttggatataatttgctatctgttagtcaattatgtaatatgggatataattgcctattcacaaatgtagatgtgtctgtctttagaagaagtgatggttcattagcttttaagggtgtattagacggcaaactctatttagttgattttgcaaaagaggaggtcggtctagatgcatgcttaattgctaagactagcatgggctggctgtggcatcgccgcttagcacatgtgggaatgaagaaccttcacaagcttctaaagggagaacacgtgataggtctaacaaatgttactttcgaaaaagatagaccttgtgcagcttgtcaagcagggaaacaggtgggaagctctcatcatgccaagaatgtgatgacaacatcaagacccctggagttacttcatatggacctcttcggacccgtcgcctatctaagcataggaggaagtaagtatggtcttgttatagttgatgatttttcccgcttcacttgggtattctttttgcaggataaatctgaaacccaagggaccctaaagcgcttcctaaggagagctcaaaacgagtttgagctcaaggtgaagaagataaggagcgacaatgggtccgaattcaagaaccttcaagtggaggagtatcttgaggaggaaggaatcaagcatgagttctccgctccctacacaccacaacaaaatggtgtggtagagaggaagaacaggacgcttatagacatggcgaggacgatgcttggagagttcaagacccccgagcgcttttggtcggaagccgtgaacacggcttgccacgccatcaacagggtctacctgcatcgcctcctcaagaagacgtcgtatgagctactaaccggtaacaaacccaatgtttcgtattttcgagtttttgggagtaaatgctacattctagtgaagaagggtagaaattccaaatttgctcccaaagccgtagaagggtttttgttaggttatgactcaaatacaaaggcgtatagagtcttcaacaaatcatcgggtttggttgaagtctctagcgacgttgtatttgatgagactaatggctctccaagagagcaagttgttgattttgatgatgtagatgaagaagaagttccaacggccgcaatacgcaccatggcgattggagatgtgcagccacaggaacaagatgagcgagatcaaccttcttcctcaacaaaggtgcaacccccaactcaagatgatgaacaggaggcgtgtgatcaagggggagcacaagatgatcatgtaatggaggaagaagcgcagccggcaccttcaacccaagttcgagcaatgattcaaagggatcatcccgtcgaccaaattttgggtgatattagcaagggagtaactactcgatctcgattagttaatttttgtgagcattactcctttgtctcttctattgagcctttcagggtagaagaggccttgctagaaccggactgggtgttggtcatgcaggaggagctcaacaacttcaaaagaaatgaagtttggacactggtgcctcgtcccaagcaaaatgttgtgggaaccaagttgttccaaatggatgtaaagagcgctttcctcaacgggccaatcaaggaggaggtgtacgtggagcaacccccgagcttcgaggatgaacggtaccccgaccacgtgtgtaagctctctaaggcgctctatggacttaagcaagccccaagagcatgggtgatgactcaaaagttcgagatctcgatgatgggcgagttaagctacttccttgggttccaagtgaagcaactcaaggatgggaccttcatctcccaaacgaagtacacacaagatttgatcaagaggtttgggatgaaggacgccaagcccgcaaagactccaatgggaaccgacagacacaccgacctcaacaaaggaggtaagtctgttgatcaaaaagcataccaatctatgatagggtctttactttatttatgtgctagtagaccggatattatgcttagtgtatgcatgtgtgctagatttcaatccgatcctaaggagtgtcacttagtggctgtgaagcgaattcttagatatttagtcgctacgccttgtttcgggatctggtatccaaaggggtctacctttgacttgattggatattcagactccgactatgctggatgtaaggtcgataggaagagtacatcggggacatgccaattcttaggaaggtccttggtgtcatggagttctaagaaacaaacttccgttgccctatccaccgcagaggccgagtacgttgccgcaggacagtgttgcgcgcaactactttag

SEQ ID NO: 4685 - DNA, 4803 bp, Zea mays
  Clone ID: TF_ZM4944.C4.o5.fg
atggatcctaaggggaagggaatcgtgatcaacgacaaggaaaaggagtccttcgtcaacgagccaaaagatgacaaatccaacgactccggctcgggccacagacgtaaagatgggaagaagaagaagacaagacgtatcaaggagatcgtctactacgacagcgacgagtctacttcttcccacaaggacgacgacaacgactacaggaagacggtcaattcgaacttttcatttgattattctcgtattccacatagttcgaattcgcatttgctttccattcctcttggcaaacctccacactttgatggggaggactacggattttggagtcacaaaatgcgtagccatttattctctctccatccaagcatatgggagattgtagagagtggaatgaaatttgatagctcggatagccctatgtttattaacgaacaaattcataaaaatgcacaagctactactgtgttgctagcctctttgtgcagggacgagtacaataaggtgagcggcttggacaatgccaagcagatatgggacaccctcaagatttctcacgaggggaacgacatcaccatgctcactaaaatggagttggtggagggcgagcttggaaggtttgcaatgataaggggcgaggagccaacccaaacatacaaccggctcaagacccttatcaacaaaataaggagttatggaagcacgcgatggacggaccatgacgtcgtccgactattgctaaggtcctttaccattcttgatcctcatttggtgaataatattcgtgagaatcccaggtacaccaaaatgtcgcccgaagaagtcctaggaaaattcgtcagcgggcgaatgatgattaaggaagcaaggtacgtggacgacgccttgaatggaccaatcaacgagccgcaacctcttgctctcaaagcaacaagaagcaaggaggcgctacctagcaaggtggcacaaattgaggcagccggacttaatgatgaagagatggctctcatcatcaaacgcttcaagacggtgctaaaaggtcacaaggggcagccaagcaagaccaagacaaaagggaagcgctcatgcttcaagtgcggtaagattggtcattttatcgctaactgccctgataacgatattgaccaggaacaggggaacaagagggaaaagaagaagaattacaagaaggccaagggcgaggcacacatcggaaaggagtgggattcggattgctcctccgactccgacaatgaaggactcgccgccaccgccttcaacaagtcatccctcttccccaacgagcgtcacacatgccttatggcaagggagaagaaggtgagtactcgagactccacttatgcttcttctagtgataatgagtctagtgatgatgatgacatagactattcatacttattcaagggtttagatagatctaagatagacaaaattaatgaattgattgatgccttgaatgatatgaataggcttttagaaaagcaagaggatttgttgtatgatgagcatgataagtttgtagaggcacaaaaatcctatgctttagaagttaaaagaaatgaagtactttctagtgaattatcttcttgtcatgaaaacattgctactttaaagagcgttaatgatgatttaaatgctaagctagaaaaatctagtaaattaacatcttgtgtagaacatgttgtgatttgcactaggagtaaagactttaatgttgatgcttgtagtgaacacctagagtgcatttctaaattaaatgatgaagtagctagtcttaatgcccaacttaagactagcaagagtgatttggataaactaaaatttgcaagggatgcctacacaattggtagacacccctcaattaaggatgggcttggcttcaagagggaagtcaagaacttgacaagccataaggctcccatctccgccaaggagaaagggaaggcccctatggctactagtgttaaaaagaaccatgcctttttgtatcatgataggaaaaattctagaaatgcttttagaagatatgatgcttttgattcacatgcttatgattcttatgctatgactgcttctagttctcatgttgtgcatgatagaaaagttggtaggaggaatgttgttcataatatgcctaggagaaatgttgttaatattcctaggaaagttaatgagccttctacaatatatcatgctttgaatgcttcctttgcaatttataaaaatgatagaaaggtttatgcatccgggggttcaagctggattatcgacagcggatgcacaaaccatatgacgggggagaagaagatgttcacctcctacgtcaagaataaggattcccaagattcaattatattcggtgatgggaatcaaggcaaggataagtctgaaacccaagggaccctcaagcgcttcctcaggagagctcaaaatgagtttgagctcaaggtgaagaagataaggagcgacaacgggtccgagttcaagaaccttcaagtggaggagttccttgaggaggaagggatcaagcatgagttctccgctccctacacaccacagcaaaatggtgtggtagagaggaagaacaggacgctaatcgacatggcgaggactatgcttggagagttcaagacccccgagcgtttttggtcggaagccgtgaacacggcttgccacgccatcaacagggtctaccttcatcgcctcctcaagaagacttcatatgagcttctaaccggtaacaaacccaatgtatcttactttcgtgtatttgggagcaagtgctacattctagtgaagaagggtagaaattctaagtttgctcccaaagctgtagaagggtttttattaggttatgactcaaatacaaaggcgtatagagtcttcaacaaatcatcaggtttggttgaagtctctagcgacgttgtatttgatgagactaatggctctccaagagagcaagttgttgattgtgatgatgtagatgaagaagatgttccaacggtcgctatacgaaccatggcgattggagaagttcatcaacaggaggcgtgtgatcaagggggagcacaagatgatcgtgtgatggaggaagatgcgcaaccagcacctccaacccaagttcgagcgatgattcaaagggatcatcccgtcgaccaaattctgggtgacattagcaagggagtaactactcgatctcgattagttaatttttgtgagcattactcctttgtctcttctattgagcctttcagggtagaggaggccttgctagatccggactgggtgttggccatgcaggaggagctcaacaacttcaagagaaatgaagtttggacgctggtgcctcgtccgaagcaaaatgttgtgggaaccaagtgggtgttccgcaacaaacaggacgaacacggggtggtgacgagaaacatggctcgacttgtggcaaaaggttatgcccaagtcgcaggtttggatttcgaggagacttttgctcctgtggctaggctagagtctattcgtatcctgctagcatatgccgctcaccattctttcaggctgttccaaatggatgtgaagagcgctttcctcaacgggccaatcaaggaggaggtgtacgtggagcaaccccctggcttcgaggatgaacggtaccccaaccacgtgtgtaagctctctaaggcgctctatggacttaagcaagccccaagagcatggtatgaatgccttagagactttctaattgctaatgctttcaaggttgggaaagccgatccaactctttttactaagacatgtgatggtgatttgtttgtgtgccaaatttatgtcgatgacataatatttggttctactaaccaaaagtcttgtgaagagtttagcagggtgatgacgcagaaattcgagatgtcgatgatgggcgagttgaactacttccttgggttccaagtgaagcaactcaaggacggcaccttcatctcccaaacgaagtacacgcaagatctgctaaagcggtttgggatgaaggacgccaagcccccaaagactccgatggggaccgacggacacaccgacctcaacaaaggaggtaagtccgttgatcaaaaagcataccggtcaatgataggttctttgctttacttatgtgctagtagaccggatattatgcttagcgtatgcatgtgtgctagatttcaatccaatcctaaggagtgtcacttagtggcggtaaagcgaattcttagatatttggttgctacgccttgcttcgggctctggtatccaaaggggtctacctttgacttagttggatactcagactccgactatgctggatgtaaggtcgataggaagagtacatcggggacgtgccaattcttaggaaggtccctggtgtcatggaactctaagaaacaaacctccgttgccctatccaccgctgaggccgagtacgttgccgcaggtcagtgttgcgcgcaactactttggatgaggcaaaccctccgggactttggctacaatctgagcaaagtcccactcctatgtgacaatgagagtgctatccgcatggcggagaatcctgttgagcgcagccgcacaaagcacatagacatccggcatcactttttgagagaccaccagcaaaagggagatatcgaagtgtttcatgttagcaccgagaaccagctagccgatatcttcactaagcctctagatgagaagaccttttgcaggttgcatagtgagctaaatgtcttagattcgcggaacctggattga

SEQ ID NO: 4686 - DNA, 4341 bp, Zea mays
  Clone ID: TF_ZM4951.C1.o4.fg
atggatcctaaggggaagggaatcgtgatcaacgacaaggaaaaggagtccttcgtcaacgagccaaaagatgataaatccaacgactctggctcgggccacagacgtaaagatgggaagaagaagaagacaaggcgcatcaaggagatcgtctactacgacagcgacgaatcctcttcttcccaaaaggacgatgacaacgactacaggaagacggtcaattcgaacttttcatttgattattctcgtattccacatagttcgaattcgcatttgctttccattcctctcggcaaacctccacactttgatggggaggactacggattttggagtcacaaaatgcgtagtcatttattctctctccatccaagcatatgggagattgtagagaatggaatgaaatttgatagctcggatagccctatgtttattaacgaacaaattcataaaaatgcacaagctactactgtgttgctagcctctttgtgcagggacgagtacaataaggtgagcggcttggacaatgccaagcagatatgggagaccctcaagatttctcacgaggggaacgacatcaccatgctcactaaaatggaattggtagagggcgagcttggaaggtttgcaatgataaggggcgaggagccatctcaaacatacaaccggctcaagaccctcatcaacaaaataaggagttatggaagcacgcgatggacggaccatgacgtcgtccgactattactaaggtcatttaccgttcttgatcctcatctcgtgaacaatattcgtgagaatcccaggtacacgaagatgacgcccgaggaggtactcggaaaattcgtaagcgggcggatgatgatcaaggaggcaagatacgtggacgacgccttgaatggaccgatcaacgagcatcaaccccttgctctcaaggcaacaagaagcaaggaggtgctacctagcaaggtggcacaaattgaggcggccggacttaatgatgaggagatggctctcatcatcaaacgcttcaagacggtgctaaaaggtcacaaggggcaaccaagcaagaccaagacaaagggaaagcgctcatgcttcaagtgcggtaagattggtcattttatcgctaactgccccgataacgatagtgaccaggaacaggggaacaagagggaaaagaagaagaattacaagaaggccaagggcgaggcacacatcggaaaggagtgggactcggattgctcctccgactccgacaatgaaggactcgccgccaccgccttcaacaagtcatccctcttccccaacgagcatcacacatgccttatggcaagggagaagaaggtgagtactcgagactccacttatgcttcttctagtgataatgagtctagtgatgatgatgacatagactattcatgcttattcaagggtttagatagatctaagatagacaaaattaatgaattgattgatgccttgaatgataagaatgtgcttttaaaaaaacaagaggatttgttgtatgaagaacatgacaaatttgtagaagcacaaaaatcacttgcattagagattaatagaaataaaatgctttcttgtgagttgtctacatgtcatgattcaattgctagtttaaagagcataaatgatgatttaaatgctaaactagaaaaatctggtaaaacaacatcttgtgtagaacatgttgagatttgcactaggtgtaaggatttcgatgttgatgcctgtagtgatcatttagcttcaatttccaaactaactgaggaattggctagtcttaatgcccaacttaagactagcaagaatgatttcgataaactaaaatttgcaagggatgcctacacgattggtagacacccctcaattaaggtttatgcatccgggggttcaagctggattatcgacagcggatgcacaaaccatatgacgggggagaagaaaatgttcacctcctacgtcaagaataaggattcccaagattcaattatattcggtgatgggaatcaaggcaaggataagtctgaaacccaagggaccctcaagcgcttcctcaggagagctcaaaatgagtttgagctcaaggtgaagaagataaggagcgacaacgggtccgagttcaagaaccttcaagtggaggagttccttgaggaggaagggatcaagcacgagttctccgctccctacacaccacagcaaaatggtgtggtagaaaggaagaacaggacgctaatcgacatggcgaggactatgcttggagagttcaagacccccgagcgtttttggtcggaagccgtgaacacgacttgccacgccatcaacagggtctaccttcaccgcctcctcaagaagacgtcgtatgagcttctaaccggtaacaaacccaatgtatcgtactttcgtgtatttgggagcaagtgctacattctagtgaagaagggtagaaattctaagtttgctcccaaagcagtagaagggtttttgttaggttatgactcaaatacaaaggcgtatagagtcttcaacaaatcatcgggtttggttgaagtctctagcgacgttgtatttgatgaaactaatggctctccaagagagaaagttgttgattgtgatgatgtagatgaagaagatgttccgacggccgctatacgaaccatggcgattggagaagtgcggccacaggaacaagatgaacgacatcaaccatcttcctcaactatggtgctacccccaactcaagacgatgaacaggttcatcaacaggaggcgtatgatcaagggggagcacaagatgatcatgtgatggaggaagatgcgcaaccggcacctccaacccaagttcgagcaatgattcaaagggatcatctcgtcgaccaaattctgggtgacattagcaagggagtaactactcgatctagattagttaatttttgtgagcattactcctttgtctcttctattgagcctttcagggtagaggaggccttgctagatccggactgggtgttggccatgcaggaggagctcaacaacttcaaaagaaatgaagtttggacactggtgcctcgtccgaagcaaaatgttgtgggaaccaagtgggtgttccgcaacaaacaggacgagcacggggtggtgacgagaaacaaggctcgacttgtggcaaaaggttatgcccaagtcgcaggtttggatttcgaggagacttttgctcctgtggctaggctagagtcaattcgaatcttgctagcatatgccgctcaccattctttcaggttgttccaaatggatgtgaagagcgctttcctcaacgggccaatcaaggaggaggtgtacgtggagcaaccccctggcttcaaggacgaacggtaccccaaccacgtgtgtaagctctctaaggcgctctatggacttaagcaagccccaagagcatggtatgaatgccttagagatttcttaattgctaatgctttcaaggttgggaaagccgatccaactcttttcactaagacttgtaatggtgatttgtttgtgtgccaaatttatgtcgatgagataatatttggttcaactaaccaaaagtcttgtgaagagtttagcagggtgatgacgcagaaattcgagatgtcgatgatgggcgagttgaactacttccttgggttccaagtgaagcaactcaaggacggcactttcatctcccaaacgaagtacacgcaagacttgctaaagaggtttgggatgaaggatgccaagcccgcaaagacgccgatgggaactgacggatacaccgacctcaataaaggagactccgactatgctggatgtaaggtcgataggaagagtacatcggggacgtgccaattcttaggaaggtccctggtgtcatggaattctaagaaacaaacctccgttgccctatccaccgctgaggccgagtatgttgccgcaggacagtgttgcgcgcaactactttggatgaggcaaaccctccgggactttggctacaatctgagcaaaatcccactcctatgtgataatgagagtgctatccgcatggcggaaaatcccgttgaacacaaccgcacaaagcacatagacatccggcatcactttttgagagaccaccagcaaaagggagatatcgaagtatttcatgttagcaccaagaaccagctagccgatatctttaccaagcctctagatgagaagaccttttgcaggctgcgtagttcattctgcattttgttgcttattgtggtgctcaagttgtacaaacactccctggacctcacaagtccgttgcaaagtgatgcacatgtttag

SEQ ID NO: 4687 - DNA, 3576 bp, Zea mays
  Clone ID: TF_ZM4959.C2.o4.fg
atggatcctaagggcaaggggatggtggtcaacaataaggagaaggagtctttcgtcaatgatccaaaagatgacaagcctaccgactcgggctcaagccacaaaagaaaagacaggaagaagaagaaaacaaggcgcatcaaggagatcgtctactacgacgacagcgacgagtcctcttcttcccaaaaggacgacgacaactacgagaaaaagaaaacggtcaattcaaacttttcttttgattattctcgtattccgcaaaatacaaatgctcatttactctccattccacttggtaaacctcctcactttgatggagaggactacggattttggagtcacaaaatgcgtagtcacttgttctctctccatccaagcatatgggagatagtagagagtggaatgcaatttgatagtagtgatagtcccatgtttatcaatgagaaaattcacaaaaatgcacaagctactactgttcttctagcatcattgtgcagggatgaataccataaggtgagcggcttggataacgccaagcagatttgggacaccctcaagatctcacatgaggggaacgacgtcaccatgctcaccaagatggagttggtggagggcgaacttgggagattcgcaatgatcaggggcgaggagccaacccaaacgtacaaccggctcaagaccctcgtcaacaaaataaggagctatggaagcacgcgatggacggaccacgacgtcgtccgcctaatgctaaggtcgtttactgttcttgatccacatcttgtgaacaatattcatgagaatcctaggtacaccaagatgacgcccgaggagatccttggaaagttcgtaagcgggcggatgatgatcaaggaggcaagatacgttgacgatgcgttgaatggcccaatccaagagcctcaaaccattgctctcaaagcaacgagaagcaaggaggcgatacctagcaaggtggcacaaattgaggcggttgggcttaatgatgaagaaatagccctcatcatcaagcgattcaagacggcactaagtggtcgcaaggagcatccaaacaagaccaagacgaaagggaagcgctcatgcttcaaatgtggtaagattggtcattttatcgctaactgtcccgataatgatagtgaccaggaaaaagggaacaagagggaaaagaagaaggcttacaagaaggctaagggtgaggcacaccttggaaaggagtgggactcggattgttcgtcgtccgactccgacaacgaaggactcgccgccaccgccttcaacaagtcgtccctcttccccaacgagcatcacacctgcctcatggcaagggaaaagaaggtaagcactcataatactagtacttacgcttcatcaagtgatgaagaatctagtgatgatgaaatagactactcatgtttattcaaaggcctagatagaactaaggttgataagattaatgaattaattgatgcattgaatgataagaataggttattagaaaagcaagaggatcttttgtatgaagaacatgataagtatgtagaggcacaaaaatcccttgctttagaaattaaaaggaatgaaatgctttcttgtgagttgtctacatgccatgactctatttctagcctaaagagcataaatgatgatttgaatgctaagttagaaatagctaataaatcaacatcttgtgtagaacacgttgcaatttgcaataggtgtaaagattttaaagttgatgcttgtagtgaacacctagtttcaatttctaaattgaatgatgaagtggctagtcttaatgcccaacttaagactagcaaaaatgattttgataaactaaaatttgcaagggatgcctacacggtcggtagacacccctcaattaagaatgggcttggcttcaagagggaagccaagaacttgacaagtcataaggctcccatctccatcaaggagaaagggaaggcccctatggcaaatagtgtgcaaaagaaccatgctttcttataccatgataggagatattctaggaatgttcatcatgatagaagttgcaatgatattgtttcacatgcttatgattcaaatgcaatgtttgcttcaagttcttctatgatgtatgatagaagtttggctaggaaaaatgtcattcatcatgtgcctaggagaaatactcatatgcctaggaaaacaagtaatgaaccttctacaatttatcatgctttaaatgcttcctttgctatttgtagaaaggataagaagatagttgctagaaaattaggggcaaaatgcaagggagataaaactttcatttgggtccctaaggccatttgtactaaccttgtaggacccaacaaaagttgggtttatgcatccgggggctcaagctggattatcgacagcggatgcacaaaccacatgacaggggagaagaggatgttctcatcctacgtcaagaacaaggatccccaagattcaatcatattcggtgatgggaaccaaggcaaggtgaaagggttaggaaaaattgctatttcatccgagcactctatttctaatgtgttcttagttgagtcgcttggatataacttgttatctgataaatctgaaacccaagggaccctcaagcgcttcctaaggagagcccaaaacgagtttgagctcaaagtgaagaagataaggagcgacaatgggtccgagttcaagaaccttcaagtggaggagtaccttgaggaggaagggatcaagcacgagttctccgctccctacacaccacagcaaaatggtgtggtagagaggaagaacaggatgctcatagacatggcgaggacgatgcttggagagttcaagacccccgagcggttttggtcggaagccgtgaacacggcttgccacgccatcaaccgggtctatcttcaccgcctcctcaagaagacttcgtatgagcttctaaccggtaacaaacccaatgtttcgtatttccgagtttttgggagtaaatgctacattctagtgaagaagggtaggaattccaaatttgctcccaaagcggtagaagggtttttattaggttatgactcaaatacaaaggcgtatagagtcttcaacaaatcatcgggtttggttgaagtctctagcgacgttgtatttgatgagactaatggctctccaagagagcaagttgttgatcttgatgatgtagatgaagaagacgttccaactgccgcaatacgcaccatggtgattggagacgtgcgaccgcaggaactcaaggagcaagatcaaccttcttcctcaacaatggtgcatcccccaactcaagacgatgaacaggttcatcaagaagaggcgtgtgatcaagggggagcacaagatgatcatgtaatggaggaagaagctcaaccggcacctacaactcaagttcgagcaacgattcaaaggaatcatcccgtcgaccaaattttgggtgacattagcaagggagtaactactcgctctagattagttaatttttgtgagcattactcctttgtctctttgagagcacctagaggggggtga

SEQ ID NO: 4688 - DNA, 831 bp, Zea mays
  Clone ID: TF_ZM4959.C3.o1.fg
atggcccttatcatcaagcggttcaaaacggcgctaaagggtcgcaaggagcaccccaacaagaacaagacgaaggggaagcgctcctgcttcaaatgtggtaagattggtcattttatcgctaattgtcccgataatgatagtgaccaggaaaagaagagtggaaagtgggaaaagaagaagaactacaagaaggcgaagggcgaggcacatcttggaaaggagtgggattcggattgctcctcgtccgactccgacaacgaaggactcgccgccaccgccttcaacaagtcatccctcttccccaacgagcatcacacatgccttatggcaaaggagaagaagggattagataaaactaagattgataagattaatgaattgattgatgctttgaatgataagaatagattactagaaaaacaagatgaccttttatatgaagagcatgataaatttgttagtgcacaaaattctcttgctctagaagttaaaaggaatgaaatgctttcttgtgaactatctacttgtcatgaaaccatttctactttaaaaggtgttaatgatgatttaaatgctaaactagaagtagcaaataaatctaactcttgtgtagaacatgttatgatctgcaataggtgcaaagattttaatgttgatgcttgtagtgaacatctagtttgcatttctaaattaaatgatgaagtggctagtcttaatgcccaacttaagactagcaaaagtgaatttgacaagctaaaatttgcaagggatgcctacacgattggtagacacccctcaattaaggatggtcttggcttcaagagggaa

SEQ ID NO: 4689 - DNA, 2181 bp, Zea mays
  Clone ID: TF_ZM4983.C4.o2.fg
atggatcctaaggggaagggaatcgtgatcaacgacaaggagaaggagtccttcgtcaacgagccaagggatgacaagtccaacgactcgggctcgggccacagacgcaaagatggaaagaagaagaagacaagacgcatcaaggagatcgtctactacgacagcgatgagtctacttcctcccaaaaggacgacgaccacaacgactacgagagaaagaaaccggtcaattcaaacttttcttttgattactctcgtattcctcaaacctctttgtgcagggacgagtaccataaggtgagcggcttggacaatgccaagcagatctgggacaccctcaagatctctcatgaggggaatgatgtcaccctgctcaccaagatggagttggtggagggcgagcttggacgattcgcaatgataaggggcgaggagccaacacaaacatacaaccggctcaagacccttatcaacaaaataaggagctacggaagcacgcgatggatggaccacgacgtcgtccgcctaatgctaaggtcctttaccgttcttgatcctcatttggtgaacaacattcgtgaaaatcctaggtacaccaagatgtcgcccgaagaagttcttgggaagttcgtaagcgggcgaatgatgatcaaggaggcgagatacgtggacgacgcgttgaacggtcctattcatgagcctcaacccattgctctcaaggcaacgaggagcaaggaggcgctaccaagcaaggtggcgcaagttgaggcggccaggctaaataatgaggagatggccctcatcattaagcgcttcaagatggcgcttaaaggtcgcaagggacagccaagcaagaccaagacaaaggagaaacgctcgtgcttcaaatgtggtaagattggtcatttcattgctaactgtcccgataatgaaagtgaccaggaaaaggggaacaaaagggagaagaagaagcattacaagaaggccaagggcgaggcacatatcggaaaggagtgggattcggattgctcctcctccgactccgacaatgaaggactcgccgccaccgccttcaacaagtcatctctcttccccaacgagcatcacacttgcctcatggcaagggaaaagaaagtttatgcatccgggggttcaagctggattattgacagcggatgcacaaaccatatgacgagggagaagaagatgttcacctcctacgtcaagaataaggattcccaagattcaattatattcggtgatgggaatcaaggcaaggataagtctgaaacccaagggaccctcaagcgcttcctcaggagagctcaaaatgagtttgagctcaaggtgaagaagataaggagcgacaatgggtccgagttcaagaaccttcaagtggaggagttccttgaggaggaagggatcaagcacgagttctccgctccctacacaccacagcaaaatggtgtgatgaagaagatgttccgacggccgctatacgaaccatggcgactggagaagtgcgaccacaggaacaagatgaacgagatcaaccttcttcctcaacaacggtgcatcccccacctcaagatgatgaacagggtagaggaggccttgctagatccggattgggtattggccatgcaggaggaactcaacaacttcaagcgcaatgaagtgtggacactggtgcctcgtcccaagcaaaatgttgtgggaaccaagtgggtgttccgcaacaaacaggatgagcacggggtggtgacgaggaacaaggctcgacttgtggcaaaaggttatgcccaagtcgcaggattgtaccaaatggatgtgaagagcgctttcctcaacgggccaatcaaggaggaggtgtacgtggagcaaccccctggcttcgaggatgaacggtaccccgaccactcttgtgaagagtttagcagggtgatgacgcagaaattcgagatgtcaatgatgggcgagttgaactacttccttgggttccaagtgaagcaactcaaagatggcaccttcatctcccaaacgaagtacacgcaagatctgctaaagcggtttgggatgaaggacgccaagcccgcaaagactccgatggggaccgacggacacaccgacctcaacaaaggagattttggtgaggcaatggggttaaagggccaagattga

SEQ ID NO: 4690 - DNA, 4269 bp, Zea mays
  Clone ID: TF_ZM4988.C5.o3.fg
atggatcctaagggcaaggggatgatggtcaatgataaggagaaggagtcctttgtcaatgatccaaaggatgacaagcctactgactcaggctcgggccacaaaagaaaagacgggaggaagaagaaaacaaggcgcatcaaggagatagtctactacgacaacgacgagtcttcctcctcccaaaaggacgactacaacgactacgagaaaaagaagacgatttgggacaccctcaaaatctcacatgaggggaacgacgtcaccatgctcaccaagatggagttggtggagggtgaacttgggagattcacaatgatcaggggcgatgagccaacccaaacgtacaactggctcaagaccctcgtcaacaaaataaggagctatggaagcacgcgatggacggaccacgacgtcgtccgcctaatgctaaggtcttttactgtccttgatccacatcttgtgaacaatattcgtgagaatcctatgtacaccaagatgacgcccgaggagatacttggaaagttcgtaagcgggcggatgatgatcaaggaggctagatacgttgatgattcgttgaatggcccaatccaagagcctaaaaccattgctctcaaagcaacgaggagcaaggaggcgctacctagcaaggtggcacaagttgaggcggccgggcttaatgaggaagagatggccctcatcattaagcgtttcaagacgacgctaagggttcgcaaggagcatcccaacaagaccaagacgaaggggaagcgctcatgcttcaaatgtggtaagattggtcattttatcgctaattgtcccgataatgatagtgaccaggaacaagggaacaagagggaaaagaagaaggcttacaagaatactaagggcgaggcacaccttggaaaggagtgggactcggattgttcgtcgtccgactccgacaatgaaggactcgccgccaccgccttcaacaagtcggccctcttccccaacgagcatcacacctgcctcatggcaagggaaaagaagggcctagatagaactaaggtagataagattaatgaattaattgatgccttgaatgataaaaatagcttaaagagcataaatgatgatttgagtgctaagttagaaatagctaataaatcaacatcttgtgtaaaacatgttgtagtttgcactaggtgtaaagattttaatgttgatgcttgtagtgaacacctagtttcaatttctaaattgaatgatgaagtggctagtcttaatgcccaacttaagactagcaagagtgaatttgacaaactaaaatttgcaagggatgcctacacgattggtagacatccctcaattaaggatggtcttggcttcaagagggaagtcaagaacttaacaagtcataaggcttccatctccgccaaggagaaagggaaggcccctatggctagtagtgctcaaaagaaccatgctttcatgtatcatgataggagacattctaggaatgtttgtagaggttatgatgcttttgattctcatgccatgattgtgtctagttcttctattatgcatgatagaaatctggctaggaaaaatgttgttcatcatatgcctagaagaaatagtgttcatgttcctaggaaagtaatgaatgaaccttctacagtttattatgcttgcaatgcttcctttgctatttgtagaaaggataagaaggtttatgcatccaggggctcaagctggattatcgacagcggatgcacaaaccacatgacgggggaaaagaggatgttctcttcctacgtcaagaacaaggttccccaagattcaatcatattcggtgatgggaaccaagggaaggtgaaagggttaggaaaaattgctattttatccgagcactctatttctaatgtgttcttagttgagtcgcttggatataacctgttatctgtgagtcaactttgtaatatgggatataactgtttattcacaaatgtagatgtgtctgtctttagaagaagtgatggttcattagcttttaagggtgtactagacggcaaactttatttagttgattttgcaaaagaggaggctggtctagatgcatgcttaattgctaagactagcatgggctggctgtggcatcgccgtttagcacatgtggggatgaagaaccttcacaagcttctaaagggagaacacgtgataggtctaactaatcttgtcaagcaggataaatctgaaacccaagggaccctcaagcgcttcctaaggagagctcaaaatgagttcgagctcaaggtgaagaagataaggagcgacaacgagtccgagttcaagaaccttcaagtggaggagtatcttgaggaggaaggaatcaagcacgagttctccgctccctacacaccacagcaaaatggtgtggtagagaggaagaacaggacgctactagacatggcgaggacgatgcttggtgaattcaagacgcccgaacagttttggacggaagccatgagcacggcttgccacgccataaactgggtctaccttcatcgcctcctcaagaagacttcatatgagcttctaaccggtaacaaacccaatgtgtcttactttcgtgtatttgggagcaaatgttacattctagtgaagaaaggtaggaattctaagtttgctcccaaagctgtagaaaggtttttgttaggttatgactcaaatacaaaggcgtatagggtcttcaacaaatcatcgggtttggttgaagtctctagcgacgttgtatttgatgagactaatggctctccaagagagcaagttgttgatcttgatgatgtagatgaagaagacgttccaacgaccgcaatgcgcaccatggcgattggagatgtgcggtcacaggaacaaaaggagcaagatcaaccttcttcctcaacaatggtgcatcccccaactcaagacgatgaacaggtccatcaagaggaggcgtgtgatcaagggggagcacaagatgatcttgtaatggaggaagaagcacaaccggcacctccaacccaagttcgagcgacgattcaaagggatcatcccgtcgaccagattttgggtgatattagcaagggagtaactactcgctctagattagttgatttttgtgagcattactcttttatctcttctattgagcctttcaggcaaaatgttgtgggaaccaagtgggtgtttcgcaacaaacaagacgagcacggggtggtgacaaggaacaagacacgacttgtggcaaaaggttatgcccaagtcgcaggtttggactttgaggagacttttgctcatgtggctaggctagagtcaattcgcatattgttagcctatgctactcaccattctttcaggttgttccaaatggatgtgaagagcgctttcctcaacgggccaatcaaggaggaggtgtacgtggagcaaccccctggctttgaggatgaacggtaccccgaccacgtgtgtaagctctctaaggcgctctatggacttaagcaagccccaagagcatgtgaagcaactcaaggatgggaccttcatctcccaaacgaagtacacgtaagacttgatcaagcggtttgggatgaaggacgccaagcccgcaaagactccaatgggaaccgacggacacaccgacctcaacaaaggagatttcaatctgatccaagggattgtcacttagtggccgtgaagcgaattcttagatatttagtcgctacgccttgcttcgggatctggtatccaaaggggtctacctttgacttgattggatattcagactccgactatgctggatgtaaggtcgataggaagagtacatcggggatgtgccaattcttaggaaggtccctggtgtcgtggagctctaagaaacaaacctccgttgccctatccaccgctaaggccgagtatgttgccacaggacagtgttgcgcgcaactactttggatgaggcaaaccctcagggactttggctataatctgagcaaagttctactcctgtgtgataatgagagtgctatctgcatggcggataatcctgttgaacacagccgcacaaagcacattgacatccggcatcactttttgagagaccaccagcaaaagggagatatcgaagtgtttcatgttagcaccgagaaccagctagccgatatctttaccaagcctctagatgagtcgaccttttacaagctgcgtagcgagctaaatgtcttagattcgcgaaacctggattga

SEQ ID NO: 4691 - DNA, 4293 bp, Zea mays
  Clone ID: TF_ZM5000.C1.o15.fg
atggatcctaagggaaaggggatggtggtcaacgataaggagaaggagaccattttcaacgagccgagggacgacaaagctactaactccggctcgagtcaaaagaagaaggaagggaagaagaagaggcgcatcaagaagatcgtctactacgacgacagcgacgagtcctcttcttcccaaaaggacaacgacgacaacgaccacgagaaaaagaagacggttaactctattttttctttcgattattctcgtactcatttactctccattccacttggtaaacctcctcactttgatggagaggactacggattttggagtcacaaaatgcgtagtcacttgttctctctccatccaagcatatgggagatagtagagagtggaatgcaatttgatagtactgatagtcccatatttatcaatgagcaaattcacaaaaatgcacaagctactactgttcttctagcatcattgtgcagggatgaataccataagttggtggaaggcgaactaggaaggttcgcaatgatcaggggagaggagccaacccaaacttacaacaggctcaagaccctcgtcaacaaaataaggagctatggaagcacgcgatggacggaccacgacgtcgtccgcctaatgctaaggtctttcactgtccttgatccacatcttgtaaacaatattcgtgagaatcctatgtacaccaagatgacacccgaggaaatacttgggaagtttgtaagcgggcggatgatgatcaaggaggcaagatacgttgatgatgcgttgaatggcccaatccacgagcctcaaaccgttgctctcaaagcaacgaggagcaaggaagtgctacctagcaaggtggcacaagttgaggcggcagggctcaatgaggaagagatggccctcatcatcaagtgtttcaagacgacactaaggggtcgcaaggagcatcccaacaagaacaagacgaagggtaagcgctcatgcttcaaatgtggtaagattggtcattttatcgctaattgtcccgataatgatagtgaccaggaacaagagaagaagagggaaaataagaaggcctacaagaaggctaagcgtgagacacaccttggcaaggagtgggactcggattgttcgtcatccgactccgacaacgaaggactcgccgcctcggccttcaacaaatcgtccctcttccccaacgagcatcacacctgcctcatggcaaaggagaagaaggtaaacactcgaaagactacttatgcttcttctagtgatgatgaatctagcgatgatgaaatagattatgctagtttgttcaagggcttagaaagaactaagattgataagattaatgaattaatcgatgccttgaatgataagaatagattgttagaaaagcaagaggatcttttgtatgaagaacatgataaatttgtagaggcacaaaaatctcttgttttagaagttaaaaggaatgaaatgctttcttgtgaactatctacttgccatgagaccatttctagtttaaaaagtgttaatgatgatttaaatgctaaactagaagtagcaaatagatctaactcttgtgtagatcatgttgtaatttgcaataggtgtaaagattttaatgttgatgcttgtagtgaacacctagtttctattgcaaagttaaatgatgaagtggctagtcttaatgcccaacttaagactagcaaaaatgaatttgataaattaaaatttgcaagggatgcctacacgattggtagacacccctcaattaaggatgggcttggcttcaagagggaagccaagaacttaacaagtcataaggctcccatctccgccaaggagaaagggaaggctcctatgactaatagtagtcaaaacaatcatgctttcatttatgcaattgcagactatcgaaaaatagtcattaatcatgtgcctaggagaaatgttcttgttcctatgaacacccctcgcaccttctacaatttatacatcgcgttgcaatgcttcctttgcattcgcatgaaggataagaaggtctatgcattcgggggctcaagctggattatcgacagcggatgcacaaaccacatgacgggggagaagaagatgttcacctcctacgtcaagaacaaagatttccaagactcaatcgtattcggtgacgggaatcaaggcaaggttaaaggactaggaaaaatagctatttcttccgagcattctatccctaatgtgtttttagttgaatcgctcggatataatttgttgtccgttagtcaattatgtaatatgggatataactgcttattcacaaatgtagatgtgtctgtctttagaaggagtgatggttcattagcttttaagggtgtattagacggcaaactctatttagttgattttgcaaaagaggagggcggtctagatgcatgcttaattgctaagactagcatgggctggttgtggcatcgctgtttagcacatgtggggatgaagaaccttcacaaacgtctaaagggagaacacgtgataggtctaacaaacgataaatctgaaacccaagggaccctcaagcgcttcctaaggagagctcaaaatgagtttgagctcaaggtgaagaagataaggagcgacaacaggtccgagttcaagaaccttcaagtggaggagtaccttgaggaggaagggatcaagcacgagttctccgctctctacacaccacagcaaaacggtgtggtagagaggaagaacaggacgctcatagacatggcgaggacaatgcttggagaattcaagacacccgagcggttttggtcggaagccgtgaacacggcttgccacgccataaaccgggtgtaccttcatcgcctcctcaagaagacttcgtatgagcttctaaccggtaacaaacccaatgtttcgtactttcgtgtatttgggagcaaatgttatattctagtaaagaaaggtagaaattctaagtttgctcccaaagctgtagaagggtttttgttaggttatgactcaaataaaaggcgtatagggtcttcaacaaatcatcggatgaagaagacgttccaacggccgcaatacgcaccatggcgattggagatgtgcggccacaggaacaaaaggatcaagatcaaccttcttcctcaacaatggtgcatcccccaactcaagacgatgaacaggttgttccaaatggatgtgaagagcgcttttctcaacggaccaatcaaggaggagctgtatgtggagcaaccccctggcttcgaggatgaacggtaccccgaccacgtgtgtaagctctctaaggcgctctatggacttaagcaagccccaagagcatggtatgaatgccatagagactttttaattgctaatgctttcaaggttgggaaagccgatccaactttattcactaagacttgtgatggtgatctttttgtgtgccaaatttatgtcgatgacataatatttggttctactaaccaaaagtcttgtgaagagtttagcagggtgatgactcagaaattcgagatgttgatgatgggcgagttgaactacttccttgggttccaagtgaagcaactcaaggatggcaccttcatctcacaaacgaagtatacacaagacttgctcaagaggtttgggatgaaggacgccaagcccgcaaagactccaatgggaaccgacggacacgtcgacctcaacaaaggaggtaagtccattgatcaaaaggcataccggtctatgatagggtctttactttatttatgtgctagtagaccggatattatgcttagcgtatgcatgtgtgctagatttcaatccgatccaagggagtgccacctagtggctgttaagcgaattcttagatatttagtcgctacgccgtgcttcgggatctggtatccaaaggggtctacctttgacttaattggatattcagactccgattatgctggatgtaaggtcgataggaagagtacatcggggacgtgccaattcttaggaaggtccctggtgtcgtggagttctaagaaacaaacttccgttgtcctatccaccgctgaggtcgagtatgttgccgcaggacagtgttgcgcgcaactactttggatgagacaaaccctcagggactttggctacaatctgagcaaagtcccactcctatgtgataatgagagtgctatctgcatggcggataatcttgttgaacacagccgcactaagcacatagacatccggcatcactttttgagagaccactag

SEQ ID NO: 4692 - DNA, 2844 bp, Zea mays
  Clone ID: TF_ZM5007.C1.o6.fg
atggccctcatcatcaagcggttcaagacgacgctaaagggtcgcaagaggcatcccaacaagaacaagacaaaggggaagcgctcatgcttcaaatgtggtaagattggtcattttatcgctaattgtcccgataatgatagtgaccaggaacaagggaacaagagggaaaagaagaagacttacaagaaggctaatggcgaggcacaccttggcaaggagtgggactcggattgttcgtcgtccgactccgacaatgaaggactcgccgccatcgccttcaacaaatcgttcctcttccccaacgagcatcacacctgcctcatggcaagggaaaagaagggcctagatagaactaaggttgataagattaatgaattaattgatgccttgaatgacaagaataggttattagaaaagcaagaggatcttttgtatgaagaacatgataagtttgtagaggcacaaaaatctcttgctttagaaattaaaaggaatgaaatgctctcttgtgaattgtctacatgccatgactctatttctagcttaaagagcataaatgatgatttgaatgctaagttagaaatagctaataaatcaacatcttgtgtagaacatgttgcaatttgcaataggtgtaaagattttaatgttgatgcttgtagtgaacacctagtttcaatttctaaattgaatgatgaagtggctagtcttaatgcccaacttaagactagcaagagtgaatttgacaaaataaaatttgcaagggatgcctacacgattggtagacacccctcaattaaggatggtcttggcttcaagagggaagccaagaacttaacaagccataaggcttccatctctgccaaggagaaagggaaggcccctatggctagtagtactcaaaagaaccatgctttcatgtatcatgataggagacattctaggaatgcttatagaagttatgacgcttttgattctcatgccatgtttgcttctagttcttctattatgcatgatagaaatttggctaggaaaaatgctatgcctagaagaaatgttgttcatgttcctagaaaagtaaacaatgaaccttctacaatttttcatacttgcaatgcttactttgctatttgtagaaaggataagaaggtttatgcatccgggggatcaagctggattatcaacaacggatgcacaaaccacatgacgggggagaagaagatgttctcttcctatgtcaagaacaaagattcccaagactcaatcatattcggtgacgggaatcaaggcaaggtgaaagggttaggaaagattgctatttcatccgagcactccatttctaatgtacttttagttgagtcgcttagatataatttgttatccgttagtcaattatgcaatatgggatataattgtttattcacaaatgtagatgtgtttgtctttagaagaagtgatggttcattagcttttaagggtgtattagacggcaaactctatttagttgattttgcaaaagaggaggccggtctagatgcatgcttaattgctaagactagcatgggctggctgtggcatcgccgtttagctcatgtggggatgaagaaccttcacaagcttctaaagggagaacacgtgataggtctaactaatgtaactttcgaaaaagatagaccttgcgcagcttgtcaagcaggtaaacaggtgggaagctctcatcataccaaaaatgtgatgaccacatcaagacctttggagttgcttcatatggacctcttcggacccatcgcctatctaagcataggaggaagtaagtatggtcttgttatagttgatgatttttctcgcttcacttgggtattctttttgcaggataaatctgaaacccaagggaccctcaagcgcttcctaagaagagctcaaaatgagtttgagctcaaggtgaagaagataaggagcgacaacaggtccgagttcaagaaccttcaagtggaggagtaccttgaggaggaagggatcaagcacgagttctctgctccctacacaccacagcaaaatggtgtggtagagaggaagaacaggacgctcatagacatggcgaggacgatgcttgtagagttcaagacccccgagtggttttggtcggaagccgtgaacacagcttgccacgccatcaaccgggtctaccttcaccgcctcctcaagaagacttcgtatgagcttctaaccggtaacaaacccaatgtgtcttactttcgtgtatttgggagcaaatgctatattctagtgaagaaaggtagaaattctaagtttgctcccaaagttgtagaaggatttttgttaggttatgactcaaatacaaaggcgtatagagtcttcaacaaatcatcaggtttggttgaagtctctagcgacgttgtatttgatgagactaatggctctccaagcgagcaagttgttgatcttgacgatgtagatgaagaagacgttccaacggccgcaatacgcaccatggtgattggagatgtgcggccacaggaacaaaaggagcaagatcaaccttcttcctcaacaatggtgcatcccccaactcaagacgatgaacaggttcatcaagaagaggcgtgtgatcaagagggagcacaagatgatcatgtgatggaggaagaagcacaaccgacacctccaacccaagttcgagcgacgattcaaaggaatcatcccgtcgaccaaattttgggtgatattagcaagggagtaactactcgctctagattagttaatttttgtgagcattactcctttgtctcttctattgagcctttcagggtagaagagtga

SEQ ID NO: 4693 - DNA, 2035 bp, Zea mays
  Clone ID: TF_ZM5028.C2.o6.fg
atggatcctaggggcaaggggatggtggtaaatgagaaggagaaggagtccttcgtcaatgatccaaaagatgacaagtctactaactcgggctcaagccacaaaagaaaagacgggaagaagaagaaaacaaggcgcatcaaggagatcgtctactacgacgacagcgacgagtcctcttcttcccaaaaggatgacgacaacgactacaagaaaaggaagacggttaattctaacttctcttttgattactctcgtatttctcaaagtaccaatgctcatttactctccataccacttggtaaacctcctcagtttgatggagaggactacggattttggagtcacaaaatgcgtagtcacttgttctctctccatccaagcatatgggagatagtcgagagtggaatgcaatttgatagtactgatagtcctatatttattaatgagcaaattcacaaaaatgcacaagctactactgttcttctagcatcattgtgcagggatgaataccataaggtgagcggcttggataacgccaagcaaatttgggacaccctcaagatctcacataaggggaacaacgttaccatgctcaccaagatggagttggtggagggcgaactcgggagattcgcgatgatcaggggggaggagccaacccaaacgtacaacaggctcaagaccctcgtcaataagataaggagctatggaagcacgcgatggacggaccacgacgtcgtccgcctaatgctaaggtcctttactgtccttgatccacatcttgtaaacaatattcgtgagaatcctaggtacaccaagatgtcgcccgaagaaattcttgggaaatttgtaagcgggtggatgatgatcaaggaggcaagatacgtggatgatgcgttgaatggcccaatccacgagcctcaaactgttgctctcaaagcaacaaggagcaaggaggcgctacctagcaaggtggcgcaagttgaggcggtcgggcttaatgaggaagaaatggccctcattatcaagcggttcaagacggcgctaaagggtcgcaaggagcaccccaacaagaacaagacgaaggggaagcgctcctgcttcaaatgtggtaagattggtcattttatcgctaattgccctgataatgatagtgaccaggaaaagaagagtggaaagtgggaaaagaagaagaactataagaaggcaaagggcgaggcacatcttggaaaggagtgggattcggattgctcctcgtccgactccgacaacgaaggactcgccaccaccgccttcaacaaatcattcctcttcccaaacgagcatcacacatgcctcatggcaaaggagaagaaggtatgtactcgaaacaatactacttatgcttcttcaagtgaggatgagtctagtgatgatgaaatagactattcatgtttattcaagggcctagatagaactaaggttgataagattaatgaattaattgatgtcttgaatgataagaatatgttgttagaaaagcaagaggatcttttgtatgaagagcatgataaatttgtagaggcacaaaattctcttgcattagaaattaaaaggaatgaaatgctttcctgtgaattgtctacatgccatgactctatttctagcttaaagagcataaatgatgatttgaatgctaagttagaaatagccaataaatcaacatcttgtgtagaacatgttgcaacttgcaataggtgtaaagattttaatattgatgcttgtagtgaacacctagtttcaatttctaaattgaatgaggaagtggctagtcttaatgcccaacttaagactagcaaaaatgattttgataaactaaaatttgcaagggatgcctacacggttggtagacacccctcaattaaggatggtcttggcttcaagaggaaagttaagaacttaacaagccataaggcttccatctccatcaaggagaaaggaaaggcccctatggcaaatagtattcaaaagaaccatgctttcttataccatg

SEQ ID NO: 4694 - DNA, 4233 bp, Zea mays
  Clone ID: TF_ZM5032.C3.o5.fg
atggatcctaagggcaaggggatggtggtcaatgataaggagaaggagtccttcgtcaatgatccaaaggatgacaagcctactgactcaggctcgggccacaaaagaaaagacgggaggaagaagaaaacaaggcacatcaaggagatagtctactacgacagcgacgaatcttcctcctcccaaaaggacgacgacaacgactacgagaaaaagaaaacggtcaattcaaacttttattttgattattctcgtattccgcaaagtacaaatgctcatttactctccattccacttggtaaacctcctcactttgatggagaggactacggattttggagtcacaaaatgcgtagtcacttgttctctctccatccaagcatatgggagatagtagagagtggaatgcaatttgatagtactgatagtcctatgtttatcaatgagcaaattcacaaaaatgcacaagctactactgttcttctagcttcattgtgcagggatgaataccataaggggcgaggagccaacccaaaaatacaaccggctaaagaccctcgtcaaaaaataaggagctatggaagcacgcgatggacggaccacgacgtcgtccgcctaatgctaaggtcttttactgtccttgatccacatcttgtaaacaatattcgtgagaatcctaggtacaccaagatgacgcccgaggagatacttggaaagttcgtaagcgggcagatgatgatcaaggaggctagatacgttgatgatgcgttgaatggcccaatccatgagcctcaaaccgtggctctcaaggcaatgaggagcaaggaggcgctacctagcaaggttgcacaagttgaggcgacggggctcaacgaggaagagatggccctcatcatcaagcgtttcaagacggcgctaaggggtcgtaaggagcatcccaacaagacaaaaacgaaggggaagcgctcatgcttcaaatgtggtaagattggtcattttatcgctaattgtcccgataatgatagtgaccaggaacaagggaacaagagggaaaagaagaaggcttacaagaaggctaagggcgaggcacaccttggaaaggagctggactcggattgttcattgtccgactccgacaacgaaggactcgccgccaccgccttcaacaagtcggccctcttccccaatgagcatcacacctgcctcatggcaagggaaaagaaggtaagcactcgtgatactagtacttacgcttcctcaagtgatgaagaatctagcgatgatgaaatagactattcatgtttattcaagggcctagatagaactaaggttgataaaattaatgaattaattgatgccttgaatgataaaaataagttattagaaaagcaagaggatattttgtatgaagaacatgataagtttgtagaggcacaaaaatcccttgctttagaaattaaaaggaatgaaatgctttcttgtgaattgtctacatgtcatgactctatttctagcttaaagagcataaatgatgatttaagtgctaagttagaaataactaataaatcaacaccttgtgtagaacatgttgtagtttgcaataggtgtaaagattttaatgttgatgcttgtagtgaacacctagtttcaatttcaaaattgaatgatgaagtggctagtcttaatgcccaacttaagactagcaagagtgaatttgacaaactaaaattcacaagggatgcctacacgattggtagacacccctcaattaaggatggtcttggcttcaagagggaagtcaagaacttaacaagccataaggcttccatctccgccaaggagaaagggaaggcccctgtggctagtagtgctcaaaagaaccatgctttcatgtatcatgataggagacattctaggaatgtttatagaagttatgatgcttttgattctcatgccatgattgcttctagttcttctattatgcatgatagaaatttggctaggaaaaatgttgttcatcatatgcctagaagaaatattgttcatgctcctaggaaagtaatgaatgaaccttttacaatttattatgcttgcaatacttcctttgctatttgtagaaaggataagaaggtttatgcatctggaggctcaagctggattgtcgacagcggatgcacaaaccacatgacgggggaaaagaagatgttctcttcctacgtcaagaacaaggatccccaagattcaatcatattcggtgatgggaaccaaggcaaggtgaaagggttaggaaaaatttctatttcatccgagcactctatttctaatgtgttcttagttgagtcgcttggatataacttgttgtctatagaccttgtgcagcttgtcaagcaggataaatctgaaacccaagggaccctcaagcgcttcctaaggagagctcaaaatgagtttgagctcaaggtgaagaagataaggagcaacaacaggtccgaattcaagaatcttcaagtggaggagtatcttgaggaggaaggaatcaagcacgagttctccgctccctacacaccacagcaaaatggtgtggtagagaggaagaacaggacgctactagacatggcgaggacgatgcttggtgaattcaagacgcccgaacggttttggatggaagccgtgagcacggcttgccacgccataaaccgggtctaccttcatcgcctcctcaagaagacttcatatgagcttctaaccggtaacaaacccaatgtgccttactttcgtgtatttgggagcaaatgttacattctagtgaagaaagcaaaacgttgtgggaaccaagtgggtgttccgcaacaaacaagacaagcacggggtggtgacaaggaacaaggcgtgacttgtggcaaaaggttatgcccaagtcgcagtttggactttgaggagacttttgctcctgtggctaggctagagtcaattcgcatattgttagcctatgctactcaccattctttcagtttgttccaaatggatgtgaagagcgctttcctcaacgggccaatcaaggaggaggtgtacgtggagcaaccccctggctttgaggatgaacggtaccccgaccacgtgtgtaagctctctaaggcgctctatggacttaagcaagccccaagagcatggtatgaatgccttagagactttttaattactaatgatttcaaggttgggaaagccgatccaactctttttactaagacttgtgatggtgatctttttgtgtgccaaatttatgtcgatgacataatctttggttctactaaccaaaagtcttgtgaggagtttagcagggtgatgactcaaaagtttgagatgtcgatgatgggcgagttaagctatttccttgggttccaagtgaagcaactcaaggatgggaccttcatctcccaaacaaagtacacgcaagacttgatcaagcggtttgggatgaaggacgccaagcccgcaaagactccaatgggaaccgacggacacaccgacctcaacaaaggaggtaagtccgttgatcaaaaggcataccggtctatgatagggtctttactttatttatgtgctagtagaccggatattatgcttagcgtatgcatgtgtgctagatttcaatccgatccaagggagtgtcacttagtggccgtgaagcgaattcttagatatttagtcgctacgccttgcttcgggatctggtatccaatggggtctacctttgacttaattggatattcagactccgactatgctggatgtaaggtcgataggaagagtacatcggggacgtgccaattcttaggaaggtccctggtgtcatggagttctaagaaacaaacttctgttgccctatccaccgctgaggccgagtatgttgccgcaggacagtgttgcgcgcaactactttggatgaggcaaacccttagggactttggctacaatctaagcaaagtcccactcctatgtgataatgagagtgctatccgcatggcggataatcctgttgaacacagccgcacaaagcacattgacatccgacatcactttttgagagaccaccagcaaaagggagatatcgaagtgtttcatgttagcaccgagaaccagctagccgatatatttaccaagcctctagatgagtcgaccttttgcaagctgcgtagtgagctaaatgtcttagattcgcggaacctggattga

SEQ ID NO: 4695 - DNA, 1739 bp, Zea mays
  Clone ID: TF_ZM5066.C5.o1.fg
atggatcctaaagggaagggaatcgtgatcaacgacaaggagaaggagtccttcgtcaacgagccaagggatgacaagtccaacgactcggactcgggtcacagacgcaaagatgggaagaagaagaagacaagacgcatcaaggagatcgtctactacgacagcgatgagtctacttcctcccaaaaggacgacgaccacaacgaatacgagagaaagaaaccggtcaattcgaacttttcttttgattactctcgtattcctcaaagtactaatgctcatttattatctattccacttggtaaacctcctcattttgatggagaggactacggattttggagtcacaaaatgtgtagtcacttgttctctctccatcctagcatatgggagattgtagaaagtggaatgcactttgatagtacggatagtcccatgtttattaatgaacagattcataaaaatgcacaagctactactgtgttgctagcctctttgtgcagggacgagtaccataaggtgagcggcttggacaatgccaagcagatctgggacaccctcaagatctctcatgaggggaatgatgtcaccttgctcaccaagatggagttggtggagggcgagcttggacggttcgcaatgataaggggcgaggagccaactcaaacatacaaccggctcaagacccttatcaacaaaataaggagctacggaagcacgcgatggacggatcacgacgtcgtccgcctaatgctaaggtcctttaccgttcttgatcctcatttggtgaacaatattcgtgaaaatcctaggtacaccaagatgtcgcccgaagaagttctggggaagttcgtaagcgggcgaatgatgatcaaggaggcaagatatgtggacgacgtgttgaacggtcctattcatgagcctcaacccattgctctcaaggcaatgaggagcaaggaggcgctaccgagcaaggtggcgcaagttgaggcggccgggctaaataatgaggagatggccctcatcattaagcgcttcaagacggcgcttaaaggtcgcaagggacagccaagcaagaccaagacaaaggagaagcgctcgtgcttcaaatgtggtaagattggtcatttcattgctaactgtcccgataatgaaagtgaccaggaaaaggggaacaaaagggagaagaagaagcattacaagaaggccaagggcgaggcacatatcggaaaggagtgggattcggattgctcctcctccgactccgacaatgaaggactcgccgccaccgccttcaacaagtcatccctcttcccctacgagcgtcacacttgcctcatggcaagggagaagaaagtaagcactcatgatactagtacttatgcttcttcaagtgaggatgagactagtgatgatgatgagatagattactcatgcttattcaagggattagatagatctaaaattaataagattaatgagttgattgatgctttgaatgacaagaatagattactagaaaaacaagaggatcttttatatgaggagcatgataaatttgttagtgcacaaaattctcttgctctagaaattaaaaggaatgaaatgctctctagtgaattatctacttgtcatgaatccatctcaaaattaaaaagtgttaatgatgatttgaatgctaagttagaaatagctagtaaatcaacatcttgtgtagaaattgttgaaacttgcaatag

SEQ ID NO: 4696 - DNA, 4998 bp, Zea mays
  Clone ID: TF_ZM5105.C7.o6.fg
atggatcctaaagggaagggaatcatgatcaacgacaaggagaaggagtccttcgtcaacgagccaagggatgacaagtccaacgactcgggctcgggccacagacgcaaagatgggaagaagaagaagacaagacgcatcaaggagatcgtctactacgacagcgatgagtctacttcctcccaaaaggacgacgaccacaacgactacgagaaaaagaaaccggtcaattcgaacttttcttttgactactctcgtattccgcatagttcaagttcacatttgctctccattccactcggcaagcccccacactttgatggagaggactacggattttggagccacaaaatgcgtagtcacctattctctctccatcctagtatatgggagattgtagaaagtggaatgcactttgatagttccgatagtcccatgttcattaatgagcaaatacataagaatgcacaagctactactgttcttctagcttctttgtgcagggatgaatacaacaaagtgagcggcttggataacgccaagcaaatatgggacaccctcaagatctctcatgaagggaacgacgtcaccttgctcaccaagatggagttggtggagggcgagcttggacggttcgcaatgataaggggcgaggagccaactcaaacatacaaccggctcaagacccttatcaacaaaataaggagctatggaagcacgcgatggacggaccacgacgtcgtccgactgatgctaaggtcctttaccgttcttgatcctcatttggtgaataatattcgtgagaatcccaggtacaccaaaatgtcgcccgaagaagtccttggaaaattcgtaagtgggcgaatgatgatcaaggaggcaaggtacgtggacgacgccttgaatggaccgatcaacgagccgcaacctcttgctctcaaagcaacaaggagcaaggaggcgctaccgagcaaggtggcgcaagttgaggcggccgggctaaataatgaggagatggccctcatcattaagcgcttcaagacggcgcttaaaggtcgcaagggacagccaagcaagaccaagacaaaggagaagcgctcgtgcttcaaatgtggtaagattggtcatttcattgctaactgtcccgataatgaaagtgaccaggaaaaggggaacaaaagggagaagaagaagcattacaagaaggccaagggcgaggcacatatcggaaaggagtgggattcggattgctcctcctccgactccgaccatgaaggactcgccgccaccgccttcaacaagtcatccctcttccccaacgagcgtcacacttgcctcatggcaagggaaaagaaagtaagcactcatgatactagtacttatgcttcttcaagtgaggatgagtctagtgatgatgatgagatagattactcatgcttattcaagggattagatagatctaaaattaataagattaatgagttgattgatgctttgaatgacaagaatagattactagaaaaacaagaggatcttttatatgaggagcatgataaatttgttagtgcacaaaattctcttgctctagaaattaaaaggaatgaaatgctctctagtgaagtatctacttgtcatgaatccatctctaaattaaaaagtgttaatgatgatttgaatgctaagttagaaatagctagtaaatcaacatcttgtgttgaaattgttgaaacttgcaataggtgtgaagattttgacattgatgcttgtagtgaacacctagtttcaatttccaaacttaatgatgaattggctagtcttaatgctcaacttaagactagcaagagtaattttgataagctaaaatttgcaagggatgcctacacaattggtagacacccctcaattaaggatggtcttggctacaagaaggaagccaagaacttgacaagccataaggctcccatctccgccaaggagaaagggaaggcccctatggctagtaatgtgcaaaagaaccatgcctttatgtaccatgataggagacaaactagaaatacttttaggagttataatacttatgatgattttgactctcatgccatgtttgcttctagttcttcctatatgcatggtagaaatatgtctaggagaaatgcttttcatcatgtgcctagaaagaattttattcatgcttctaggaaagcagtgaatgaaccttctacaatttattgtgctttaaatgcttcctttgccatttgtagaaaggataggaaaatagttgctaggaagttaggggcaaaatgcaagggagacaaaacttgcatttgggtccctaaggatatttgcactaaccttgtaggacccaacatgagttgggtttatgcatccgggggttcaagctggattatcgacagcggatgcacaaaccatatgacgggggagaagaagatgttcacctcctatgtcaagaataaagattcccaagattcaattatattcggtgatgggaatcaaggcaaggataagtctgaaacccaagggaccctcaagcgcttcctcaggagagctcaaaatgagtttgagctcaaggtgaagaagataaggagcgacaacgggtccgagttcaagaaccttcaagtggaggaattccttgaggaggaagggatcaagcacgagttctccgctccctacacaccacagcaaaatggtgtggtagagaggaagaacaggacgctaatcgacatggcgaggacgatgcttggagaattcaagacccccgagcgtttttggtcggaagctgtgaacacggcttgccacgccatcaacagggtctaccttcaccgcctcctcaagaagacttcgtatgagcttctaaccggtaacaaacccaatgtatcttactttcgtgtatttgggagtaaatgctacattctagtgaagaagggtagaaattctaagtttgctcccaaagctgtagaagggtttttgttaggttatgattcaaatacaaaggcgtatagggtcttcaacaaatcatcgggtttggttgaagtctctagcgacgttgtatttgatgagactaatggctctccaagagagcaagttgttgatcttgatgatgtagatgacgaagacgttccaacggccgcgatacgcaccatgacgattggagatgtacggcctcgggagcaattggagcaagatcaaccatcctcctcaacgatggtgcatcccccaactcaagacgatgaacaggttcatcaaaaggaggcgtgtgatcaatggggagcacaagatgatcacatgatggaggaagaagcgcaaccggcacctccaactcaagttcgagcggtgattcaaagggatcatcccgtcgaccaaattttgggtgacattagcaagggagtaactactcgatctcgattagttaatttttgtgagcattactcttttgtctcttctattgagcctttcagggtagaggaggccttgctagatccggactgggtattggccatgcaggaggaactcaacaacttcaagcgcaatgaagtttggacactggtgcctcgtcctaagcaaaatgttgtgggaaccaagtgggtgttccgcaacaaacaagacgagcacggagtggtgacaaggaacaaggctcgacttgtggcaaaaggttatgcccaagtcgcaggtttggactttgaggagacttttgctcctgtggctaggctagagtctattcgtatcttgctagcatatgctgctcaccattctttcaggttgtaccaaatggatgtgaagagcgctttcctcaatgggccgatcaaggaggaggtgtacgtggagcaaccccctggcttcgaggatgaacggtaccccgaccacatgtgtaagctctctaaggcgctctatggacttaagcaagccccaagagcatggtctgaatgccttagagactttttaattgctaatgctttcaaggttgggaaagccgatccaactctttttacaaagacatgtgatggtgatttgtttgtgtgccaaatttatgtcgatgacataatatttggttctactaaccaaaagtcttgtgaagagtttagcagggtgatgacgcagaaattcgagatgtcgatgatgggcgagttgaactacttccttgggttccaagtgaagcaactcaaggacggcaccttcatctcccaaacgaagtacacgcaagatttgctaaagaggtttgggatgaaggacgccaagcccgcaaagacgccgatgggaaccgacggacacaccgacctcaacaaaggaggtaagtccgttgatcaaaaagcataccggtccatgataggttctttgctttatttatgtgctagtagaccggatattatgcttagcgtatgcatgtgtgctagatttcaatccgatcctaaggagtgtcacttagtggctgtgaagcgaattcttagatatttagtcgctacgccttgcttcgggatctggtatccaaaggggtctaactttgacttgattgggtactcagattccgactatgctagatgtaaggtcgataggaagagtacatcgggaacgtgccaattcttaggaaggtccctggtgtcgtggaactctaagaaacaaacttccgttgccctatccaccgctgaggccgagtatgttgccgcaggacagtgttgcgcgcaactactttggatgaggcaaaccctccgggactttggctacaatctgagcaaagtcccactcctatgtgataatgagagtgctatccgcatggcggaaaatcctgttgaacacagccgcacaaagcacatagacatccggcatcactttttgagagaccaccagcaaaagggagatatcgaagtgtttcatgttagcaccgagaaccagctagccgatatctttaccaagcctctagatgagaagaccttttgcaggctgcgtagtgagctaaatgtcttagattcgcggaacttggattga

SEQ ID NO: 4697 - DNA, 1605 bp, Zea mays
  Clone ID: TF_ZM5106.C2.o14.fg
atggatcctaaagggaagggaatcgtgatcaacgacaaggagaaggagtccttcgtcaacgagccaagggatgacaagtccaacgactcgggctcgggccacagacgcaaagatgggaagaagaagaagacaagacgcatcaaggagattgtctactacgacagcgatgagtctacttcctcccaaaaggacgacgaccacaacgaatacgagaaaaagaaaccggttaattcgaacttttcttttgattactctcgtattcctcaaagttctaatgctcatttattatctattccacttggtaaacctcctcattttgatggagaggactacggattttggagtcacaaaatgcgtagtcacttgttctctctccatcctagcatatgggagattgtagaaagtggaatgcactttgatagtacggacagtcccatgtttattaatgaacagattcataaaaatgcacaagctactactgtgttgctagcctctttgtgcagggacgagtaccataaggtgagcggcttggacaatgccaagcagatctgggacaccctcaagatatctcatgaggggaatgatgtcaccttgctcaccaagatggagttggtggaaggcgagcttggacggtttgcaatgataaggggcgaggagccaactcaaacatacaaccggctcaagacccttatcaacaaaataaggagctacggaagcacgcgatggacggatcacgacgtcgtccgcctaatgctaaggtcctttaccgttcttgatcctcatttggtgaacaatattcgtgaaaatcctaggtacaccaagatgtcgcccgaagaagttctggggaagttcgtaagcgggcgaatgatgatcaaggaggcaagatatgtggacgacgcgttgaacggtcctattcatgagcctcaacccattgctctcaaggcaacgaggagcaaggaggcgctaccgagcaaggtggcgcaagttgaggcggccgggctaaataatgaggagatggccctcatcattaagcgcttcaagacggcgcttaaaggtcgcaagggacagccaagcaagaccaagacaaaggagaagcgctcgtgcttcaaatgtggtaagattggtcatttcattgctaactgtcccgataatgaaagtgaccaggaaaaggggaacaaaagggagaagaagaagcattacaagaaggccaagggcgaggcacatatcggaaaggagtgggattcagattgctcctcctccgactctgacaatgaaggactcgccgccaccgccttcaacaagtcatccctcttccccaacgagcgtcacacttgcctcatggcaagggagaagaaagtaagcactcatgatactagtacttatgcttcttctagtgatgatgagtctagtgatgatgatgacatagactattcatgcttattcaagggcttagatagatctaagatagataagataaatgaactcattgatgccttgaatgataagaataggctattagaaaagcaagaggaccttttatatgaagaacatgataagtttgtagaagcacaaaaatcacttgctttagagattaagagaaattaa

SEQ ID NO: 4698 - DNA, 4992 bp, Zea mays
  Clone ID: TF_ZM5107.C2.o5.fg
atggatcctaaggggaagggaatcgtgatcaacgacaaggagaaggagtccttcgtcaacgagccaaaagatgacaagtccaacgactcgggctcgggccacagacgcaaagatgggaagaaaaagaagacaagacgcatcaaggagattgtctactacgacgacagcgatgagtccacttcctcccaaaaggacgacgtccacaacgactacgagagaaggaaaccggtcaattcgaacttttcttttgactactctcgtattcctcaaagtactaatgctcatttattatctattccacttggtaaacttcctcattttgatggagaggactacggattttggagtcacaaaatgcgtagtcacttgttctctctccatcctagcatatgggagattgtagaaaatggaatgcactttgatagtacggatagtcccatgtttattaatgaacagattcataaaaatgcacaagctactactgtgttgctagcctctttgtgcagggacgagtaccataaggtgagcggtttggacaatgccaagcagatctgggacaccctcaagatctctcatgaggggaatgatgtcaccttgctcaccaagatggagttggtggagggcgagcttggacggttcgcaatgataaggggcgaggagccaactcaaacatacaaccggctcaagacccttatcaacaaaataaggagctacggaagcacgcgatggacggatcacgacgtcgtccgcctaatgctaaggtcctttactgttcttgatcctcatttggtgaacaatattcgtgaaaatcctaggtacaccaagatgtcgcccgaagaagttctggggaagttcgtaagcgggcgaatgatgatcaaggaggcaagatatgtggacgacgcgttgaacggtcctattcatgagcctcaacccattgctctcaaggcaacgaggagcaaggaggcgctaccgagcaaggtggcgcaagttgaggcggccgggctaaataatgaggagatggccctcattattaagcgcttcaagacggcgcttaaaggacgcaagggacagccaagcaagaccaagacaaaggagaagcgctcgtgcttcaaatgtggtaagattggtcatttcattgctaactgtcccgataatgaaagtgaccaggaaaaggggaacaaaagggagaagaagaagcattacaagaaggccaagggcgaggcacatatcggaaaggagtgggattcagattgctcctcctccgactccgacaatgaaggactcgccgccaccgccttcaacaagtcatccctcttccccaacgaacgtcacacttgcctcatggcaagggagaagaaagtaagcactcataatactagtacttatgcttcttcaagtgaggatgagtctagtgatgatgatgagatagattactcatgcttattcaagggattagatagatctaaaattaataagatcaatgagttgattgatgccttgaatgacaagaatagattactagaaaaacaagaggatcttttatatgaggagcatgataaatttgttagtgcacaaaattctattgctctagaaattaaaaggaatgaaatgctctctggtgaattatctacttgtcatgaaaccatttctactttacaaggtgttaacaatgatttaaatgctaaattagaagtagcaaataaatctaattcttgtgtagaacatgttataatttgtactaggtgtaaagattttgacattgatgcttgtagtgaacacctagtttcaatttccaaacttaatgatgaattggatagtcttaatgctcaacttaagactagcaagaatgatttcgataagctaaaatttgcaagggatgcctacacgattggtagacacccctcaattaaggatggacttggtttcaagagggaagccaagaacttaacaagccataaggctcccatctccgccaaggagaaagggaaggcccctatggcaagtagtactaaaaggaatcatgcttttatgtatcatgataggagacaaactagaaatgcttataggaattataatgcttttgactctcatgccatgtttgcttctagttcttcctatatgcatggtagaaatatgtctaggagaaatgctattcatcatgtgcctagaaagaatatcattcatgctcctaggaaagtagtgaatgaaccttctacaatttattgtgctttaaatgcttcctttgctatttatagaaaggataggaaaatagttgctaggaaattaggggcaaaatgcaagggagacaaaacttgcatttgggtccctaaagatatttgcactaaccttgtaggacccaacatgagttgggtttatgcatccgggggttcaagctggattatcgacagcggatgcacaaaccatatgacgggggagaagaagatgttcacctcctacgtcaagaataaggattcccaagattcaattatattcggtgatgggaatcaaggcaaggataagtctgaaacccaagggaccctcaagcgcttcctcagtagagctcaaaatgagtttgagctcaaggtgaagaagataaggagcgacaacgggtccgagttcaagaaccttcaagtggaggagttccttgaggaggaagggatcaagcacgagttctccgctccctacacaccacagcaaaatggtgtggtagagaggaagaacaggacgctaatcgatatggcgaggacgatgcttggagaattcaagacccccgagcgtttttggtcggaagccgtgaacacggcttgtcacgccatcaacagggtctaccttcatcgcctcctcaagaagactttgtatgagctactaaccggtaacaaacccaatgtatcttactttcgtgtatttgggagtaaatgctacattctagtgaagaagggtagaaattctaaatttgctcccaaagctgtagaagggtttttgttaggttatgattcaaatacaaaggcgtatagggtcttcaacaaatcatcgggtttggttgaagtctctagcgacgttgtatttgatgagactaatggctctccaagagagcaagttgttgatcttgatgatatagatgaagaagatgttccaacggccgcgatacgcaccatgacgattggagatgtacggcctcgggaacaattggagcaagatcaaccgtcttcctcaactatggtgaatcccccaacccaagatgacgaacaagtacttcaagtggaggcgcatgatcaagggggagcacaagatgttcaagttgaagaggaagaagcacctcaggcacctccaacccaagttcgagcggtgattcaaagggatcatcccgtcgaccaaattttgggtgacattagcaagggagtaactactcgttcaagattagttaatttttgtgagcattactcctttatctcttctattgagcctttcagggtagaagaggccttgctagatccggactgggtgttggccatgcaggaggagctcaacaacttcaagagaaatgaagtttggacgctggtgcctcgtcctaagcaaaatgttgtgggaaccaagtgggtgttccgcaacaaacaagacgagcacggagtggtgacgaggaacaaggctcgacttgtggcaaaaggttatgcccaagtcgcaggtttggactttgaggagacttttgctcctgtggctaggctagagtccattcgtatcttgctagcatatgcctctcaccattctttcaggttgttccaaatggatgtaaagagcgctttcctcaacgggccaataaaggaggaggtgtacgtggagcaaccccctggcttcgaggatgaacggtaccccgaccacgtgtgtaagctctctaaggcgctctatggacttaagcaagccccaagagcatggtatgaatgccttagagatttcttaattgctaatgctttcaaggttgggaaagccgatccaactctttttactaagacttgtgatggagatttgtttgtgtgccaaatttatgtcgatgacataatatttggctctactaataaaaagtcttgtgaagagtttagcagggtgatgacgcagaaattcgagatgtcaatgatgggcgagttgaactacttccttgggttccaagtgaagcaactcaaggatggcaccttcatctctcaaacaaagtacacacaagacttgctaaagcgggttgggatgaaggacgccaagcccgcaaagactccaatgggaaccgacggacacaccgacctcaacaaaggaggtaagtccgttgatcaaaaagcataccggtcaatgataggatcgttactttacttatgtgctagtagaccggatattatgcttagcgtatgcatgtgtgctagatttcaatccgatcctaaggagtgtcacttagtggcggtgaagcgaattcttagatatttagttgctacgccttgcttcgggatctggtatccaaaggggtctacctttgacttaatcggatactcagattccgactatgctggatgtaaggtcgataggaagagtacatcggggacgtgccaattcttaggaaggtccctggtgtcatggaactctaagaaacaaacttccgttgccctatccaccgctgaggccgagtatgttgccgcaggacagtgttgcgcgcaactactttggatgaggcaaaccctcagggactttggctacaatctaagcaaagtcccactcctatgtgataatgagagtgctatccgcatggcggaaaatcctgttgagcacagccgcacaaagcacatagacatccggcatcactttctgagagatcaccagcaaaagggagatatcgaagtgtttcatgttagcaccgagaaccagctagccgatatctttaccaagcctctagatgagaagaccttttgcaggctgcgtagtgagctaaatgtcttagattcgcggaacttggattga

SEQ ID NO: 4699 - DNA, 1685 bp, Zea mays
  unsure (1)..(1685): unsure at all n locations
  Clone ID: TF_ZmC4812_1
nnaaaaattccaaaaaaaaagaaaaaaaaaaaaaaaaaaaaaaaaaaaaaaaaaaaatcgagaaaaaaaggatcgtctgctggcatcgttccattctcctctaaaccctagccgcctagcgcctcgatctgagcagcctgtctcgcggaggtagttctggttgatttggtcctagatggcggaggaaaaagtggggcggatcttcgtcggcgggctgtcgtggaacaccacggagcgcacgctcgagcgcaccttcggtcagtacggcaaggtcatcgaggctcaggttgtagtggaaagggagacaggccgctctaggggatttggatttgtcacattttcagaacctcgggctgtggatgctgccattcggggaatgcataacggagaactggatggccgcaatatttctgtgaacaaagctgaacctaggaactctgatggctatggatatggtggtggtggtggtggtggttactcgtccggtggtagaggtggatatcgtagtggagctgatgtagttccagcagccagtgatgattgtttcaaatgtggccgtcctggacattgggctcgtgaatgcccttattcagatggaagtggtagaactggaaggtattctcccggttcaaggtatggtggtggcactggtggacgtggtgatcgctttggaggatcagatcgttttgctcgctatgatgatgatcgatatgatggtgggcgctatgtggacagcagggatacttattatggttccgggcgcgatcgctatgcaccggcagcagaacgctattctggtgacaggtacagtggtgcagatcgatatgcgtccagcggctttgccagagaaaggagctatgagagagatggagggaggtccaatggaggttactaccgtgatgaaccgaggggcactggtggctatggcagaggtggttcacgtggcggcggcggcggtgggcctgctcgctttggtgggagttaccgagataggcctgctccatacgatcgtcccagcaggggaggagcagctcgtgcttatgatgatcgttactgaagaatgttcccctgaggcagaacagagatatctgtgtatttcagctatgcactagtatttacatttgccagcttgatccttcaattccgtgttatccagcagttgcagtttgttttattagtctatgaagacaatggttcagtccatgggttattaatatgctggtaccgtaatctttaggcagtgtgctcctggttgattcgtcatgtttgtgtaactactttggagtttgcactaaataatgaactaattccagtatgtggtctttgaattggacttccgttatgcttactgagatagctgtgccgcattctgcattgaggatgaactttgcaccgataattctgagatgtgctgtgcggcaatgtgcagatcgatctgttcagctcttgatgctgctgggttttgttggtctaatatcaggaaggtttaattctgcttctactctgggctgagtaagatggtgcgaatctgagtctcagaaaaactgtggttcatgcagtcaggtgatggttatgatgttttcctgatgcagatgaatgcgttatgttactgatttactagcgatgtctggtgcagatccgcagataaacttggcttctttgctctgttctctggcttattctaa

SEQ ID NO: 4700 - DNA, 4104 bp, Zea mays
  Clone ID: TF_ZM5006.C3.o12.fg
atggatcctaagggcaaggggatggtggtcaatgataaggagaaggagtctttcttcaatgagccaaaaatgacaagcccactgactcgggctcgagtcacaagaagaaagacggatgaatatcataaagtgagcggcttggataacgccaagcagatttgggacaccctcaaaatctcacatgagggaaacgatgtcaccatgctcactaagatggagttggtggaaggcaaactaggaaggctcaagaccctcgtcaacaaaataaggagctatggaagcacgcgatggacggaccacgacgtcgtccgacttatgctaaggtccttcaccgtccttgatcctcatcttgttaactctatccgtgagaatcctaggtacaccaagatgacgcccgaggagatactcagaaagttcgtaagtgggcgaatgatgatcaaggaagcaagatacgttgatgatgcgttaaatggcccaatccatgagcctcaaaccattgctctcaaggcaacaagtagcagggaggcgctacctagcaaggtggcgcaaattgaggcggctgggctaaatgaggatgaaatgaccctcatcatcaagcgcttcaagacggcgctcaaaggtcgcaaggagcatcccaacaaaagcaagacgaagggaaagcgctcctgcttcaagtgtggtaagattggtcattttatcagtaattgtcccgataatgacagtgaccaggaacaagagaagaagagggaaaagaagaaggcttacaagaaggctaagggtgaggcacaccttggcaaggaatgggactcggattgttcatcgtccgactccgacaacgaaggactcgccgcctcggccttcaacaaatcgtccctcttccccaatgagcatcacacctgcctcatggcaaaggagaagaaggtaagcacacgaaatgctattacatatacctcttcaagtgatgatgaatccagcgatgatgaagtagactatgctagtttattcaaagggttagatagaactaaaattgataaaatcaatgaattaattgatgcattgaatgagaaaaatagacttttagaaaagcaagaagatcttttatatgaagagcatgataaatttactagcaaaaatgaatttgataaactaaaatttgcaagggatgcctacacgattggtagacacccctcaattaaggatgggcttggcttcaagagggaatccaagaacttaacaagtcataaggctcccatctccaccaaggagaaagggaaggcccctatggctaatagtactcaaaagaaccatgctttcatgtaccatgataggagatattctaggaatgttcattatgataaaagttacaatgatgttgtttcacctgccatgattgcttcaagttcttctattatgcatgatagaagtttggctaggaaaaatgtcactcatcatatgcctaggaggaatgttcatgtttatgcatccgggggatcaagctggattatcgacaacggatgcacaaaccacatgacgggggagaagaagatgttcacctcctacgtcaagaacaaagattcccaagactcaattatattcggtgacgggaatcaaggcaaggttaaaggactaggaaaaatagctatttctttcgagcattctatctctaatgtgtttttagttgagtcgctcgggtataatttgttgtccgttagtcaattatgtaatatgggatataattgcttattcacaaatatagatgtgactgtctttagaaggagtgatggttcattagcttttaagggtgtattagacgacaaactctatttagttgattttgcaaaagaggaggtcggtctagatgcatgcttaattgctaagactagcatgggctggctgtggcatcgccgtttagcacatgtggagatgaagaaccttcacaaacttctaaagggagaacatgtgataggtctaacaaatgtaaccttcaaaaaagatagaccttgtgcagcttgtcaagcaggtaaacaggtgggaagctctcatcataccaaaaatgtgatgaccacatcaagacctttggagttgcttcatatggacctcttcggacccgtcgcctatctaagcataggaggaagtaagtatggtcttgttatcgttgatgacttttcccgcttcacttgggtattctttttgcaggataaaacagaaacccaagggaccctcaagcgcttcctaaggagagctcaaaatgagtttgagctcaaggtgaagaagataaggagcgacaacgggtcggagttcaagaatcttcaagtagaagagtaccttgaggaggaaggaatcaagcacgagttctccgctccctacacaccacagcaaaatggtgtggtagagaggaagaataggacgctcatcgatatggcaaggacgatgcttggagagttcaagacccacgagcggttttggtcggaagccgtgaacacggcttgccacgccataaaccgggtctaccttcatcgactcctcaagaagacttcatacgaactcctaaccggtaacaaacccaatgtgtcttactttcgtgtatttggaagcaaatgttatattctagtgaagaaaggtagaaattctaagtttgctcccgaagctgtagaagggtttttgttaggttatgactcaaatacaaaagcgtatagggtcttcaacaaatcatcgggtttggttgaagtctctagcgacgttgtatttgataagactaatggctctccaagagagcaagttgttgatcttgatgatgtagatgaagaagatgttccaacagctgcaatacgcaccatggcgattggagatgtgcggctacaggaacaaaaggagcaagatcaaccttcttcctcaacaatggtgcatccccaactcaagacaatgaacaggttcatcaagaggaggcgtgtgatcaatggggagcacaagacgatcatgttgttccaaatggatgtgaagagcgctttcctcaacgggccaatcaaggaggaggtgtacgtagagcaaccccctggctttgaggatgaacggtaccccgaccacgttgggaaagctgatccgactttattcactaagacttgtgatggtgacttatttgtgtgccaaatttatgtcgatgacataatatttggttctactaaccaaaagtcttgtgaagagtttagcagggtgatgactcaaaagtttgaaatgtcgatgatgggcgagttgaactacttccttgggttccaagtgaagcaactcaaggatggcactttcatctcccaaacgaagtacacacaagacttgatcaagcggtttgggatgaaggacgccaagcccgccaagactccaatgggaactgacggacacgtcgacctcaacaaaggaggtaagtctgttgatcaaaaagcataccggtctatgataggttccttgctttacttatgtgctagtagaccggatattatgcttagtgtatgcatgtgtgctagatttcaatccgatccaagggagtgtcacttagtggctgtgaagcgaattcttagatatttagtcgctacgccttgcttcgggatctggtacccaaaggggtctacctttgacttaattggatactcggactccgattatgctggatgcaaggtcgataggaagagtacatcagggacgtgccaattcttaggaaggtccctggtgtcttggagttctaagaaacaaacttccgttgccctatccaccgctgaggccgagtatgttgccacaggacagtgttgcgcgcaactactttggatgaggcaaaccctccgggactttggctacaatctgagcaaagtcccactcctatgtgataatgagagtgctatccgcatggcggataatcctgttgaacacagccgcacaaagcacatagacatccagcatcactttttgagagaccaccagcaaaagggagatatcgaagtgttttatgttagcaccgagaaccagctagccgatatctttaccaagcctctagatgagaaaaccttttgcaggctgtgtagtgagctaaatgtcttagattcgcggaacttggattga

SEQ ID NO: 4701 - DNA, 3528 bp, Zea mays
  Clone ID: TF_ZM4932.C3.o9.fg
atggcgggtgaatcatggagcttggctccgtccctcctcgaccgcgtctacgagtcctccatcagaaccactacttgcgcctggccgaaatcgacggagagggagaagaagactgagaaaaggagaagagggccgccgccgaggtgtatgggagtcgcgatcccttggcagatgggtaacatgacttgtgggtacagggtacaacctctgcagagtgtaaaactgatggtcaacacccggaagggtggtggaattgatttacctcccaatcgacacactcggaggatatttagacaaccccagccacaaccaacagagatggatcctccaccaccgcctccaccatcaggagttgacccactggttgcagctcagatgaggatgatgcaacaaatggctgacactatggcagatatgcatgctcagatgcagcaggaacgccaggagatgcaccaagagcgggaggagatacgtcgagagttgcaccaagaacgagaagagatacgccaggaaaggaggacgcagcagcaacagcaacagcaacaacaaccgcaacaagcaccacagcctccaccaccacccccagttccaccccgagataagcaccgggagttcatgagccataagccaccgacatttgctagttgtcctgatccactggacgcagatgattggctaaagttcgtagagaagatgttgaacattgctcagtgcacggaccaggagaagggaagcatgtcagtcagcgagtatcgcgacaagttcattcagctctccagatatgctccggaagaggttgccaaagatgagaggaagcaggaacattttattgaaggacttaatggacctctacagtattctctggtggcacatacgtttccatcatttcagaggctgctcgataaggctctatctattgaacacaagcgtgttcagctaggagatttgaagaggaaggctatatcccaaggacaaggaagcaacagtgctacccccacttgtaccccgatgaaattctcaggacagagtgcaggcactacttgcttcaagtgtgggaagactggacattatgcaattgtttgcccacagaggattgctaccaccccagttcagaataagcagcagactccaggatctggcaagggacactctattgccagggttaatcaagtcagcactgatgctactcctgatggtgctgacatcgtgcttggtatgttttacgttaatgcaattcctgcaaccatattatttgattctggtgctacacattcatttatgtctgctcgatatgccaacacaaatgaggtacccctgctaaatatgagaaaatcaatgatagtgattacacctaaagggcctgttgaggcaaataaaatgacacgtagattgacattaacaattatgggaagagaatttatagctactgctataatattagaggcaagcagtatagatttgatccttggtatgtcctggttaagaaaggcaaaggccattatagcatgtggtaggggtaccgtagaactcaccagccctaaaggagaaagatttcaagttcaaattgcagtaaccacctcttccagacatgcgatgtactttatagttgaggagtttgttggtgacaacatccgtgtggttagagattttctggatgtctttccagaggagttgccagggatgccaccagatagggaagttgagtttgttattgatctcttacctgggactgtccctatttctaaacggccatacaagatgtctgtaaaagaattaaaggaacttaagaagcagttaacagaattacaagaggctgggttcattcatccgagttcctcaccttggggagcaccgatactgtttgtacagaagaaggatggttcacaacgaatgtgtgtggattatagatcccttaatgatgttactgtgaagaacaagtatccgttaccccgcattgaggatttatttgatcagatgagaggtgctagggtattcttgaagattgatctccgatcgggataccatcagatgaggattaggccatcggatattcccaagacaactttcttgactcgatatggattatatgagttcacggttatgtcatttggactgactaatgcaccagcttattttatgaatttgatgaataaggtgtttatggagtatttggacaaattcgtcgtagtattcatcgacgatattcttatttattccaagagttatagtgatcatgaggaacatctgagattggtgctacagaagctacgagataatcaactctatgctaagtatagcaaatgggagttttggattggcgaggtgccattccttggacatatcatttctaatggagggatttcagtagatcctgctaaagtcaaggagataatggagtggagcgtatccactacagttaaagagattcagagtttcttggggcttacaggatattatcggagatttattgaaggattctctaagattaccaagcctatgacctcacttctagagaaggaaagagagttcaagtgggacgagaagtgccaagatagttttgatcaattaaagaagaggttgatgtcgccaccagtgttgaaggatatcaaccttaggcaacgccgttggttggagcttattaaagattatgatttggagattcactatcacccgggcaaggcgaatttggttgccgatgccttgagtcggaaggaacacgttcattcagctattgtggcccagctacctgatgagcttgttgaggatttcaggagacttaacctggggatagttgctcacaatgaaggagttactattgatgtggaacctactttggagcaagaaatccgcaaaggacaaattggtgatgctaaaatacaagagatcaaggatcttattactgaaggtcgaggtccagaattcacggaggatgagcaaggcaccatatggttcaaggataggatatgtgttcctgatattgaaagccttcgtgagactattttaaaggaggcccatgactcggattattctattcaccctggtagcaccaagatgtatcaggatttgaagcagaaatactggtggtatggattgaaaagagatgtggctgcacatgtggctatgtgcgatgtgtgtcaaagagttaaggctgaacaccagaggccagctggactactgcacccacttaagatacccgggtggaagtgggaagagattggaatggatttcattaccggattgcctcgcacccagaaaggatatgatgctatatgggtgattgtggatagattgattaaagtagcccacttcattcctgtcaagactacttataaaggttctcaactggcagagttatatatggcacagattgtgtgtttacatggagtaccaaagaagatcgtgtctgatcgaggttcacagttcacctcaagattctggagaagctttcatgagaatatgaatacaaagttgaattttagtacaacctatcaccctcagactgatggacagactgaaaggactaattaa

SEQ ID NO: 4702 - DNA, 4212 bp, Zea mays
  Clone ID: TF_ZM4352.C1.o5.fg
atgtctactcaacgggaccatgtggatcctctcctcgaggaaatccccatcacatcttccggtgaggaagtggaccccaaggtcctcgacctcgccatgaagattgccgagaagatgttcctcaaaatgaaagaggaagatgctaagaaaaaggccgaagaagaagaatcaagaagaaaggccgaagaagataaaggtaaaggaaaatttgatgtcgaaggtgttgagcaaggtaagtctcaacaccgagggatcatctaccaaaagcaaagaaattttatccccaacttctcttcctccccacttggaaagttaccaactcttagtgagttgaactatgacgagtgggccgacaagatgaagtcgcatttaatcggtgtgcatcctagtctttgggagattgtcaatgtaggtatgtttaagcccgcccaaggagaagagatgactccggaaatgatgcaagaggttcatcgcaatgctcaagcagtgagcataattaaaggaagtctttgtccggaagaataccggaaagttcaaggaagagaagatgcccgtgacatttggaatattcttaaaatgtcacatgagggagatcccaaagctaagagacatagagttgaagctttagagagtgagcttgcaagatatgattggacaaagggtgagtcacttcaatcactctttgaccggttgatggtgttagtaaacaaaataagagtgcttgggagtgaagattggagtgactccaaggtcacaagattattcatgagagcatataaagaaaaggataaaagtcttgcaaggatgattagggatcgtgatgactatgaggatatgacgcctcatcaattatttgcaaaaaatcaacaacacgagtccgaagaagcccctatcaagacaagagactctcatgccttgatcactaatgaacaagacaaccccaagaagaacaaagaccacaaagcaaagaaagtggtcgagacctcaagtggtgaagatagctcaagtgatgaagacacaactatgttcatcaaaacattcaagaaatttgtaaggaaaaatgacaagttccaaaggaaaggaaagaagagggcatgctatgaatgtggccaaaccggtcatttcatagtggattgtcctaacaagaaggaacaagaagccaagaaggaatacaagaaggacaagttcaaaaagggaggcaagaccaagggatacttcaagaagaagaaatatggtcaagcccatattggtgaagaatggaactccgatgaagagagttctagctccaaggaagaggaagtggtggcaaacgtggccatccaatctacatcaagctcgcaactcttcaccaacctacaagatgactcctacactccaacttgcctcatggcaaaaggagataaggtaagcttatttagtaatgatttaccaaatgatgatgatgatgaacaaattgccatgaaaaataaaatgattaaagaatttggcttgaatggatacaatgttatcaccaaattaatggagaagctagataaaacaaaagcaactcttgatgctcaagaagacttgcttatccttgaaaaggaaagaaacctagagcttcaagaattgcttcacaataaggatgaaatgctagatgtcttgactaaggaagtatctttagtcaagataactatagagaataaagataaagaagtaattaatatgaaaacctctatagctaatcttgcaaatgaaaagaatgcacttgaaacaagcatgttaagcttgaatgttcaaaatcaagaacttcaagtgcaacttgaaaattgcaagaacatcaatgcctcatctttagtgattgaatctaagtctagctccttaaatgataatttttgcaaacattgtgccaaatatcatgcttcttgttgtctaactaaccatgcaaggaagaatagcccacaggtgaaggtcaaaggaattttgaaaagatgctctagcaatgatgggttaaagaaagttaaacccaagtacaagtccctaaagcccaacaatggaagaagggggcttgggttcaactcatccaaggaaaaccctagcacagtgcataaggggtggagatcccccaagttcatagagggaaccaccctatatgatgccttggggaggattcactcctcaaatgacaagtcacctcaagtaaaggtctactcctctggtgggtcaagttgggtgcttgacagtggatgtacaaatcacatgaccggggagaaagacatgtttcattcattgcaactaactcaagaagcacaagaaattgtgtttggagatagtggcaagagtaaggtgattggtattggtaaaattcctatctctgaccaacaatcactttcaaatgttttattggtagattctttaagctacaatttgttgtccgtttcacaactttgtggaatgggttataattatttattttctgatgtggatgtgaagatccttagaagggaggactcctcagttgcctttacgggtcgcttgaagggcaagctttatcttgttgatttcacaacaagtaaagtgacgcctgagacttgtttagtggcaaagtccgacaagggttggctatggcatcgccggctagcccatgttggtatgaggaatttggccaaacttcaaaaggataatcacatcattcgactaacaaatgttgtatttgagaaagatagggtttgtggcgcatgccaagcaggaaagcaacatggagtcccacataaatcaaagaatgtggtcacaacaaagaggccattggagcttcttcacatggacctcttcggacctatggcttacattagcattggtggtgaaactcaagagatattgaagaaattcatgaggagagctcaaaatgagtttgagctcaaaatcaagaaagtgagaagtgataatgggacggaattcaagaacacaggtgtcgaagaatttttaggcgaagaaggaatcaaacatgagttctcagttccttacactccacaacaaaatggtgttgtggagagaaagaaccgaactttaattgaagcagctagaaccatgttggatgagtacaagacacctgacaattttatgcaatcaaccgtctctatcttcacaagatctacaaaaagactgcttatgagcttctcactgaaagtcaagagctcaaagtttgctcctagagtggatgagggtttcttgcttggttatgcatcaaatgcgcatggatatcgcgttttcaacaataccaccggtcttgttgaaatagcgatagacgtgacatttgatgagtctaatggctcgcaagggcatgtttctaatggcactgcaggaaatgaagaactaccttgtgaggccataaagaaacttgcaataggtgaagtgagacctcaagaaaaggatgatgaggaaggaactttgtggatgaccaatgaggttgttgatgtgggtgcaaaggtggtgggtgacaaatcctccacccaagcaaacccatcaacctcaagtcatccaagtattgaagaaaatcatcaattccaaaggatgccaactatggtagaagatggacacgaaagtgttgatggtgaagtgcctcttgatcaagtgaatgatgaggaggagcaaatacaaagacaaccatcagtgcctcatcctagagtccatcataccattcaaagggaccatccggtggacaacatcctgggtagcatcaggagaggggtaacaactcgatctcgtttagctaatttttgtgaattttactcgtttgtttcctctcttgagccacttaaggttgaagaagcattgggtgatccggattggataatcgccatgcaagaggagttgaacaacttcacctggaatgaagtctggtccttagtccaaagacccaaacaaaatgtgattgtgactaaatgggtctttaggaacaaacaagatgaacatggcgtagttacaagaaacaaagcacggttggttgcccaaggctacactcaagtggaaggacttgattttggtgaaacatatgcgccggtagcaaggttagagtcaattagaatattaattgcctatgctactaaccatgatttcaagctatatcaaatggatgtcaagagcgcatttctaaatggaccactacaagagagggtctatgtggagcaaccaccgggctttgaagagccaaagaagccaaaccatgtttattga

SEQ ID NO: 4703 - DNA, 392 bp, Zea mays
  Clone ID: TF_LIB3059-057-Q1-K1-G9
tgaagaggaagactatcacccagggacaagggagcagtagcatctgccgtcgctatgttccaccccagggtacaccagctcgtcctggaggagggcaactgtcctaccaacgacctgctctgcatataccacaggcgactccgcatactcgccaggctgcccccactggcaccccaacgagacctactggccagggtactactacagtcaccacttgcttcaagtgtggtgaggttgggcactacgccaatgcttgtccgaagaggaatcccaacacacccgctcgaagcaatgtttaaagcaagcaacagactctggctaccggccaggggtccaataatgctagagtcaaccaaattagtgctgatgctactgttgacgatgatgatatt

SEQ ID NO: 4704 - DNA, 883 bp, Zea mays
  unsure (1)..(883): unsure at all n locations
  Clone ID: TF_LIB4756-066-R1-K1-F8
cattgggaccctcgaggccggccgggactctactctggacgcgactcgaacttaaaccctagagccgcagccccggtcgctccaccgaccccaaatctcaaatcagcgggagggaactcgcacgcgaaggctgaactcatggctcgcgtctacgttgggaacctggatccgcgtgtcacggcgcgggagatcgaggacgagttccggatgtttggggttctgaggagtgtatgggttgctaggaaaccaccagggtttgccttcattgactttgatgaccgcagggatgcacaagatgccattcgtgaattggatggtaagaatggttggagggttgagctgtcaactaaagttggtggtggccgtggccgagaccgtaacggttctgatatgaagtgctatgagtgtggtgaagctggccactttgcacgtgaatgccgcttgcggattggttcaggaggcttgggtagtggaaggcgtcgcagccgaagtcctagatatcgcagccgcagccgcagccgcagccgcagcccaaggtatcgaaggagcccaagctatagcagaagcccgcgagatcgttctcctaggaggcgaagttacagcaggtcgccactgggatctcctgcacggagtctcagcaggtcaccgccgctgccgccgcctcctcccagaaataacagcaggtcaccacctggagcccgagaagtgagcaggtcgccgccgccacctcctcccagaaataacagcaggtcaccaccggcagcccgagacgtgagcaggtcaccaccggcagcccgagacgtgagcaggtcgccaccaccacctcctgatgccagaagaagctatagtggatccccangacagcagccacaacgcgacgagt

SEQ ID NO: 4705 - DNA, 1423 bp, Zea mays
  Clone ID: TF_ZmC5918_1
tggggccctcgaggtcgtttcccgcccgaaaaagtcccagctccctcactctactctggacgcgactcgaacttaaaccctagagccgcagccccggtcgctccaccgaccccaaatctcaaatcagcgggagggaactcgcacgcgaaggctgaactcatggctcgcgtcttcgttgggaacctggatccgcgtgtcacggcgcgggagatcgaggacgagttccggactgtttggggttctgaggagtgtatgggttgctaggaaaccaccagggtttgccttcattgactttgatgaccgcagggatgcacaagatgccattcgtgaattggatggtaagaatggttggagggttgagctgtcaactaaagttggtggtggccgtggccgagaccgtaacggttctgatatgaagtgctatgagtgtggtgaagctggccactttgcacgtgaatgccgcttacggattggttcaggaggcttgggtagtggaaggcgtcgcagccgaagtcctagatatcgcagccgcagccgcagccgcagccgcagcccaagatatcgaaggagcccaagctatagcagaagcccgcgagatcgttctcctaggaggcgaagttacagcaggtcgccactgggatctcctgcacggagtctcagcaggtcaccgccgctgccgccgcctcctcccagaaataacagcaggtcaccacctggagcccgagaagtgagcaggtcgccgccgccacctcctcccagaaataacagcaggtcaccaccggcagcccgagacgtgagcaggtcaccaccggcagcccgagacgtgagcaggtcgccaccaccacctcctgatgccagaagaagctatagtggatccccaggacagcagccacaacgcgacgagtccccatatgccaatgacgcctgagattctcttagctgccccaagatgctggaaaatgctaggggcccccagcatgttttgcctgtccggtcggcacaactgtaattctgtaggatcgagtctgagattttgttccagtgttttgggtttcccttgacacatcgctgctgatacaattgtggaggcaggagcacaacgtttctgttttaagtattgactggatgactttgggcgcttgtagttgtcaaggcaggacctgatttgtgttaggcttgtattactagactgcattcgaatttggagaaagtgttcatcgtgctgtaacgtttccgtttcgagtattgactttgggcacttatagctgtcaagacatgacctggttcttgttagatttatatcactagattgcttttgaattcggacgaagtgttaatcgtgggctatgttgagatatttgtctaccttttcaggacgctttcgaagttgagataaaaaaaaaaaaaaaaagcgccctcgtgc

SEQ ID NO: 4706 - DNA, 1850 bp, Zea mays
  Clone ID: TF_ZmC5918_3
ctctcccagagtcccagctccctcactctactctggacgcgactcgaacttaaaccctagagccgcagccccggtcgctccaccgaccccaaatctcaaatcagcgggagggaactcgcacgcgaaggcaagtacgctttagatcccccattgcttctggctactaggccagcgcgcctcgattttcttctccgttttggtctaattcgtgaggaatttgggttttctcggtggagcttggttccgctccgccttggagtggatttcggtgacttctttgttcagattgtttcgctcttgcaggctgaactcatggctcgcgtctacgttgggaacctggatccgcgtgtcacggcgcgggagatcgaggacgagttccggacgtttggggttctgaggagtgtatgggttgctaggaaaccaccagggtttgccttcattgactttgatgaccgcagggatgcacaagatgccattcgtgaattggatggtaagaatggttggagggttgagctgtcaactaaagttggtggtggccgtggccgagaccgtaacggttctgatatgaagtgctatgagtgtggtgaagctggccactttgcacgtgaatgccgcttacggattggttcaggaggcttgggtagtggaaggcgtcgcagccgaagtcctagatatcgcagccgaagccgcagccgcagccgcagcccaagatatcgaaggagcccaagctatagcagaaggtaatttgctaatgacaccaattcaccacatgtattcatccagtagttttaattaagggttgggaaacacgacctagaaatcctaaaacttttgagaacgaagcaaaatttcagagataacacgttccctttaaccaagtgagtatccactatccagtatggtctcagatttgttggatagtatttaaccaaacattcgactatgcattttgactttttgagtgttgttctttatcttgcattggtactatataatacaatgcattctacaccccctcccacctgttatagctttgttagcgttggcctaatatttcaggggaacatgttgagagacttcataaaatacagatcaatgtcttcttgcctaactagcagccttttcaatgcgttattttatgttcatcctgaaaacaaatgttcggtttttccggagctacagcccgcgaggtcgttctcctaggaggcgaagttacagcaggtcgccactgggatctcctgcacggagtctcagcaggtcaccgccgctgccgccgcctcctcccagaaataacagcaggtcaccacctggagcccgagaagtgagcaggtcgccgccgccacctcctcccagaaataacagcaggtcaccaccggcagcccgagacgtgagcaggtcaccaccggcagcccgagacgtgagcaggtcgccaccaccacctcctgatgccagaagaagctatagtggatccccaggacagcagccacaacgcgacgagtccccatatgccaatgacgcctgagattctcttagctgccccaagatgctggaaaatgctaggggcccccagcatgttttgcctgtccggtcggcacaactgtaattctgtaggatcgagtctgagattttgttccagtgttttgggtttcccttgacacatcgctgctgatacaattgtggaggcaggagcacaacgtttctgttttaagtattgactaacgtttctgttttaagtattgactggatgacttgggcgcttgtagttgtcaaggcaggacctgatttgtgttaggcttgtattactagactgcattcgaatttggagaaagtgttaaaaccccccccccacc

SEQ ID NO: 4707 - DNA, 266 bp, Zea mays
  Clone ID: TF_jC-zmX700382080a1
gagctctttagtcggcggtcgcccttctttactatgccgttctttgaggctgctcggacgttttaaggcgttcgatgagcgtactgggccgcatactcatgccacaggcgaacggtgcgactatcatctcctcctcacggatgcctatttgaaagctcgaaagaagaataattggacgatcggcaaatgcttcaactgtggcaaccgcggtcactttgcacaggactgccccaagccgaagaaggaagaggcactattcgacaatg

SEQ ID NO: 4708 - DNA, 626 bp, Zea mays
  Clone ID: TF_ZmC263852_1
ccctctctctctctcccgcacgcgcacccggaagcctcgcttccgccgccgccgtcgctgccgctccgcgccgcgacgcagactcgccccgtgctacgctacgcccggagctcccggctctcgtcggcgcagggatttgttcaccatggcccgcttgtatgttggcaacttggatgcccgggtgactgctggggaacttgaagacgagttccgtgtgtttggagttttgcgaagtgtctgggttgcacgtaagccacctggttttgcgtttatcgattttgatgacaagcgggatgctgaggatgcacttcgtgatctagatggcaagaatggatggagggttgagctgtctcgcaatgaccgtggtgaccgtggaggtcgtggtggtggtgctggtggcggcggcggcggtcgtgatcgtggtgggtctgatatgaaatgctatgaatgtggtgaatctgggcattttgctcgtgaatgtcgtctgcgtattggttctggtggtctgggcagtggaaggcgtcgcagcaggagccgcagtcgcagccgcagtcctaggtaccgtaggagtccgagctatggcagaagaagttacagccctcgtgatcgctctccaagacgccgca

SEQ ID NO: 4709 - DNA, 828 bp, Zea mays
  unsure (1)..(828): unsure at all n locations
  Clone ID: TF_ZmC518624_1
ctcttccgcccgcggcggctcaaacttaaaccctagagccgctcccctcctcgcctccgaagcgctcgccacccgattcgcgagtcccctcctcccagggaggcgcttccgcgaaggtccgctgctgcggtcatggctcgcgtctacgtggggaatctggatccgcgcgccactgcgcgcgagatcgaggacgagttccgcgtgtttggggttctcaagagtgtgtgggttgctagaaagccaccaggatttgctttcattgactttgatgagaccagggacgcaaaggatgcaattcgtgaattggatggcaagaatgggtggagagttgagctgtcaaccaaatctggtagtggccgtggccgagaacgtgaacgctctggaggttctgatatgaagtgctatgagtgtggtgaaagtggccactttgcacgagagtgtcgcctacggattggttctgggggcctgggtagcggaagacgccgcagccggagcccgaggcaccgcagccgtagccgtagcccaagataccgcaggagcccaagctatggcagaaggagctacagcccacgggatcggtctcccaggaagcgaagttacagcagatcaccaccgcctccccgggcgcggagtatcagcaggtctccaccacctgcccgtgcgcgaagcatcagcaggtctccaccgnncggccccgtgngcgaagcatcagcaggtcaccgccgnctgcccgtgcgcnaaacatcagcaggtcaccaccgcctcctcgcgcagaaagcatcagtaagtcacaccgccagcccgtgacgggaagctatagcaggtccc

SEQ ID NO: 4710 - DNA, 715 bp, Zea mays
  Clone ID: TF_ZmC518624_2
ctcttccgcccgcggcggctcaaacttaaaccctagagccgctcccctcctcgcctcctcagcgctcgccatccgattcgccagtccccaatccccccagggaggagcttccgcgaaggtccgctgctgcggtcatggctcgcgtctacgtggggaatctggatccgcgcgccactgcacgcgagatcgaggacgagttccgcgtgtttggggttctcaagagtgtgtgggttgctagaaagccgccaggatttgctttcattgacttcgatgagaccagggacgcaaaggatgcaattcgtgaattggatggcaagaatgggtggagagttgagctgtcaacaaaatctggtagtggccgtggccgagaacgtgaacgctctggaggttctgatatgaagtgctatgagtgtggtgaaagtggccactttgcacgagaatgtcgcctacggattggttctgggggcctgggtagcggaagacgccgcagccgaagcccgaggcaccgcagccgtagctgtagcccaagataccgcaggagcccaagctatggcagaaggagctacagtccacgggatcggtctcccaggaagcgaagttacagcaggtctccaccgcctgcccgtgcgcgaagcaccagcaggtctccaccgcctgcccgtgggcgaagcatcagcaggtcaccgccgcctgcccgtgcgcgaagcatcagcag

SEQ ID NO: 4711 - DNA, 828 bp, Zea mays
  Clone ID: TF_LIB4738-138-A1-K1-B7
cggccgggctctcccaaatccttctcctccgcgccgccacagccgggcgcgcctccccgatcgagatccaggagatatgcctcgttatgatgatcgccatgggaatacacgcttgtatgttggaagattggcccctcgcacccgttcccgcgacctagaatatcttttcagcaaatatggaaggttttcggttttttacccaaccatggaggtctgtggtggaagggtgcccttggtggaattggtggccattgttccgatatttgtggaggactttggggtggccattgttccgatatttgtggaggactttggtgaagggcgcccttggtgtaatcttattgactgttgtagatgaagttgcaagttgatgcatttgagtacttgactcatgtcagcagcttactgtttgtggaaactatttgcgcagaatacgtgaagtggagttgaagcgtgactatgcattcattgaattcagtgacccccgtgatgctgatgatgcgcagtacaacctagatggcagggaagtcgatggaagccgtattattgttgaatttgctaaaggagttcctcgtggttctggtggttcacgtgagtacatgggaagaggacctccaccaggaacaggtcgttgttttaactgtggaatggatggtcactgggcaagggactgcaaggctggtgactggaagaacaatgctaccgctgtggtgaatcgggccatatagagagaattgccagaacagtcaagaaatctcaggcgtgataaaagctattcacggctccatcccccccgtggggggacgtggccgcagccggagctacagc

SEQ ID NO: 4712 - DNA, 5769 bp, Zea mays
  Clone ID: TF_ZmC74_112
atggcaacataccaggagtttctgagcacgcagccgcccttgttcaccaaggcagaggatccgttggacgccgacgtatggcgtcacgtcgtcgagtccaagtttcccctcctcacaggagactgccctgatgaggccaaggctcgctttgccgcacagcagtttcgcggccctgctcggacttggtgggaccactttcgtgctatgctccccgctgatcgtgaagtatcttgggaggaattcaagactgccttcagaggacaccacatcccagctggcattcttgatcggaagttgaatgaatttctggcccttaatcaaggaacccgcatggtactgcagtatgcgcaagccttcaacgacttatgccagtatgcagggtatcatgctgattctgatgaaaagaagagggatcgcttccgcaggggtctcaataccaagctgcgggaacgactcaacactgtccgggctgatagcttcaatgagttggtcaacatggccatctcccaggaagattgcattgttgctcaccgggcagagaagaagagaaaggcaccaatggcagcaccatccgctcaggctcagaggttccggattgtttctcacaatcagagcaggggttttcagcagcaggcaggcagatgggtgatcaggccacctcagcagcagcagcaggcacccaaccgctacccagctcccgccccaaggaacaatcagcctccgcagcagcagcagttccgccagggcaatgggaacaagtgtttcacttgtggcagtgtgggccactatgccaagaattgtcccaggaaccagcagaggcagatgccagcaccaaatcaagacaagggaagaaagcagaaggtgcaagttaggcaagggaagctcaacttcactactctggaggaagtacctgaaggagctcctatcatgaccggtaccttttcagtttataatcaacctgctttaattctgtttgattctagtgcatctcatagtttcattagccaaaagttcagtgctaaatgcaaactgccattctctcactcaaaagggtcattcatgatagtcacacctgggggtaaaattgcaactaaccaattaaaccaaagtgtgcctattcaactgggaagccacattatcaaaaccactcttcttgtgttgggattggaaaatgtggacattattctaggagcaaattggatgaccttgcaccaagttgtgcttgatgtagccagtcgtaccgtggaagttaattctccgttctgcgggaatttcactttaattctgcctagtcgagattctactcagtcgtgtgctttctctatgacggagttacctctgaaaaagatcccagtggtatgtgagtatgcagatgtctttcctgatgaattgccaggaatgccacccgaccgggatatcgaattcgccatcaagttgcaaccggggacggccccaatttctaagaggccctaccgaatgccacccgctgagttggcagaattgaagaagcaattgcaagagttgctggataagagttttattcgcccaagcacttcaccttggggatgtccagcactgtttgtgaagaagaaggatgaaagcttgaggctgtgtatagattaccgccctcttaatgcggtaactatcaagaacaagtatcctttgccttgtattgatgttctttttgaccagttggtcggggccaaggtattttccaagatagaccttcgctctggctaccatcagatcaaaatacgagcatgtgatattccgaagacggcattctcaaccagatatgggctatatgaattcttggtgatgtcattcgagctgacaaatgcaccagcatatttcatgtatctgatgaattctgttttcatgccggaattggacaagttcgtggtggttttcattgatgacattttggtgtactcaaagaacgaagaagaacatgccgggcatttgcatgtagtgcttcaacgtctgcgagagcaccacctttatgccaagttatccaagtgtgatttttggctaaaggaaatcaaatttttgggtcacactatctctcaggctggaatagctgttgatcctgataaagtgcaagaggtgatgaactggaggccaccaacaactgttcgccagattcggagttttctgggattagttggttattacagaagatttattccggacttctctcgaattgcgaagcctattactgagttgctgaagaaagaagtcaagtttgtttggagtcagaagtgcgaagatgccttccatgcattaaggcagcatctgaccacagcaccaatattggcgcaacccaacagcagcaagccttttgatgtatactgtgatgcctctggcaccgggctaggttgtgtcttgatgcaagacaaccgagtcattgcttatgcctcaagagcactcaggcctcatgagcaaaactatcccactcatgacctcaagttggcagcagtggctgatctcaacatgaggcagagaagatggctagagctgatcaaggattatgacctggaggtacattatcacccaggaaaagctaatgtggtagcagatgccttgagtcggaagttgcaatgcaattgtgttctgatggattctcgcattaacaccttgtgtgatgagttgagcaagatgcaaattgaagtgattccttctggttctttgtctcacatttctgttgagccagctttgcaagaccaggttatcatggcccagcttagtgacaagggagtgcaatttatcaagaagaatctccatcagaaggttgagaagtataattgtttccgccaggatgagaaaggtgtgctatggttcaaaagcagattggtgattcctaaagatcaggacctcaagaggaaaattttggatgaggctcatctctccaaattctctatgcatccgggaagcaccaagatgtaccatgatctgaagcctttgtactggtggaccagaatgaagagggagataggccagtatgtatcagaatgtgacacctgtcagaggataaaggcaagccacttgaagtcagctggagctttgcaaccattgtccgtaccttcgtggaagtgggacgatatcaacatggatttcattgtgggtctgcccaacacctctcgtcatcatgattcgatttgggttattgtggaccgattgacgaaagtggcacattttcttcctgtgcacaccactgataaggctcagaaatatgcagaattgtatattgaccggatcgtgtgtttgcacggattaccccggaccattgtttctgaccgaggagcccaatttgttgccagattttgggaacaattgcaggagtctttgggaaccaagctaatcaggagttcagcttaccacccacagactgatggtcagacggaaagggtaaaccaaattctggaggatatgctgagagcttgtgcaatcgattgtggcaagaactgggataagcacctctccttggcagagtttgcttataacaatagttatcaatccagcctaaagatggcaccttttgaagctctctatggaagaaggtgcaggacaccactcaattggtctcaacctggtgagagagaagtttttggacctgacttagtgactgaagccgaaaggaaggtcaagctaatcaggaagaatctagaagctgctcatgccaggcagaagagctatcatgataaaagaaggaaacctctccagttcgaggtgggaagttttgtatacctcaaggtatcacccaccaagggagtgcagaggtttgggatcaaaggcaagctagcccctcgttacattggaccttatgagatcatagaagcatgtggacccgtggcatacaagctgaagttaccttccaagatgtctgccattcacagtgttttccatgtatctcagctgaagaagtgtgttcgattgccgaccgagatcatagcagagccagaattggagatagagccagatctatcgtaccaagagtacccctccaagattctggattgcaaagaaagatcaactcgggctaaatcgatcaagatgtataaggtccagtggagtaatcactcagaggaggaagctacttgggaaaccgaggaattcttgagatccaacttccccgattgcctacctaaggaagctgattgcaatcttgccgacggagagtacgtgctcatccccgagcaaggacctgtccaagaggaggaccaggagcaggcttcagagactgctattgaggatctccccgcagccccagcaattgaaggcaagccccgctatggtgggtacaagtgcggtcactgcacggcggcagccggggtcagtggagcattgtatgccaaggcggtaccattcaggaaatggttgacgcccaggacagccatcaagtcacaagttctggcagactttgtcgtcgactggactgggccaataacacagccggacccgtccgcagagaaggtttggacaatccattgcgatggcgcatggtgctacgcgggggcaggcgctgctgcagtcattacctcacccaccggggtcaagcacagatacgcggcacgcctcagctttgctctggaatctgacagatgcactaacaacatagcagaatacgaagctgttatcctcggcctccgcaagctaagggtctttggtgtcactacctgcataatcagaacagactccaaggtagtcgccggccaggtcaagaaagactatgcagcaaaggaccccgcactcatgcaatacctcgcggctatccgtagtctcgagagacagttcaagggtttcaccttgcagcatgtggaccgagccaagaatgaggaggccgacgcattagtcaaggctgccgccaaaggcgagtccctgccctccgacgtgttctaccatgttatcggcacgccagccgtccgcagccccaaagggctccaaataaccaatgacagcgagggccaccgcatagtcaaccttattatgaccgaagactggcgagcaccaataaccctgtttctacaagggtactaccatccaaccgacatcaacgaggccaagcgcctcaagcatcgaagccgggacttcgcgctgattgaaggccagctttacaagaagggggtcagtcaaccaatgcttaaatgcgtcaccgagaccgaaggcgtccaaatcctgtgcgaagtccacagcggtacttgcggctctcacgcagggccaagggccctagccgcaaaggtgatccgtcaaggtttctactggcccgcaatgatctgcgccgcaaatcgggtcacaaggtcctgcaaagcctgccagaaattttctcctcgatcaggcagcccttcgcaattcacaaaactaatcgcccatacatggcctctccagcgctggggcctagacattgtcgggcccctgcccacgactcaggggaacctcaagttcaccttcgtcgctgtcgagtattttaccaaatggatcgaggcgagggctatatccacaataacatcaaagactgcacagaaattcttctggcaaaacattgtttgccgcttcggagtaccgtctgaactcacagttgacaacgacaagcagtttgacagccaagacttcaaggatttctgcttctccattggcaccaagcttgccttggcctcggtataccacccgcagtccaacggagttgtggaacgcgtaaatggcaaaaatttcacagctgtcaagaagatgctcctcgacgaaaaagggcaagtgggccgatttgttacctga

SEQ ID NO: 4713 - DNA, 184 bp, Zea mays
  Clone ID: TF_LIB3354-024-P1-K1-H6
tttcgttgagcaacataagaagggtctgtgatggagaggaggatagttctcactgcaccatagcatgctcaaagaagaggcgaacatgttatgaatgtggcatccctgggcacctctcttctaattgcccaaacaagaaagatcctgaatttatttctgatgaaaagaacactaatgttgattc

SEQ ID NO: 4714 - DNA, 478 bp, Zea mays
  Clone ID: TF_LIB3068-029-H3_FLI
ctaagatctctcattttccttaaccccactcaagttcaattaattcgtggtaatcctagatacactcaaatgacccccgaggaagttatcgggaattttgtgagctttgaatgtatgatcaagggctccaagaagatcaacgagcttgatgaaccctccacgtccgaagcacaaccggtggcgtttaaggcgacggaggagaagaaggaggagtctacaccgagtagacaacaaattgacgcctccaagctcgacaatgaggagatggctttaatcatcaaaagctttcgccaaatcctcaagcaacggaaggggaaggattacaaaccccgttccaagaaggtttgctacaagtgtggtaagcccggtcactttatagctaaatgtccattatcaagtgatagtgacaggggcgacaacaagaagggaaagaggagagaaaagaagaggtaccacaagaggagggcggccgctcgcg

SEQ ID NO: 4715 - DNA, 2338 bp, Zea mays
  Clone ID: TF_ZmC119_821
atgtcgggagcatccgccaagagggagatcaggaccggcgagaagcccgccacaagccatgggaaggctccatccggggagtccgccaataaggtgaagggatccccttcacacgacaagtcgcgtcggagcggtgacaagaagaagaagatgaagaaggtggtctactacgagaccgactcttcgtcgccatccacctccggctccgacacgccgtccgtaacttctaagcgccatgagcgcaagaagtttagtaagatccccctacgctaccctcgtatttccaaacgtactccattactttccgtcccattaggcaaaccacctatgtttgatggtgaagattataatatgtggagtgataaaatgaggcatcatctaacctcactccacactagcatttgggatgttgttgagattggagtacaggtaccatcaccgggggatgaagactatgattcggacgaggtcgcccaaatccgacacttcaactctcaagccaccactatactcctcgcctctctaagtcgagaggagtataacaaggtgcaaggactaaagagcgccaaggagatttgggacgtgctcaagaccgcgcacgaaggagatgaggtgactaaaatcaccaagcgggagacgatcgaggggaagctcggtcggttccgactcaaccaaggcgaggacccacaagccatgtacaaccgcttgaagaccttggtgaatcaagtgcgctacctcgggagcaccaaatgggatgaccatgagatggtcaaggttattctaagatccctcgttttccttaaccctacgcaagttcaattaattcgaggtgatcctagatacacgctaatgtctcccgaggaggtcataggtaaatttgtgagctttgagctaatgatcaaaggctccaaaaagatcatcgagcaaggcgactcctccatgcccgaagcacaacccgttgcattcaaagcaacgaaggagaagaaacaagattctaatccaagtagaatccccatcgacgcctccaagctcaacaataaggagatggcgctcatcatcaagagcttccgtcaaatcctcaaacaaaggaaggggaaatattacaagccccgttccaagaaggtgtgctacaagtgtggtaagcccggtcatttcattgctaaatgtccattatctagtgatagtgacaggggcgacgacaagaaggaaaagaggagagaaaagaagagatactacaagaagaagggcggtgatgcccatgtgtgccgcgagtggaactccgacgagagctcctccgactcctcctccgacgaggacaccgccaacatcgccgtcaccaagggcctctgtcacacccggattttaggggtccaaaacccgggcgcgaacataatcaccagaggttgcgcatctttacccacaagtcatgttacccatctgccaagggatcgtgacttcccatacacctctaccgaggaggcgaggcagggtaacactacgaggcctttacaaagttccactagcttcagaaaacccgctacagttataggaagctccaatgcagggttcttgcctgaccgccatcgcagcaaaatcaaccaaggacctccctacactgaccactcccctactgcccttgcccctttcgggtaaggtagtcatccactagctttcctaattaatcagccaagggcgtccataaacccttgtggtagcactgttttcccgagtggttctccatgttccaattaacataatggtcttaacatgaacaataaataacaactgataacaaaagtgtaatcatgaataatgtatctccatacccaaaaccacatatagcactagcaagtactacccagaaagttcagtggtaaacaaggtataaagatagacaaactagggtatcctattgggtcccatcaaaattaacctatgcagatcattatgattaattagaacatgactgggtaaaaagaagtgatcaagggcacaacttgcctgggacttgagattccaggtaacaacttgcttttcagatgactcgtgacctcgcgctagtcgtagcaatacaaacaaacatggtataggcaaaattaacatcacaccaaacatagcaacaaactgcataataataatctactcgtcactacgagatcgtgggatcgagaactactaagatcggagtcgtggttaaggagttatgattttatagatgattcatgtgattaaaatattaaactatatcataaattggttattatagatcatatgagaaattattttataaataattatcttaactttaatctagatccccggcccggccggcctcgag

SEQ ID NO: 4716 - DNA, 2385 bp, Zea mays
  Clone ID: TF_ZmC31816_2
ctaaagacagttgtagcccattttgcataattgagaaactgaaagcaagttatagtctaaagaatcttcaagaaaaacattagaaatagaatggtcaggagatatagcaattttaccaagtcctttgaccaaactttgattctcatccccgaatgtgatagctctttggggatcatggtttttctcataggaggagaacatctttttctccccagtcatgtggtttgtgcacccgctatcaatgatccaacttgagcccccggatgcataaaccttaggttcccaaacacaagccttggagcccttgtgtttgcccccaacatatttggcaattactttgcctgatttgttagttaaaacatatgaagcatcaaaagtcttaaatgaaacattagtttcatttgatgcaataggagatttctttttaggcaatttaacatgggttgattgcctagagctagaagcctcatttttatacataaaagcatgatgtgtaacattatgaggtttcctagcatgaattctcctaattttgtgctcgagataaccaacatgatataaaatatagcccttgttatcctgagccatgggagccttacccttaacaaaaatagacaatcttttaggggtattaagcttgacattgtctccctgttggaagccaatgccatccttaatcccagggcgtctcccattatagagcaggcttctagcaaatttaaatttttcattttctatctcacgctcaataattttaacactaagttgagctatgtgatcattttgttgtttagataaagctaggtgatcatggatagcatcaacattgatgtctctacatctatttaaatctttagccttagatattaatttatcattctcaatcctaagactagaaagtgattcattcaacttgtcaattttagcaatcaaactagcattatcatttttaagtttgacaagagaatcatcacaaacatttaatttctcaaccttagcaattaatttaacattctcatttctaaggttggagatagtatcatggcaaatgttaagctcactagtcaatttttcacatttttctatctcatgagcataagcatttttaaccttaacgtgcttcttgttttccttaataaggaagtcatcttgcctatccttgagtccatccttctcatgaatagcactaattaattcattcaatttttctttttgttgcatgttgaggttggcaaaaagtgtgagcaaatcatcctcatcatcactagagctagcctcatcactagatgttgcatatttagtggaagctctagattttaccttcttctttttgtcgtcctttgccatgaggcacttatggccgacgtttgggaagacaaggcctttggtgacggcgatgttagcggcatcctcgtcggatgaggagtcggtggagctctcatcggagtcccattcccgacacacttgggcatcgccgcccttcttcttgtagtatctcttcttttccctcctctttcccttcttgtcgtcgcccctgtcactatcacttgataatggacatttagcaataaaatgatcgggcttaccacacttgtagcaaactttcttggagcggggcttgtaatccttcccccttctttgtttgaggatttggtggaagctccagatgatgagcgccatttcctcgttgtcgagcttggaggcgtcgatggggagcctacttgacgtagactcttctttcttttcctccgtcgctttgaatgcgacgggttgcaccttgaccatttcatggtcatcccattttgtgctcccgaggttgcgcacttgattcaccaaggtcttgagccggttgtacatggcatgtggctcctccccttggttgagcatgaatcgactgagctccccctcgatcgtttcccgcttggtgatcttggtcacctcatctccttcgtgcgcagtcttgagcacgtcccaaatctcttttgcactcttcaatccttgcaccttattatactcctgcgctccatactcaacaatatcccatatgcttttgtggagtgaggttaggtgatgcctcattttatcactccacatagaataatcttcaccgtaaaaaaccggtggtttgctatacttcttgcgctcatggcacttagaagtggcagatgtcgattcggagtcggaggtggagggtgacgaagagtcggactcgtagtagaccactttcttcatcttcttcttcttgtcacctctccgttgtgacttgatggaggaagcagattcctccttgtgcttgtgggcggactccctcgaatgggttctccccgagcttgcggacttgtcgccactggtccctatctcccttttggcggatgctcccgacat

SEQ ID NO: 4717 - DNA, 1445 bp, Zea mays
  Clone ID: TF_ZmC31816_27
gataaccagcatgatataaaatatagtccttattatcctgaggatggtagccttgcccttaacaaaattagacaatcttttagtggcattaagcttgacattgcctccctgttggaagccaatgccatccttgatgacagggcgtctcccactatagagcatgcttctagcaaatttaaatttttcattttctaagtcatgctcattaattttagcactaagttgagctatgtgatcattttgttgtttaattaaagctaggtaatcatgaatagcatcaacattaatgtctctacatctagtacaaatagaaacatgatcaacactagaagttgagggtttgcacacatttagttcatcaatcttagcatgtaacatggagtattcatttctaagattggaaatagcatatcagcaaacacattaaattctttgccttagcaaataaattttcaatttcaaatttaaaggctgcaagagaggcattcaatttatcaatcttaacaatcaaactagcattatcatttctaagattggaaattgaatcatcacatacatttgatttctcaaccttaacatttaatttagcattttcatttctaaggttagaaatagtgtcatggcaaatgttaagcttactagttaattttttacatttttctacttcctgagcataagcatttttaaccttaacatgcttcttattttctttaattaggaagtcctcttggctatccaagagttcatccttctcatgaatagcactaatcaattcatttaatttttctttttgttgcatgttgaggttggcaaaaagggtgagcaagtcatcctcatcatcactagagctatcctcatcactagatgttgcatacttagtggaggatctagagtcgaccttcttccttttgccgtcctttgccatgaggcattgtgcccgacgttggggaagaggagacccttgttgacgacgatgttggtggcgtcctcgtcggaggaggagtcggtggagctctcatcggagtcccactcccggtatacatgggcatcgccacccttcttgtaatatttcttcttttctttcctctttcccttcttgttgttgcccctatcactatcacttgataatggacattttgcaatgaaatgaccgggcttaccacacttgtagcaaactttcttggagcggggctcgtagtctttccccctcctttgcttgaggatttggcgaaagctcttgatgatgagcgccatttcctcgttgtcgagcttggaggcgtcgatggggagcctacttgacgtagactcttctttcttctcctccgtcgctttgaatgcgacgggttgcacctcgggtgtggaggtggcgcctcgctcgattttaattcactctaactcaaattttagaaccaagttgtgttgtttgagttaagttttgcagatca

SEQ ID NO: 4718 - DNA, 530 bp, Zea mays
  Clone ID: TF_ZmC31816_40
cttgattttaccttcttctttttgccctccttggccatgaggcacttgtggccgacgttggggaagagaagacccttggtgacggcgatgttggcggcgtcctcgttggaggaggagtcgatggagctctcgtcggagtcccactcgcggcacacgtgggcatcaccgcccttcttcttgtagtgtctcttcttctcctttcttctccccttcttgtcgtcgcccctgtcactatcactagataatggacatttagcaataaaatgaccgggcttaccacacttgtagcatactttcttggagcggggcttgtagtctttccctctcctttgcttgaggatttgacggaagctcttgatgatgagcgccatctcctcgttgtcgagcttggaggcgtcgatgggtgttcgacttggtgtagactcctcctccttctcctccgtcgccttgaatgcgaccggttgtgcctcgggtgtggaggaagcgcctcgctcgatgattttctttgagcctttaatcattagctcaaa

SEQ ID NO: 4719 - DNA, 2825 bp, Zea mays
  Clone ID: TF_ZmC3310_3
atgtcgggagatcacgccaagaagatggtgatcggcggtgagaagaccgctacaagccacgggaaggctctgtcgagggagtccgccaacaagaagaaggatggatcaccttcacgcattcaatcgcacaagagtggcgagaagaagaagaaaatgaagaaattggtctactacgaggccgactcttcctcgccctctacatccggatccgacaccgcgtccgtcacttctaagcgccaagagcgcaagaagtatagtaagatccccctacgctatcctcgcattgctaaacatgctccattactttccgtcccattaggcaaaccaccgacatttgacggtgaagattattctaggtggagtgatattatgagatatcacataacctcactccacaaaagtatatgggatgttgttgagtttggtgtacaggtaccatccgtatgggatgaagattatgatgaggacgaggtggcccaaatcgtgcacttcaactcccaagccaccactatactcctcacctctctaagtcgagaggagtataacaaggtgcaaggattgaaaagcgccaaagagatttgggacgtactcaagaccgcacacgaaggagacgaggtgacaaaaatcaccaagcgggagacgatcgagggggagctcggtcgtttccggcttcgccaaggggaggagccacaagaaatgtacaactggctcaagaccttggtgaaccaagtgcgcaacctcgggagcaaaaaatgggatgaccatgaaatggtcacggaagtaataggaaaattcgtgagctttgagttgatgatcaaaggctcaaggaaaatcatcgagcaagatggtccctccactcccgaagcacaaccgatcgcattcaaggcgacggaggagaagaaggaagagtctacatcaagtagactccccatcgacgcatacaagctcgacaacgaggagatggcgctcatcatcaagagcttccgccaaatcctcaagcaaaggaggggggaggattacaaattccgctccaagaaagtgtgctacaagtgtggtaagcccggtcattttattgcaaaatgtccattatcaagtgatagtgacaggggcgacgacaagaagggaaagaggagagaaaagaagagatactacaagaagggaggcgatgcccatgtgtgccgcgagtggaactccgatgagagctcctccgattcctcctccgacgaggacgccgccaacatcgccgtcaccaagggactcctcttccccaacgtcagccacaaatgcctcatggcaaaggacggcaaaaggaagaaggtaaaatcaaagtcctccactaaatatgcaacctctagtgatgaggataattctagtgatgaggaggataatttgcgcaccctttttgccaacctaaacatgcaacaaaaagaaaaattaaatgaattgattagtgctattcatgagaaggatgaactcttggacacccaagaggacttcctaattaaggaaaataagaagcatgttaagattgattcaaatgtttgtgatgtttcaattcccaatcttagagatgataatgttagtttacttgctaagattgaagaattgaatgtctctcttgctagccttaggaatgagaatgaaaaattaattgctaaggctaaagacttagatgtttgcaacattaccatttccattcttagaagtgaaaatgacattttacatgctaagattgttgaactaaaatcttgtaaaccctctacatctaccgttgagcatgtttccatttgcaccagatgtagagacattaatgttgatgctattcatgatcacctggctttaattaagcaacaaaatgatcacatagctcaacttgatgccaaaatttctgagcatgacttagaaaacgaaaattttaaatttgccagaagcatgctctatagtgggagacgccctggcatcaagggtggcattggcttccaacagggaggcaatgtcaaacttaatgcccctcctaagagattgtccaactttgttaagggcaaggctcccatgcctcaggataacgagggttacattttgcaccctgccggttatcccgagcgcaaaattaggagaactcactctaggaagtctcactctggccctaaccatgcttttatgtataagggtgagacatctagctctaggcaaccaacccgtgctaagttgcctaagaagaaaactcctagtgcatcaaatgatcctgacatttcatttaaaacttttgatgcatcttatgttctgactaacaaatccggcaaggtagttgccaagtatgttgggggcaagcacaaggggtcaaagacttgtgtttgggtacccaaagttcttgtgtctaatgccaaaggacccaaaaccgtttgggtacctaaaatctttatgcatccgggggctcaagttggatcatccatagcggatgcacaaaccacatgacaggggagaagaagatgttctcctcctatgagaaaaaccaggatccccaaagagctatcacattcggggatggaaatcaaggtgtcactgtctttagaagaagtgatgattcaatagcatttaagggagtgttagagggtcagctataccttgtagattatgatagagctgaactcgacacttgcttaattgctaagactaacatgggttggctctggcaccgtcgactagcccatgttgcgatgaagaatcttcacaagcttctaaagggagagcacattttaggattaacaaatgttcatttcgagaaagacaggatttgtagcgcatgccaagtgaaagtcgcctag

SEQ ID NO: 4720 - DNA, 1959 bp, Zea mays
  Clone ID: TF_ZmC3310_8
atgtctcccgaggaagtaataggaaaatttgtgagctttgaattgatgatcaaaggctcaaataaaatcatcgagcaagatggtccctccacgcccgaagcacaaccggtcgcattcaaggcgacagaggagaagaagaaagaatctacatcaagtagactccccatcaacgcctccaagctcgacaacgaggaaatggcgctcatcatcaagagcttccgccaaatcctcaagcaaaggagagggaaggactacaagtcccgcaccaagaaagtgtgctacaagtgtggtaagcccggtcattttattgcaaaatgtccattatcaagtgatagtgacaggggcaacgacaagaaaggaaagaggagagaaaagaagagatactacaagaagaagggcggcgatgcccatgtatgccgcgagtgggactcggacgagagctcctccgactcctcctccgacgaggacgccgccaacatcgtcgtcaccaaaggactcctcttccccaacgtcggccacaagtgcctcatggcaaaggacgacaaaaggaagaaggtaaaatcaaggtcctccactaaatatgcatcctctagtgatgaagataattctagtgatgaggaggataatttgcgcactctttttgccaaccttaacatgcaacaaaaagaaaaattaaatgagttaattagtgctattcatgagaaggatgaactcttggactcccaagaggacttcctaattaaggagaataagaagcatgttaaggttaaggatgcttatgctctagaagtagaaaaatgtgaaaaattatctagtgagctaagcaagtgccatgatattattaccaaccttagaaatgagaatactagtttaatagctaaggttgattcaaatctatgtgatgattcaatttccaatcttagagatgataatgctaatttgcttgctaagattgaaaaattgaatgattctcttgctagccttagaaatgataatgaaaaattaattgctaaggctaaagacttagatgtttgcaatgttacaatttccaatcttagaagtgaaaatgacattttacatgctaagattgttgaacttaaatcttgcaaaccctctacatctactgtcgagcatgtttccattaatgttgatgctattcatgatcacctagctttaattaagaaacaaaatgatcacatagctcaacttaatgccaaaataaatgagcatgacttagaaaatgaaaaatttaaatttgctagaagcatgctctatagtgggagacgccctggcatcaaggatggcattggcttccaaaagggagacaatgtcaaacttaatgcctctcctaaaagattgtctaattttgttaagggcaaggctcccatgcctcaggataacgagggctacattttgtaccctgccggttatcccgagcacaaaatttggagaattcactcttggaagtctcactctggcccccatcatgcttttatgtataggggtgagacatctagctctaggcattctacccgtgccaaattgcctagaaagaaatctcctactgcatcaaatgatcccaacgtttcatttaagacttttgatgcatcttatgtgcttactaacaaatccggcaaggtagttgccaaatatgttgggggcaaacacaagggctccaagacttgtgtttgggtaaccaaggtttatgcatctgggggatcaagttcgataattgatagtggatgcacaaaccacatgacatgggagaaaaggatgttctcatcctatgagaaaaacaaagatccccaaagagctatcacattcggggatggaaatcaagatataggtgttgctgtctttagaagaagtgatgattcagtagcatttaagggagtatttgaggaaaaaatctcaaacccaagagactttgaagggattcttgagacgagcttaaaatga

SEQ ID NO: 4721 - DNA, 2784 bp, Zea mays
  Clone ID: TF_ZmC7465_2
atgtcgggagatcacgccaagaaggagatggagaccggcgaaaagcccactacaagccacgggagcacttcatcggaagagtcccgcaccaagaggagggagaagaagtcgagctcctccaacaaagggaaggagaagaaatcctcttctcaccacaaagagaagaaggagagatcttcctcccacaagccgcatcggagtggggacaagcacaagaggatgaggaaagtggtctactacgagaccgacacctcaccaacatcgacctccggctccgatgcgccctccgtaacttctaaacgccaagagcgtaagaagtttagtaagatccccctacactatcctcgcacttctagacatactcctctactttccgtcccattaggcaaaccgccaacctttgacggtgaagattatgctaggtggagtgatttaatgcgatttcatctaacctcactccacaaaagtatatgggatgttgttgagtttggtgcacaggtgccatccgtaggggatgaggactatgatgaggacgaggtggcccaaatcgagcacttcaactctcaagcgacaaccatactcctcgcctctctaagtagggaggagtacaacaaggtgcaagggttgaagagcgccaacgaggtttgggacctcctcaagaccgcgcacgagggtgacgagctcaccaagatcaccaagcgggaaacgatcgagggggagctcggtcgcttccggcttcgccaaggggaggagccacaacacatgtacaaccggctcaagaccttggtgaaccaagtgcgcaacctcgggagcgtgaagtgggacgaccacgaggtggttaaggttattctaagatcgctcattttccttaaccccactcaagttcaattaattcgtggtaatcctagatatactcaaatgacccccgaggaagttatcgggcattttgtgagctttgagtgcatgatcgagggctccaggaagatcaacgagcttgatgatccctccacgtccgaagctcaacccgtcgcattcaaggcgacggaggagaagaaggaggagtctaccccgagtcgacaaccaattgacgcctccaagctcgacaatgaggagatggcgctcgtcatcaagagctttcgccaaatcctcaagcaacggagggggaaggactacaagtcccgctccaagaaggtttgctacaagtgtggtaagcccggtcactttatcgctaaatgtcctttatcaagtgacagtgaccggggcgacgacaagaaggggaggaggaaggagaagaagaggtaccacaagaagaggggcggcgatgcccacgtgtgccgcgagtgggactccgacgagagctccaccgactcctccgccgacgaggacgccgccaacatcgccgtcaccaagggacttctcttccccaacgtcggccacaagtgcctcatggcaaaggacggcaaaaggaagaaggttaaatctagatcctccactaaatatgaatcctctagtgatgataatgctagtgatgaggaggataacttgcgtaccctttttgccgatcttaacatgcaacaaaaggaaaaattaaatgaattgattagtgctattcatgagaaggatgacctcttggactcccaagaggactgccttattaaggaaaacaagaagcatgttaaggttaaaaatgcttatgctctagaggttgagaaatgtgaaaaattgtctagtgagctaagcacttgccgtgagaccattgacaaccttaggaatgaaaatgctagtttaaatgctaaggttgattctcatgtttgcgatgtttcaattcccaatcctagagataataatgatgatttgcttgctaggattgaagaattaaacatttctcttgctagccttagagtagaaaatgaaaatttgattgctaaggctaaggaccttgatgtttgcaatgccaccatttccgatcttagagataaaaatgatattcttcgtgctaagattgttgaacttaattcttgcaaaccctctacatctaccgttgagcatgtgtctatctgtactagatgtagagatgttgatgtcaatgctattcatgatcacatggctttaattaaacaacaaaatgatcatatagcaaaactagatgctaaaattgccgagcacaacttagaaaatgagaaatttaaatttgctcgtagcatgctctatagtgggagacgccctggcatcaaggatggcattggcttccaaaggggagacaatgtcaaacttagtgcccctcctaaaaggttgtctaactttgttaagggcaaggctcccatgcctcaggataacgagggttacattttgtaccctgccggttatcctgagagcaaaattaggagaactcattctaggaagtctcactctggccctaaccatgcttttatgtataagggtgagacatctagcgctaggcaaccagcccgtcccctggtgcctagatagaaaactcctagtgcatcaaatgatcatgacatttcattcaatacttttgatgcatcttatgtgttgactaacaaatccggcaaggtttatgcatccgggggctcaagttggatactcgacagcgggtgcacaaaccacatgacaggggagaagaagatgttctcctcctacgagaaaaaccaagatccccaacgagctatcacattcggggatggaaatcaaggtgtcactgtctttagaagaagtgatgattcaatagcatttaagggagtgttagagggtcagctatacttg

SEQ ID NO: 4722 - DNA, 1650 bp, Zea mays
  unsure (1)..(1650): unsure at all n locations
  Clone ID: TF_ZmC7465_25
atgtcgggagcattcgccaagagggaaatcgagaccggtgacaagtccgcaagctcggggagaacgcactcaagggagtctgcccacaagcacaaggaggaatcctcttcctccatcaagtcccaacgaaagggtgacaagaagaaaaagatgaagaaggtggtctactacgagaccgactcttcgtcaccctccacctccggctcggaatcggcatccgccacttctaagcgccatgagcgcaagaagtatagtaagatgcctcttcgctatcctcgtatttcaaaatgcactccattactttccgttccattaggcaaaccacctatgcttgaaggtgaagattattctatgtggagtgataaaatgaggcatcacctaacctcactccacaaaagcatatgggatgttgttgagtatggagcgcaggtaccaaagaagggagacaaggattacgactcggaggaggtcgaacaaatccaacacttcaactctcaagccactactatactccttgcctctctaagtcgagaggagtataataaggtgcaagggttgaagagcgcaaaggaaatttgggacgtgctcaagaccacgcacgaaggagacgaggtgaccaagatcaccaagcgggagacgatcgagggggagctcggtcacttcatgcttcaccaaggggaggagccacaagcgatgtacaaccggctcaagaccttggtgaaccaagtgcgcaacctcgggaggaccaaatgggatgatcatgaaatggtcaaggttattcttagatcactcgttttccttaaccctacgcaagttcaaatgattcgtggtgatcctagatacacactgatgtctcccgaggaagtgataggaaagtttgtgagctttgaactaatgatcaaaggctccaaacaaatcattgagcgaggcgccacctccacacccgaggtgcaacccgtcgccttcaaagcgacagaggagaagaaggaagagtctacatcaagtaggctccccatcgacgcctccaagctcgacaatgaggagatggctttaatcatcaaaagctttcgccaaatcctcaagcaaaggaaggggagagattacaagccccgttccaagaaggtttgctacaagtgtggtaagcccggtcattttatcgctaaatgccctttgtctagtgatagtgacagggataacgacaagaagggaaagaggagagaaaagaagaggtactacaagaagaagggtggcgatgcccatgtttgccgagagtgggactccgacgagagcttgaaagggaaatgtgcccttgggccatttctaagtattttggtgatctagggactcctcttccccaacgtcggccacaagtgcctcatggcaaaggacggcaaaaggaagaaggtaaaatcaagatcctccactaaatatgaaacctctagtgatgaggatgatgctagcaatgaggaggataacttgcgcgttctttttgccaaccttaacatggaacagaaggaaaaactaaatgagctaattagtgaaatccatgaaaaggatgacctcatggactcccaagaggacttcctaatcaaaggaaattatnagcatgttaagaataaaaaagcttatgctctaaagtcgacctgcagg

SEQ ID NO: 4723 - DNA, 4810 bp, Zea mays
  Clone ID: TF_ZmC951_286
ctacttcaactcccccatcatcgacatctcaaatttctgtgtcatgatcctactaaattcttcacaagtagactcgttagtagacccaaatatgatatcatcaacataaatttggcatacaaacaaatcattgtcaagagttttagtaaataaagtaggatcggccttgccgactttgaagccattagcaataaggaaatctcttaggcattcataccatgctcttggggcttgcttgagcccataaagcgccttagagagcctatagacatggttagggtactcactgtcttcaaagccgggaggttgctcaacgtagacctcttccttgattggtccattgaggaaagcactcttcacgtccatttgataaagcttgaagccatggtaagtagcataggctaataatatgcgaattgactcaagcctagctacgggtgcataggtttcaccgaaatccaaaccttcgacttgggagtatccgttggccacaagtcgagctttgttccttgtcaccacaccatgctcatcttgcttgttgcggaagacccatttggttcctacaacattttggttaggacgtggaactaaatgccatacctcgttccttgtgaaattgttgagctcctcttgcatcgccatcacccaatccgaatcttggagtgcttcctctaccctgtgtggcttaatagaggaaacaaaagagtaatgctcacaaaaatgtgcaacacgagatttagtgcttacccccttatgaatgtcgtcgaggatggtgtcgacagggtgatctcgttggattgcttggtggactcttgggtgtggcggtcttggttcttcatcctccttgtcttgatcatttgtatctcccccttgatcattgccgtcatcttgaggtggttgagcctcatcctcaatttgagttggtggagatgcttgcgtggaggaggatggttgatcttgttcatttggaggctcttcggattccttaggacacacatccccaatggacatgttccttagcgcgatgcacggagcctcttcctcacctatctcatcaagatcaacttgctctacttgagagccgttagtttcatcaaacacaacgtcacaagaaacttcaactagtccagaggacttgttaaagactctatatgcccttgtgtttgaattatatcctagtaaaaagccttctacagtcttaggagcaaatttagatttcctacctcttttaacaagaataaaacatttgctaccaaagactctaaaatatgaaatgttgggctttttaccggttaggagttcataggatgtcttcttgaggattcgatgtagatataatcggttgatggcgtagcaggcggtgttaaccgcctcggcccaaaaccgatccggcgtcttgtactcatcaagcatggttcttgtcatgtccaatagagttcgattcttcctctccactacaccattttgttgtggggtgtagggagaagagaattcatgcttgatgccctcctcctcaaggaagccttcaatttgtgaattcttgaactccgtcccgttgtcgcttcttattttcttgatccttaagccgaactcattttgagcccgtctcaagaatccctttaaggtctcttgggtttgagatttttccgatgccggtgagcccgccacggcggtggacacgaaaccgtggcgccagagtccttccccatctccggccgccagcacgaccttgcgaaattgaacaccaccgtcgatgggatctataaattgagtgtgccacagtctccgtagggcagtaaatgcggccagctcgattccggttagctcgcgtccctctgttccttgttctagcgtcctcatgtgcccttgatgctcaccaaaccgtccaattacactagaagcccacccatcgtcaggaacatccccctccatccgcaacctgttaacgaaggcaagccccggtgcatttgccaccttccttgatgtttttaaaatctttctcacttgcttgcttgactcccacataaccagcatacccttgagagtcttttctttagtcgggtaagacttgctgagtattccatactcagggtttatcccctctaacactcccttaaatgctattgaatcatcacttcttctaaagacagtgacacctttgaccaaaccttggtttccatccccgaatgtgatagctcgttggggatcttggtttttctcgtaggaggagaacatcttcttctcccctgtcatgtggtttgtgcacccgctgtcgattatccaacttgagcccccggatgcataaaccttgccggatttgttagtaggcacatatgatgcatcaaaagttttgaatgaaatgttatgatcatttgatgcattaggagttttcttcttaggcaacttagcacgggttggttgcctagaactagatgtctcacccttatacataaaagtatggttagggccagagtgagacttcctagaatgaattctcctaattttgctctcgggataaccggcagggtacaaaatgtaaccctcgttatcctgaggcatgagagccttgcccttaacaaaattagacaatcttttaggaggggcattaagtttgacattgtctcccctttggaagccaatgccatccttgatgccagggcatctcccattatagagcatacttctagcaaatttaaatttttcattttctaagttatgctcgacaattttagcatctaatattgctatatgatcattttgttgtttaattaaagtcatttgatcatgaatagcatcaacatcaatatctctacatctagtacaaatagacacatgcttaacggtagatgtagagggtttgcaagattttaattctacaaccttagcatgtaatacatcattttcacttctaaggttagaaatagtaacatcaaaatctttggccttagcaagcaatttttcattttcaatcctaaggctagcaagagaaacattcaactcatcagtcttagcaagtaaatcaacattatcatctctaggattgggagttgaaacatcacaaacatgtgaatcaaccttagctaacaaattagcattctcatttctaaggttgtcaatggtctcctggcaagtgcttagctcacaagacaatttttcacatttttcaacttctagagcgtaagcatttttaaccttaacatgcttcttattttctttaataaggaagtcctcttgggagtctaagagatcatccttttcatgaatagcactaattagttcatttaacttttccttttgttgcatgtttaggttggcaaaaaggatgcgcaagttatcctcctcattactagcattatcctcatcactagaggtttcatatttagtggaggatcttgattttaccttcttctttttgccgtccttggccatgaggcacttgtggccgacgttggggaagaggaggcctttggtgacggcgatgttggtggcgtcctcgtcggaggaggagtcggtggagctctcctcggagtcccactcgcggcacacatgggcatcgccacccctcttcttgtagtgcttcttcttctcctttcttctccccttcttgtcgtcgcccctatcactatcactagacaatggacatttagcaatgaaatgaccgggcttaccacatttgtagcacactttcttggagcggggcttgtaatctttccccctcctttgcttgaggatttggcggaagctcttgatgatgagtgtcatttcctcgttgtcgagcttggaggcgtcgatgggtgttcgacttggagtagattcctccttcttttcttccgtcgccttgaatgcgaccggttgtgcttcggacgtggaggggtcgtcaagctcgttgatcttctttgagcctttgatcatcaactcaaagctcacaaaattacctataacttcctcgggggtcatttgagtatatcttaaccacttcgtggtcatcccactttacgctcccgaggttacgcacttggttcaccaaggtcttgagccggttgtacatatgttgtggctcctcccctttgcgaagccggaatcgaccgagctccccctcgatcgttttccgcttggtgatcttggtgagctcgtctccctcgtgcgcggttttgagcacatcccaaacctccttggcactcttcaacccttgtactttgttatactcctctctacttagtgaggcgaggagtattgttgtcgcttgagagttgaagtgctcgatttgggtcacctcatcctcatcatagtctttatcccctacggatggtacctgtgcaccaaactcaacaacatcccatatgcttttgtggagcgaggttagatgaaatcgcattaaatcgctccacctagcgtaatcttcaccatcaaaagttggtggtttgcctaatgggacggaaagtaaaggtgtatgtttggaaatgcgagggtagcgtagggggatcttactatacttcttgcgctcttggcgcttagaagtgacggatgccgcgtcggagccggatgtggatgccgatgaagaatcggtctcgtagtagaccaccttcctcattcttttcttcttgtccccactccgatgcggcttgtgggaagaagatttttccttcttatctttgtggtgagaagaagatttcttctccttccctttgttggaggagatcttcttcttctccttcctcttggtgcgggactcttccgatgaagtgctcccatggcttgtagtgggcttttcgccggtctccatctccttcttggcgtgatctcccgacat

SEQ ID NO: 4724 - DNA, 5403 bp, Zea mays
  Clone ID: TF_ZmC951_300
ctagccgttgggccattctgctgagcgcggacggtccgccctcctggtgcggacggtccgccccggacggtccgcgccagaggccggacggtccgcgcaagggctcggacggtctttgcttttcctccggacagtccatagcacagacttggatttttgcattggttctgtccgagggttattcttgtgtcgcggacggtccgccgcaagggcccggacggtccgcgcttggcctgtttttccaaaaagcttctcctgtccggaataatctacggtattccggacagtcgatttagcatagttatagatgaacttttggcacttctcccccttgttggcatgaatcgccaaaaacggaatcattagagccctcgaagtactttcttcccctgcggcaatgtactcggcttcggcggtggaaagagcgaccgaattttgcttctttgaagcccaagacaccaaggatcttcctaagaactggcaagtccccgatgtgctcttcctattgattttgcaccctcccgtgtcgaggtcgagatgcccattagttcccatgggtgtcttgatgggtttggcatccttcatcccaaacttagcaagaatgtcttgagtgtacttcgtttggctaatgaaggtgccctcttggagttgcttgacttggaatcctagaaaatacttcaactcccccatcattgacatctcgaatttctgtgtcatgatcctactaaactcttcacatgtagacttgttagtagacccaaatataatatcatcaacataaatttggcatacaaacaagtcattttcaagagttttagtaaagagtgtaggatcggccttgccgactttgaagccatttgcaataaggaaatctctaaggcattcataccatgctcttggggcttgcttgagcccataaagcgccttagagagcctataaacatggttaggatactcactgtcttcaaagccgggaggttgctcaacatagacctcttccttgattggtccgttgaggaaggcacttttcacgtccatttgatagagcttaaagccatggtaagtagcataggctaataatatgcgaattgactcaagcctagctacgggtgcataggtttcaccaaaatccaaaccttcgacttgtgaataccctttggccacgagtcgagctttgttccttgtcaccacaccatgctcatcttgcttgttgcggaagacccatttggttcctacaacattttggttaggacgtggaactaaatgccatacctcatttctagtgaagttgttgagctcctcttgcattgccaccacccaatccgaatcttgaagtgcttcttctaccttgtgtggttcaatagaggaaacaaacgagtaatgttcacaaaaatgtgcaacccgagatctagtagttacccccttatgaatatcgccgaggatggtgtcgacggggtgatctcgttgaattgcttggtggactcttgggtgtggcggtcttggttcttcctcatcctccttttcttgatcatttgcatctcccccttgatcattgccgtcatcttgaggtggctcatcttcttgattttgcccttcatcaacttgagcctcatcctcattttgagttggtggagatgcttgcgtggaggaggatggttgatcttgtgtatttgaaggctcttcggattccttaggacacacatccccgatggacatgttccttagcgcgatgcatggagcctgttcttcacctatctcatcaagatcaacttgctctacttgagagccgttagtttcatcaaacacaacgtcacaagagacttcaactagtccagtggacttgttaaagaccctatatgcccttgtgtttgagtcataaccaagtaaaaagccttcggttaggagttcatacgatgtcttcttgaggattcggtgaagatataaccggttgatggcgtagcaggcggtgttgaccgcttcggcccaaaaccggtccggtgtcttgtactcatcaagcatggttcttgccatgtccaatagagttcgattcttcctctccactacaccgttttgttgtggcgtgtagggagaagagaactcatgcttgatgccctcctcctcaaggaagctttcaatttgagagttcttgaactccgtcccattgtcgcttcttattttcttgatccttaagccgaactcattttgagcccgtctcaagaatccttttaaagtctcttgggtttgagatttttcctgtaaaaagaatacccaagtgaagcgagaataatcatccacaataactagacagtacttactcccgccgatgcttatgtaagcgatcgggccgaatagatccatgtgtaggagctccagtggcctgtcagtcgtcattatgttcttgtgtggatgatgagtgccaacttgcttccctgcttggcatgcgctacaaatcctgtctttctcaaaatgaacattggttagtcctaaaatgtgctctccctttagaagcttatgaagattcttcatcccaacatgggctagtcggcggtgccagagccaacccatgttagtcttagcaattaaacatgtgtcgagctcagctctatcaaaatctactaagtatagctgaccctctaacacacccttaaatgctattgaatcatcacttcttctaaagacagtgacacctttgaccaacccttgatttccatccccaaatgtgatagctcgttgggggtctttgtttttctcatatgaggagaacatccttttctccccggtcatgtggtttgtgcacccgctgtcgagtatccaacttgagcccccggatgcataaaccttgccagatttgctagtcaacacataagatgcatcaaaagttttaaatgaaatggcatgatcatttgatgcattaatagttttctttctaggcaacttggcatgggttggttgcctagatctagatgtctcacccttatacataaaagcataattagggccagagtgagacttcctagaatgaattttcttaatcttattctcaggatacccggcagggtacaaaatgtaaccctcgttatcctgaggcatgggagccttgcccttaacaaagttagacaagttcttaggaggggcattaattttgacattgtttcccctttgaaagccaatgccgtccttaatgcccgggcgtctcccattatagagcatgcttctagccaatttaaatttttcattttctaagtcatgctctctaattttagcattaagttgtgctatgtgatcattttgttttttaattaaggcaaggtgatcatggatagcatcgacattaatatctctacatctagtgcaaatggacacatgctcaatagtagatgtagagggtttgcaagactttaattcaataaccttagcatgcaacaaatcattcttagttctaaggtcagaaatagtagtattgcaaacatcaaaatccttagccttagcaattaatttctcattctcatttctaaggctagcgatggaagcattcaattcatcaatcctagcaagcaagtcaacatcatcatttctaggatcaatgcaaacatgagaatcaaccttagccaacaaattagcattttcatttctaaggttgtctaaaatctcatggcaagtgcttagctcactagataatttttcacatttttctctttctagagcataagcatttttaaccttaacatgtttcttgttttccttgattaggaagtcctcttgggagtccaagagatcatccttctcatggatagcactaattagctcatttaatttttctttttgttccatgttaaggttggcaaaaagaatacgcaagttatcctcctcatttttatcatcctcatcactagatgtttcatatttagtggaggactttgattttaccttctttttgccgtccttggccatgaggcacttgtggccgacgttggggaagaggaggcctttggtgacggcgatgttggcggcgtcctcgtcgtcggaggagtcgcttgagctttcgtcggagtcccactcccgacaaacatgggcatcgccgcccttcttcttgtagtacttcttcttctccttccttttgcccctcttgtcgttgtccctgtcactgtcacttgataatggacatttagcaataaagtgaccgggcttaccacatttgtagcaaaccttcttggaacgggatttgtagtccttccccttccgttgcttgaggatttgccggaagcttttgatgattagggtcatctcctcgttgtcgagcttggaggcgtcaattggttgtctacttggtgtagactcctccttcttctcctccgttgccttgaaggccacgggttgcgcctcggatgtggaaggctcatcaagctcgttgatcttcttggagcccttaatcatgcattcaaaactaacaaaattcccgatgacttcctcgggggtcatttgtgtatatctaggattgccacgaattaattgtacttgagtagggttaaggaaaataagggctctcagaataaccttaaccacttcgtggtcatcccattttgtgctcccgaggttgcgcacttggttcaccaaggtcttgagccggttgtacatgtcttgtggctcctccccttggcgaagacggaagcgaccgagctccccctcgatcgtttcccgcttggtgatcttggtgagttcatcaccctcatgcgccgtcttgagtaggtcccaaatctccttggcattcttcaacccttgtactttgttgtattcctccttgcttaaagaggcaaggagaatggttgtggcttgggagttgaagtgctcgatttgggccacttcgtccgtgtcgtagtcctcatcccctacggatggtacctgtacaccatactcaacaacatcccataatcttttgtggagggagattagatgaaattgcattaaattactccacatagcataatcttcaccattaaaagttggtggtttgcctaatgggacggaaagtaaaggtgtatgtttaggaacgcgagggtagcgtagggggatcttactatacttcttacgctcttggcgtttagaagtgacggacgccgcgtcggagccggaggtggaggtcgatgaagtgtcggtctcgtaaaagaccaccttcctcatccttttgtgcttgtccccactccgatgcggcttgtgagaagatttttccttcttctccttatggtgagaagaggaagatcttttctccttccgcttggaggatttcttcttcttctctcttctcttggtgcgggactcttccgatgaggatgaagtgctcccttggcttgtagtgggcttgtcgtcgccggtctccatctccttcttggcgtgatctcccgacat

SEQ ID NO: 4725 - DNA, 4596 bp, Zea mays
  Clone ID: TF_ZmC951_302
ctaatgcctaagtttggtaaatgtttgttcatctaatggcttggtaaagatatcggctaattgttctttggtgttaatatatgcaatctcgatatcccccttttgttggtgatcccttagaaaatgataccgaatgactatgtgtttagtgcggctatgctcaacgggattatccgccatgcggattgcactctcattatcacatagaagaggaactttggttaatttgtaaccatagtccctaagggtttgcctcatccaaagtaattgcgcgcaacaatgaccggtggcaatatactcggcttcggcggtagaaagagctacggaattttgcttctttgaagcccaagacaccagagaccttcccaagaactggcaagtccccgatgtgctctttctattaattttacaccctcccgtgtcgaggtcgagatgcccattggttcccatgggtgtcttgatgggcttggcatccttcatcccaaacttgtttagaatgtcttgaatatacttcgtttggctaatgaaggtgccctcttggagttgcttcacttcaaatcctaagaagtacttcaactcccccatcatagacatctcgaatttttgtgtcatgatcctactaaattctttacatgtagattcgttagtagacccaaaaatgatatcatcaacataaatttggcatataaacaaatcattttcaagtgttttggtaaagagtgtagaatcggcctttccgactttgaagccattagtgataagaaaatctcttagggattcataccatgctcttggggcttgtttgagcccataaagcgccttagagagtttgtaaacatggttagggtactcactatcttcaaagccgggaggttgctcaacatagacctcttccttgatcggtccattgaggaaggcacttttcacgtccatttgataaagcttaaagccatggtaagtagcataggaaagtaaaatgcgaattgactcaagcctagctacaggtgcataggtttcaccgaaattcaaaccttcgacttgtgaatatcccttggccacaagtcgggctttgttccttgtcaccacaccatgctcatcttgcttgttgcggaagacccacttggttcctacaacattttgattaggacgtggaactaaatgccatacctcattcctagtgaagttgttgagctcctcttgcatcgccaccacccaatccgaatcttgaagtgcttcctctaccttatgtggtcttgggtgtgtcggtcttgtagcttgttcatcttcctcatcttgatcatgggcatctcccccttgatcattgctctcctcttgaggtggctcaacttcttgatcttctccttcatcattttgagccttaccctcatcttgagttggtggagatgcttgtgtggaggaagatggttgatcttgtgcttgtggtggctcttcggattccttaggacacacatccccaatggacatgttccttagcgcgacgcacggagcctcttcatcatctagctcatcaagatcaacttgctctacttgagagccgttagtctcatcaaacacaatgtcacaagaaacttcaactagtccagaggacttgttaaagactctatatgcccttgtgtttgaatcatatcctagtaaaaagccttctacagccttaggagcaaatttggattttctacctcttttaacaagaataaagcatttgctaccaaagactctaaaatatgaaacatttggctttttaccggttaggagttcatatgatgtcttcttgaggattcggtgtagatataaccggttgatggcgtagcaggcagtgttgaccgcctcggcccaaaaccgatccgaagtcttgtattcatcaagcatggtccttgccatgtccaatagagttctattcttcctctccactacaccattttgttgtggcatgtagggagaagagaactcatgcttgatgccctcctcctcaaggaagccttcgatttgagagttcttgaactccgtcccgttatcgcttctaatctttttgatcctcaagccgaactcattttgagcccgtctcaagaatccctttaaggtttcttgggtatgagatttttcccaaacgattttgggtcctttgacattagatacaagaactttgggtacccaaacacaagtctttgatcccttgtgtttgcccccaacatacttggcaactattttgccggatttgttagtcaaaacatagtatgcatcaaaagttttaaatgaaatgttagaatcatttgatgcaataggagttttcttcttaggcaatttagcacgggttgattgcctagagctagatgtctcacccttatacataaaagcatgattagggccagagtgagacttcctagagtgatttctcctaattttgtgctcgggataaccggcagggttcaaaatgtaaccctcgttatcctgaggcatgggagccttgcccttaacaaagttagacaatcttttaggaggggcattaagtttgacattgtctcccttttggaagccaatgccatccttgatgccagggcatctcccactatagagcatgcttctagcaaatttaattttttcattttctaagtcatgctcattaatcttagcattgagttgagctatgtgatcatttttcttcttaattaaggctaggtgatcatgaatagcttcaacattaatgtctctacatctagtgcaaatggaaacatgctcaatggtagatgtagagggtttgcaagattttagttcaacaatcttagcatgtaaaatgtcattttcatttctaagattggaaatggtaacattgcaaacatctaagtccttagccttagcaattgattttacattctcatttctaaggctagcaagagagacattcaattcttcaatcttagcaagtaaattaacattatcatctctaatattggaaattgaatcatcacaagcatttgaatcaaccttaacatgcttcttattttccttaattaggaagtcctcttgggagtccaagagttcatccttctcatgaatagcactaattagttcatttaatttttccttttgttgcatgtttaggttggcaaaaagggtgcgcaaattatcctcctcatcgctagaattatcctcatcactagaggttgcatatttactggaggattttgattttaccttcttccttttgccgtcctcggccatgaggcacttgtggccgacgttggggaagaggagtcccttggtgatggcgatgttggcggcgtcctcgtcggaggaggagtcggaggagctctcgttggagttccactcgcggcacacatgggcatcgctgcccctcttcttgtggtacctcttcttttctctcctctttcccttcttgtcgttatccctgtcactgtcactacataatggacattttgcaataaagtgaccgggcttaccacacttgtagcacactttcttggagcgggacttgtagtccttccctctcatttgcttgaggatttggcggaagctcttgatgatgagcgccatttcctcgttgtcgagcttggaggcgtcgatgggtgttctacttgatgtagattcctccttcttctcctccgtcgccttgaatgcgaccggttgtgcttcggacgtggaggggccatcaagctcgacgattttctttgagcctttgatcatcaactcaaagctcacaaaattccctattacttcctcgggagtcattagtgtatatctaggattgccacgaattaattgaacttgagtagggttaaggaaaacaagtgatctaagaataaccttaaccattttgtggtcatcccattttttgctcccgaggttgcgcacttggttcaccaaggtcttgagctggttgtacatatcttgtggctcctccccttggcgaagtcggaagcgaccgagttccccctcgatcatctcccgcttggtgatcttggtcacctcgtctccttcgtgcgcggtctttagcacgtcccaaatttcctttgcgctcttcaacccttgcaccttattatactcctctcgacttagagaggcgaggagtatagttgtggcttgggagttgaagtgttggatttgtttgacctcctccgagtcgtaatcctcgtctcccttctttggtacctgcactccatactcaacaatatcccatatgcttttgtggagtgaggttaggtgatgcctcattttatcactccacataggataatcttcaccttcaaacataggtggtttgcctaatggaacagagagtaatggagtgcgtctagaaatgtgaggatagcgaaggggcatcttactatacttcttgcgctcctggctctttgaagtggtggaggccgattccgagccggaggtggagggtgacgaagagtcggtctcgtagtagaccaccttcctcatcttcttcttcttgtcacccatccgatgggacttgatggaggaagaggatttctccttgtgcttgtgggcggactcccttgagtgtgttcttctcgagcttgcggtcttgtcgccggtcccgagatccctcat

SEQ ID NO: 4726 - DNA, 5331 bp, Zea mays
  Clone ID: TF_ZmC951_303
tcaaaagaaattcctagaatcaagaatatttagctcatgcctaagtttgttaaaagattgttcatctagtggcttggtaaagatatcggctaattgttccttggtgttaatatatgcaatctcgatatctcccttttgttggtgatccctaagaaaatgataccgaatggctatgtgtttagtgcggctatgctcaacgggattatccgccatgcggattgcactctcattatcacatagaagaggaactttggttaatttgtaaccgtagtccctaagggtttgcctcatccaaagtagttgcgcgcaacaatgacctgcgacaatgtactcagcctcggcggtagaaagagctatggaatttttcttctttgaagcccaagacaccaaggaccttcccaagaactggcaagttcccgatgtgctctttctattgattttacaccccgcccaatcggcatccgaataaccaattaaatcaaatgtggatccccgagggtaccaaagcccaaacttaggagtatgaactaagtatctcaagattcgttttacggccataaggtgagcttccttagggtcggcttggaatcttgcacacatgcatacggaaagcataatatccggtcgagatgcacataaatagagtaaagaaccaatcatcgaccgatataccttttgatcgacggatttaccttccgtgtcgaggtcgagatgcccattggttcccatgggtgtcttgatgggcttggcatccttcatcccaaacttgtttagaatgtcttgaatatacttcgtttggctaatgaaggtgccctcttggagttgcttcaattgaaatcctaggaagtacttcaactcccccatcattgacatctcgaatttctgtgtcatgatcctactaaattcctcacatgtagattcgttagtagacccaaatataatatcatcaacataaatttggcatacaaacaaatcattgttaagagttttagtgaatataataggatcggcttttccaactttgaatccattagtgataagaaaatctcttaggcattcataccatgctcttggggcttgcttgagcccataaagcgccttagagagtttatatacatggttagggtactcactatctttaaagccgggaggttgctctacatagacctcttccttgattggtccgttgaggaaggcactcttcacgtccatttgataaagcttgaagccatggtaagtagcataggccaataatatacgaattgactcaagcctagctacgagtgcataggtttcaccgaaatccaaaccttcgacttgtgaataccccttggccacaagtcgggctttgttccttgtcaccacaccatgctcgtcttgcttgttgcggaacacccactttgttcctacaacattttgattaggacgtgggaccaaatgccatacctcgttcctagtgaagttgttgagctcctcttgcatcgccaccacccaatccgagtcttgtagtgcttcctctaccctatgtggctcaatagaggaaacaaaatagtaatgctcacaaaaatgtgcaacacgagatctagtggttacccccttatgaatgtcgccgaggatggtgtcgacagggtgatctcgttggattgcttggtggactcttgggtgtggcggtcttggttcttcatcctccttgtcttgatcatttgcatctcccccttgatcattgtcgtcatcttgaggtggctcatctcttggatcttgtccttcatcaactttagcctcatcctcattttgagtcggtggagatgcttgcgtggaggaggatggttgatcttgtgcatttggaggctcttcgaattccttaggacacacatccccaatggacatgttcctaagttcgatgcatggagcctcttcattacctatctcatcaagatcaacttgctctacttgagagccgttagtctcaccaaacacaacgtcacaagaaacttcaactagtcctgaggacttgttaaagactctatatgcccttgtgtttgaatcatatcctagtaaaaagtcttctacagtcttaggagcaaatttagattttctacctcttttaacaagaataaagcatttgctaccaaagactctaaaatatgaaatattgggctttttaccgattaggagttcgtatgatgtcttcttgaggattcggtgtagatacaaccgattgatggcgtagcaggcggtgttgaccgcctcgacccaaaaccgatccgatgtcttgtactcatcaagcatggttcttgccatgtccaatagagttctattcttcctctgcactacaccattttgttgtggggtgtagggagaagagaactcatgcttgatgccctcctcctcaaggaagccttcgatttgtgagttcttgaactccgtcccgttgtcgcttctaattttcttgattcttaagccgaactcattttgagcccgtctcaagaatccttttaaggtttcttgggtatgagatttttcctgcaaaaagaatacccaagtgaagcgggaataatcatccacaataactagacagtacttactcccgccgatgcttatgtaggctatcgggccgaataggtccatgtgtaagagctcgagtggcctgtcagttgtcatgatgttcttatgtggatgatgaatcccaacttgtttccctgcctgacatgcgctacaaatcctgtctttctcaaaatgaacattcgttagtcccaaaatgtgttctccctttagaagcttatgaagattcttcattccaacatgtgctagccggcgatgccagagccagcccatgttagtcttagcaattaagcaagtgtcgagttcagctttatcaaaatctactaagtatagctgaccctctaacactcccttaaatgctattgaatcatcacttcttctaaagacagtgacaccttggtttccatccccgaatgtgatagctcgttgaggatcttggtttttctcataggaggagaacatattcttctcccctgtcatatggtttgtgcacccgctatcgatgatccagcttgagcccccggatgcataaacccaaactgttttgggtcctttggcattagatacaagaactttgggtacccaaacacaagtttttgatcccttgtgtttgcccccaacaaacttggcaactactttgtcggatttgttagtcaaaacataagatgcatcaaaagttttaaatgaaatgtcatgatcatttgatgcactaggagttttcttcttaggcaatttagcacgggttgattccctagaactagatgtctcacccttatacataaaagcatgattagggccagagtgagacttcctagagtgaattctcctaattttgctctcgggataaccggcagggtacaaaatgtaaccctcgttatcctgaggcatgggagccttgcccttaacaaaattagataatcttttaggaggggcattaagtttgacattgtctcccttttggaagccaatgccatccttgatgccagggcgtctcccgctatagagcatgcttctagcaaatttaaatttttcattttctaagtcatgctcattgattttagcattaagttgagctatgtgatcattttgtttcttaattaaagtggataatttttcacatttttctacttctagagcataagcattcttaaccttaacatgcttcttattttctttaataaggaagtcctcttgtgaatccaagagatcatccttatcatgaatagcactaattagttcatttagtttttccttttgttgcatgttgaggttagcaaaaagagtacgcaaattatcttcctcatcactagcattttcttcatcactagaggattcatatctagtggaggatttagatttaaccttcttatttttgctgtcctttgccatgaggcacttgtggccgacgttggggaagaggagtcccttggtgacggtgatgtttgcggcgtcctcgtcggaggaggagtcggaggagctctcgtcggagtcccattcccggcaaacatgggcatcgtcgcccttcttcttgtagtatctcttcttctcctttcttctccccttcttgtcgtcgcccctgtcactatcactagataatggacatttagcaatgaaatgaccgggcttaccacatttgtagcaaacttttttggagcggggtctgtaatcctcccccctcctttgcttgaggatttgacggaagctcttgatgatgagcgccatctcctcattgtagagctttgaggcgtcgattggttgtctacttgatgtagactcctccttcttcttctccgtcgctttgaatgcaaccggttgtgcctcggacgtggaggggccatcaagctcgttgatcttctttgagcctttgatcatcaattcaaagctcacaaaattcccgattacttcctcgggagtcattagtgtatatctaggattgccacgaattaattgaacttgagtagggttaaggaaaacaagtgatcttagaataaccttaaccatttcgtggtcatcccattttttgctcccgaggttgcgcacttggttcaccaaggttttgagccggttgtacatgtcttgtggctcctccccttggcgaagtcgaaagcgaccgagctcccccttgatcgtttcccgcttggtgattttggtcacctcgtctccttcgtgcgcggtctttagcgtgtcccaaatctccttagcacgtttcaacccttgcaccttattatactcctctcgacttagagaggcgaggagtatagttgtggcttgggcgttgaagtgttggatttgggccacttcgtcctcatcataatcttcatcccctacggatggtacctgtacaccaaactcaataacatcccatatacttttgtggagtgaggttaggtgatatcgcatcaaatcactccacctagcataatcttcaccatcaaacgttggtggtttgcccaatgggacggaaagtaaaggtgtatgtttaggaaagcgaggatagcgtagggggatcttactaaacttcttgcgctcatggcgcttagaagtgacggacggcgtgtcggagccggaggtggatggcgacgaggagtcggtctcgtagtagaccaccttcctcatcttcttcttcttgtcaccgctccgatgcgacttgtgtgaaggggattccttctccttccccttgttgcaggactctcctgatggagctttctcatggcttgtagcgggcttctcgccggtcaccatctccttcttggtgtgatctcccgacat

SEQ ID NO: 4727 - DNA, 3648 bp, Zea mays
  Clone ID: TF_ZmC951_320
ttaggcattcataccatgctcttggggcttgcttgagaccataaagcgccttaagagtttatagacgtgattagggtactcactatcttcaaagctgggaggttgctcaacatagacctcttccttgattggtccattgaggaaggcactcttcacgtccatttgataaagcttgaagccatggtaagtagcataggcaagtaatatacgaattgactccagcctagctacgggtgcataggtttcaccgaaatccaaaccttcgacttgtgaataccccttggccacaagtcgggctttgttccttgtcaccacaccatgctcatcttgcttgttgcggaagacccacttggttccctcatcatcttccttgtcttgatcattagcatctcccctttgatcattgtcctcctcttgaggtggctcctcttgatcttcatcatcattatcttgatcttgatcctcatcttgagttggtggagatgcttgcattggggaagatggttgatcttgtgcttgtggaggctcttcggatttcttaggacacacatccccaatggacatgttccttagcgcgatgcacagagcctcttcatcatctagctcatcaagatcaacttgctctacttgagagccgttagtctcatcaaacacaatgtcacaagaaacttcaactagtccagtggacttgttaaagactctatatgcccttgtgtttgaatcatatcctagtaaaaggccttctacagccttaggagcaaatttagattttctacctcttttgacaagaataaagcatttgctaccaaagactctaaaatatgaaacattgggctttttaccgatgaggagttcatacaatgtcttcttgaggattcggtgaagatataaccggttgatggcgtagcaagcggtgttgaccgcctcggcccaaaaccgatccgaagtcttgtactcatcaagcatggtccttgccatgtccaatagagttctattcttcctctccaccgtctcaagaatccctttaaggtctcttgagtttgagatttttctcccgccgatgcttatgtaagctatcgggccgaataggtccatgtggagtagctcaagtggcctgtcggtcgtcatgatgttcttgtatggatgatgaacaccaacttgctttcctgcttgacatgcactacgtaccctgtctttctcaaaatgaacattggttagtcccaaaatgtgctctccctttagaagcttatgaagattcttcatcccaacatgggctagtcggcggtgccagagccaacccatgttagtcttagcaattaagaaagtgtcgagttcagctctatcaaaatctactaagtatagctgaccctctagcactcccttaaatgctactgaatcatcacttcttctaaagacagtaacaccttgatttccatccacgaatgtgatagctctttggggatcatggtttttctcgtaggaggagaacatcttcttctcccctgtcatgtggtttgtgcacccgcccttgtgtttgcccccaacatatttggcaactactttgcctgatttgttagttagcacataagatgcatcaaaagtcttgaatgaaatgttatgatcatttgatgcaataggagttttcttcttaggcaatttagcatgagtagattgcctagaactagatgtctcactcttatatataaaagcatgattagggccagagtgagacttcctagagtgaattctcctaattttgtgctcgggataaccgatagggtataaaatgtaaccctcgttatcctgaggcatgggagctttgcccttaacaaagttggacaatcttttaggaggggcattaagcttgacattgtctccctgttggaagccaatgccatccgtaatgccagggcgtctcccactataaagcatgctacgagcaaatttaaatttctcattttctagttcatgctcgacaattttagcatctagtttagctatatgatcattttgttgtttaatcatagcaaggtgaccatgaatagcatcaatgttaatatctctacatctagtacaaatagagacatgatctatgctagatgtagagggtttgcaatcatttaattcaacaatcttagcatgtaaaatagcattctcatctctaagattggaaatagaagcattgcacacatctaagtctttagccttagcagttaatttatcattctcaattctaaggctagcaagagaggcattcaatttttcaatcttagcaattgaactagcattatcatttctaagattgtcaattgaatcatcacaaacatttgatttctcaaccttagcaattaatttggcattttcatttctaaggttggaaataacatcatggcaagtgcttagctcactagataaattttcacatttttctaccttcttcttcttaccgttctttgccatgaggcacttgtggccgacgttggggaagaggaggcctttggtgacggcgatgttggcggcatcctcgtcggaggaggagtaggtggagctctcatcggagtcccactctcggcatacatgggcatcgtcacccttcttcttgtagtacttcttcttttccttcctccttcccttcttgtcgtcgcccctgtcactatcacttgataatggacatttagcaataaaatgaccgggcttaccacacttgtagcacactttcttgaagcgagatttataatccttccccctcctttgcttgaggatttggcggaagctcttgatgatgagcgccatttcctcgttgtcgagcttggaggcatcgatggggagcctacttgacatagactcttctttcttctcctccgtcgctttgaatgcgacgggttgcacctcgggtgtggaggtgccgccttgctcgacgatttgtttggagcctttgatcatcaattcaaagctcacaaactttcctatcacttcctcgggagacattagcttatatctaggatcaccacgaattaattgaacttgcataggattacgaaaaacgagtgatcttagaataaccttgaccatttcatggtcatcccattttgtgctcccgaggttgcgcacttgattcaccaaggtcttgaggcggttgtacatggcttgtggctcctctccttggttgaggatgaatcgaccgagcttcccctcgatcgtctcccgcttggtgatcttggtcacctcatctccctcgtgcacggtcttgagcacgtcccaaatctccttggcacttttcaacccttgcaccttattatactcctctcgacttagagaggcaaggagtatagtggtggcttgggagtcaaaatgccgaatttgggcaacctcgtccgaatcatatgcttcatccctaaacttcttgcgctcatggcgcttagaagtgacggacggagtgtcggagccggaggtggatggcgacgaggaatcggtctcgtagtagaccaccttcttcatcttctttttcttgtcgccactccgatgcgacttggtatgtgaaggggctcccttcattttgttgtcggactcccctgatggagctttcccgtggattgtagacttgtcatcgccggtcatgatctccttcttggcgtgttctcccgacat

SEQ ID NO: 4728 - DNA, 3699 bp, Zea mays
  Clone ID: TF_ZmC951_356
tcacggggtgatctctttgtattgcttggtggactcttgggtgtggcggttttggaacttgttcatcttccttatcttgatcatgggcatctccccttgatcattgctctcctcttgaggtggcttaactccttgatcttctccttcatcattttgagcctcatcctcatcatttgttggtggagctgcttgcatggaggaagatggttgatcttgtgcttgtggaggctcttcggattccttaggacatacatccccaatggacatgttccttagtgcgacgcacaaagcctcttcatcatctagctcattaagatcaacttgctctacttgagagccgttagtctcatcaaacacaatgtcacaagaaacttcaactagtccagaggacttgttaaagactctatatgcccttgtgtttgaatcatatcctagtaaaaagccttctacagccttaggagcaaatttagattttctacctcttttaacaagaataaagcatttgctaccaaagactctaaaatatgaaacattgggctttttaccggttaggagttcgtatgatgtcttcttgaggattcggtgtagatacaaccggttgatggcgtagcacgcggtgttgactgccttcgcccaaaaccaattcgaagtcttgtactcatcaagcatggtccttgccatgtccaatagagttctattcttcctctccactacaccattttgttgtggcgtgtagggagaagagaactcatgcttgatgccctcctcctcaaggaagccttcgatttgtgagttcttgaacctcggtcccgtggcgctccttatttcttgatctccgccgatgcttatgtaagctatcgggccgattgatagatccatgtgtaggagctcgagtggcctgtcagtcgtcatgatgttcttatgtggatgatgaacaccaacttgcttccctgcctgacatgcgctacaaaccctgtctttctcaaaatgaacatttgttagtcccaaaatgtgttctccctttagaagcttgtgaagattcttcattccaacatgtgctagtcggcgatgccagagccagcctatgttagtcttagcaatcaagcaagtgtcgagttcagctctatcaaaatctactaagtatagctgaccctctaacactcccttaaatgctattgaatcatcacttcttctaaagacggtaacacctatatccgtaaaaaggtagttgtaacccattttacataattgagaaacggaaagcaaattgtaatctaaagaatcttgattcccatccctgaatgtgatagcttgttggggatcttggtttttctcgtaggaggagaacatcttcttctcccctgtcatgtggtttgtgcacccactatcgatgatccaacttgagcccccggatgcataaacccaaacgattttgggtcctttgacattagatacaagaactttgggtacccaaacacaagtctttgaccccttgtgcttgcccccaacatacttggcaactactttgccggatttgttagtcaaaacataagatgcatcaaaagttttaaatgaaatgttaaaatcatttgatgcaataggagttttcttcttaggcaattttgcacgggttgattgcctagagctagatgtctcacccttatacataaaagcatgattagggccagagtgagacttcctagagtgaattctcctaatcttatgctcgggataaccggcagggtacaaaatgtaaccctcgttatcctgaggcatgggagccttgcccttaacaaaattagacaatcttttaggaggggcattaagttttacattgtctcccttttggaagccaatgccatccttgatgccagggtgtctcccactatagagcatgcttctagcaaatttaaaattttcattttctaagtcatgctcattaattttggcattaagttgagctatgtgattattttgtttcttaattaaagctaggtgatcatgaatagcatcaacattaatgtctctacatctagtgcaaatggaaacatgttcaacggtagatgtagagggtttgcaagattttagttcaacaatcttagcatgtaaaatgtcattttcacttctaagatttgaaactgtaacattgcaaacatctaagtccttagccttagcaatcaatttttcatactcgtttctaaggctagcaagagagacattcaattcttcaatcttagcaagtaaactaacattatcatctctaagattgggaattgaatcatcacaaacatttgaatcaaccttagcaattaatctagcattctcatttctaaggttggcaattatatcatggcaagtgcttagctcactagatagtttttcacatttttctacttctagagcgtaagcatttttaaccttaacatgcttcttgttttccttaattaggaagtcctcttgggagtccaagagttcatccttctcatgaatagcactaattaattcatttaacttttctttttgttgcatgtttaggttggcaaaaagggtacgcaaattatcctcatcatcactagaattagcctcatcgctagatgtcgcatatttagtggaggatttagatttaaccttcttctttttgccgtcctttgccatgagacacttgtggccgacgttggggaagagaagacccttggtgacggcgatgtttgcggcgtcctcgtaggaggaggagtcggtggaactctcgtcggagtcccactcccggcaaacatgggcatcgccgcccttcttcttgtagtacctcttcttctcctttcttctccccttcttgtcgtcgcccctgtcactgtcactagatagtggacattttgcaataaaatgaccgggcttaccacacttgtaacaaactttcttggagcggggcttgtaatccttccccctcctttgcttgaggatttggcggaagctcttgatgatgagcgccatttcctcattgtcgagcttggaggcatcgatggggattctacttggagtagaatcttctttcttctcctccgttgctttgaatgcaacaggttgtgcttcgggcgtggaggagtcgccttgctctaagtcgacgatgtgtttggagcctttgatcattagttcaaagctcacaaacttcccaatcacctcctcgagagacattagcttatatctaggatcaccatgtattaattgaacttgagtaggattacgaaatacgagggatcttagaataaccttgaccatctcatggtcatcccattttgtgctctcgaggttgcgcacttggttgaccaaggtcttgagccggttgtacattgcttgtggctcctctccttggttgaggacgaatcgaccgagctccccctcgatcgtctcccgcttggtgatcttggtcacctcattccttcgtgcgcggttatacttcttgcgctcatggcgcttagaagtgacggacaccgcgtcggagccggatgtggagggcgacaaagagtcggtcttgtagtagaccactttcttcatcttcttcttcttgtcgccactccgaagcgacttgacgcggggaggggattcctccttgcctttggcgccggactcccttgataaagccttcccgtggcttatggccttctcgccggtttccatctccctcttggcggatcctcccgacat

SEQ ID NO: 4729 - DNA, 4419 bp, Zea mays
  Clone ID: TF_ZmC951_357
tcaaaagaaattccgagaatcaagaatatttagctcatgcctaagtttgttaaatgtttgttcatctagtggcttggtaaagatatcggctaattgttctttggtgttaatatatgcaatctcgatatcccccttttgttggcgatcccttaagaaatgataccgaatggctatgtgtttagtgtggctatgttcaacgggattatccgccatgcggattgcactctcattatcacatagaagaggaactttggttaatttgtaaccatagtccctaagggtttgcctcatccaaagcaattgcgcgcaacaatggcctacggcaatatactcggcttcggcggtagaaagagctacagaattttgcttctttgaagcccaagacaccagagaccttcccaagaactggcaagtccccgatgtgctctttctattaattttacaccctcccgtgtcgaggtcgagatgcccattggttcccatgggtgtcttgatgggcttggcatccttcatcccaaacttgtttagaatgtcttgaatatacttcgtttggctaatgaaggtgccctcttggagttgcttcacttgaaatcctaagaagtacttcaactcccccatcatagacatctcgattttttgtgtcatgatccatgctcttagggcttgtttgagcccataaagcgccttagagagtttgtaaacatagttagggtactcactatcttcaaagccgggaggttgctcaacatagacctcctccttgattggtccattgaggaagacacttttcacgtccatttggtaaagcttaaagccatggtaagtagcataggcaagtaatatgcgaattgactcaagcctagctcccccttgatcattgctctcctcttgaggtggctcctcttcttgatcttctccttcatcattctgagcctcatcctcatcttgagtcggtggagatgcttgcatggaggaagatggttgatcttgtgcttgtggaggctcttcggattccttaggacacacatccctaatggatatgttccttagcgcgacacacggagcctcttcatcatctagctcatcaagatcaacttgctctacttgagagccgttagtctcatcaaacacaatgtcacaagaaacttcaactagtccagaggacttgttaaagactctatatgcccttgtgtttgaatcatatcctagtaaaaaaccttctacagccttaggaacaaatttggattttctacctcttttgacaagaataaagcatttgctaccaaagactctaaaatatgaaacattggtctttttaccggttaggagttcatatgatgtcttcttgaagattcggtgtagatacaaccggttgatggcgtagcaagcggtgttgaccgcctcggcccaaaaccgatccgaggtcttgtactcatcaagcatggtccttgccatgtccaatagagttctattcttcctctccactacaccattttgttgtggtgtgtagggagaagagaactcatgcctgatgccctcctcctcaaggaagccttcgatttgtgagttcttgaactccgttctgttgtcgcttctaatctttttgatcctcaagccgaactcattttgagtccgtctcaagaatccctttaaggtctcttgggtatgagatttttccaagtatagctgaccctctaacactcccttaaatgctactgaatcatcacttcttctaaagacagtaacaccttgattcccatccccgaatgtgatagctcgttggggatcttggtttttctcgtaggaggagaacatcttcttctctcctgtcatatggtttgtgcacccactatcgatgatccaacttgagcccccagatgcataaacccaaacacaagtctttgaccccttgtgcttgctcccaacatacttggcaactactttgccggatttgttagtcaaaacataagatgcatcaaaagccttaaatgaaatgttagaatcgtttgatgcaataggagttttcttcttatgcaattttgcacgggttgattgcctagagctagatgtctcacccttatacataaaagcatgattagggccagagtgagacttcctagagtgaattctcctaattttgtgctcgggataaccggcagggtacaaaatgtaaccctcgttatcctgaggcatgagagccttgcccttaacaaagttagacaatcttttaggaggggcattaagtttgacattgtctcccttttggaagccaatgccatccttgatgccagggcgtctcccactatagagcatacttctagcaaatttaaatttttcattttctaagtcatgctcattaattttggcattaagttgggctatgtgatcattttgtttcttaattaaagctaggtgatcatgaatagcatcaacattaatgtctctacatctagtgcaaatagaaacatgctcaacggtagatgtagagggtttgcaagattttagttcaacaatcttagcatgtaaaatatcattttcacttctaagattggaaatggtaatattgcaaacatctaagtctctagccttagcaattaatttttcattctcaattttaaggctagcaagagagacatttaattcttcaatcttagcaagtaaactaacattatcatctctatgattgggaattaaatcatcacaaacatttgaatcaaccttagcaattaatttatcattctcatttctaaggttggcaataatatcatggcacatgcttagctcattagataatttttcacatttgtctacctctagagcataagcattcttaaccttaacatgcttcttattttccttaattaggaagtcctcttgggtgtccaagagttcatccttctcatgaatagcactaattaattcatttaatttttctttttgttgcatgtttaggttggcaaaaagggtgcgcaaattatcctcctcatcactagaattatcttcatcacttcttccttttgccgtcctttgccatgaggcacttgtggccgacgttggggaagaggaggcccttagtgacgggctgacggcgatgttggcggcatcctcgttggaggaggagtcggtggagctctcgtcggagtcccacttacggcacacatgggcatcgccacccttcttcttgtggaacctcttcttttctctcctccttcccttcttgtcgtcgcccctgtcactgtcacttgataatggacattttgcaataaagtgaccgggcttaccacacttgtagcacactttattggagcgagatttgtagtcctttctccacctttgcttgaggatttggcgaaagctcttgatgatgagcgccatctcctcattgtcgagcttggaggcgtcgatgggtagtctacttgatgtagactcctccttcttctccttcgtcaccttgaatgcgaccggttgtgcttcgggcgtggaggggccatcttgctcgatgattttctttgagcctttgatcatcaactcaaagctcacaaattttcctattacttcctcgggagacattagtgtgtatctaggatcaccacgtattaattgtacttgcgtagggttaagaaaaacgagtgatctaagaataaccttgaccatttcatggtcatcccattttttgctcccgaggttgcgcacttggttcaccaaggtcttgagccggttgtacatctcttgtggcttctccccttggcgaagccggaagcgactgagctccccctcgatcgtctcccgcttggtgatcttggtcacctcgtctccttcgtgcgtggtcttgagtacgtcccaaatctccttggcgctctttaatccttgcaccttgttatactcctctcgacttagagaggtgaggagtatagtggtggcttgggagttgaagtgcacgatttgggccacctcgtcctcatcataatcttcatccccgacggatggtacctgtacaccaaactcaacaacatcccatatgcttttgtggagtgaggttaggtgatatctcatcatatcactccacctagaataatcttcaccgtcaaacgtcggtggtttgcctaatgggacggaaagtaatggagtatgcttaggaatgcaaggatagcgtagggggatcttattatacttcttgcgctcttggcgcttagaagtgacggacgcggcgtcggatccggatgtagagggcgaggaagagtcggtctcgtagtagaccactttcttcattttcttcttctcgccactcttgtgtgatcgaatgcgtgaaggggatccatccttcttgttgttggcggactcccttgatggagccttcccgtggcttgtagcggacttctcaccgccgatcaccatcttcttggcgtgatctcccgacat

SEQ ID NO: 4730 - DNA, 4806 bp, Zea mays
  Clone ID: TF_ZmC951_361
tcaatcaaagttcctagaatcaagaatatttagctcatgcctaagtttggtaaaagttttctcatctagtggcttggtaaagatatcggctaattgttctttggtgttaatgtaagcaatctcgatatctccccattgttggtgatccctcaaaaagtgataccgaatggctatgtgtttagtgtggctatgttcaacgggattatccaccatgcggattgcactctcattatcacatagaagaggaactttggttaatttgtaaccatagttcctaagggtttgcctcatccatatcaattgcgcgcaacaatggcctgcggcaatatactcggcttcggcggtagaaagagctacagaattttgcttcttagaagtccaagacaccagggatcttcccaagaactggcaagtccctgatgtgctctttctatcaattttacaccctgcccaatcagcatcggaatatccaattaaatcaaaagtggatcccttggggtaccaaaggccaaacttatgagtataaactaaatatctcaagattcgttttacggccctaaggccattagttcccatgggtgtcttgatgggcttggcatccttcatcccaaacttggtgagtatgtcttgaatgtacttcatttggctaatgaaggtgccctcttggagttgcttcacttgaaatcctaagaaatacttcaactcccccatcatagacatcttgaatttttgaatcatgatcctacatgctcttggggcttgcttgagcccataaagcgccttagagagtttgtaaacatggttaggatactcactatcttcaaagccgggaggttgctcaacatagacctcttccttgattggtccattgaggaaggcactcttcacgtccatttgataaagcttgaagccatggtaagtagcatgggcaagtaatatacgaattgactcaagcctagctacgggtgcataggtttcaccgaaatccaaaccttcgacttgtgagtatcccttggccacaagtcgggctttgttccttatcaccacaccatgctcatcttgtttgttgcggaagacccactcattcctcgtgaagttgttgagctcctcttgcattgccaacacccaatctgaatcccttaatgcatcttctatcttgtatggctcaatagaagacacaaaggagtaatgttcgcaaaaatgagcaacacgagatcgattggttatccccttttgaatatcgtcgaggatggtgttcacggggtgatctcgttgtattgcttggtggactcttgggtgtggcggtcttagaccgtcatcatcttccttgtcttgatcatgggcatctccccctagatcattgtccccttcttgaggtggctcatcctcttgatcttcattttcatcctcttgagcttgatcctcatcttgagttggtggagatgcttgcatggaggaagatggttgatcttgtgcttgtggaggctcttcgaattccttaggacacacatcccctatggacatgttccttagagcgacgcacggagcctcttcatcatctagctcatcaagatcaacttgctctacttgagagccgctagtctcatcaaacacaatgtcacaagaaacttcaactagtccagtggacttgttaaagactctatatgcccttgtgtttgaatcatatcctagtaaaaagccttctacagccttaggagcaaatttagattttcttccagttaggagttcatacgatgtcttcttgacgatttggtggaggtagaggcggttgatggcgtagcaagcggtgttgattgcttccacccaaaaccggtctgatgtcttgtattcatcaagcatggtcctcgccatgtcaagtagagttctattcttcctctccactacaccattttgttgtggcgtgtagggagaagagaactcatgcttgatgccctcatcctcaaggaagccttcaatttgagagttcttgaactccgtcccgttgtcgcttctaatctttttgatcctcaagccgaactcattttgagcccgtctcaagaatccctttatggtctcttgggtttgtgatttttcttgaaaaaagaacacccaagtgaagcgagaataatcttccacaattacaagacaatacttactcccgtcgatgcttatgtaagcgatcgggccgaataggtccatgtggagtagctcaagcgacctgtcggtcgtcatgatgttcttgtgtggatgatgaacaccaacttgcttccctgcctgacatgcgctacaaaccctgtctttctcaaaatgaacattggttagtcccaaaatgtgctctccctttagaagcttatgaagattcttcatcccaacatgggctagtcggcggtgccaaagccaacccatgttagtcttagcaattaagcaagtgtcgagttcagctctatcaaaatctactaagtatagctgaccctctaacactcccttaaatgctactgaatcatcacttcttctaaagacagtaacaccttgatttccatccccgaatgtgatagctcgttgggggtcatggtttttctcgtaggaggagaacattcttttctccccagtcatgtggtttgtgcacccgctatcgatgatccaacttgagcccccggatgcataaaccatgggagctttgcccttaacaaagttgggcaatttcttgggggcattaagtttgacattgtctccttgttggaagccaatgccatccttaatgcctgggcgtctcccactatggagcatgcttctagcaaatttaaatttttcattttctaagtcatgctcattatttttagcactaagttgagctatgtgatcattttgtttcttaattaaagctaggtgatcatgaatagcatcaacattaatgtctctacatctagtgcaaatggtgacatgctcaacggtagatgtagagggtttgcaagtatttaattcaacaatcttagcatgtaaaatggcattctcatctctaagattggaaatagaaacattgcaaacatttaaatctttatccttagcaattaatttttcattctcaattttaaggctatagagtgatgcatttaacttgtcaatcttagtaattagactaggattatcatttctaagattaacaagagaatcatcacaaacatttaaattctcaaccttagcaattaatttagcattctcatttctaaggttggaaataacatcatggcaagtgcttagctcactagttattttttcacatttttctacctctagagcataagcatttttaaccttaacatgcttcttgttttctttaattaggaagtcctcttggctatccaagagttcatccttatcatgaatagcactaattaattcatttaatttttccttttgttgcatgtttaggttggcaaaaagtgtaagtaaatcatcctcatcatcactagagctagcctcatcactagatgttgcatacttagtggaggatctagattttaccttcttcttgccgtcttttgccatgaggcacttgtggacgacgtttgggaagagaagacccttggtgacggcgatgtttgcggcatcctcgtcggaggaggagtcggtggagctctcctcggagtcccactcccggcaaacatgggcatcgccgcccttattcttgtagtatctcttcttttctcttctctttcccttcttgtcgtcgtccctgtcactatcactagataatggacatttagcaatgaaatgaccgggcttaccacacttgtagcacaccttcttggaacggggcttgtaatctctccccttcctttgcttgaagatttggcgaaagcttttgatgattaaagccatctcctcgttgtcgagcttggaggcgtcgatgggaagcctacttggtgtagactcttccttcttctcctccgtcgctttgaagacgacgggttgcacctcgggtgtggaggtggcgccttgctcgatgatttgtttggagcctttgatcattagttcaaagctcacaaactttcttatcgcttcctcgggagacattagtttatatcttggatcaccacgaattaattgtacttgagtagggttaagaaaaacaagtgatctaagaataaccttgaccatttcatggtcatcccatttggtgctcccgaggttgcgcacttggttcaccaaggtctcgtctccttcgtgcgcagacttgagcacgtcccaaatctcctttgcactcttcaacccttgcaccttattatactcctctcgacttagagaggcgaggagtatagtagtggcttgggagttgaagtgttggatttgttcgacctcctccaaatcataatccttgtcccccttctttggtacctgcgctccatactcaacgatatcccatatgcttttatggagtgaggttaggtgatgcctcattttatcactccacatagaataatcttcaccttcaaacataggtggtttgactaatgggacggaaagtaatggagtgcgttttgaaatgcgaggatagcgaaggggcatcttactatacttcttgcgctcatggcgcttagaagtggtggatgccgattccgagacggaggtggagggtgacgaagagtcggtctcgtaatagaccaccttcttcatcttcttcttcttgtcacccttccgttgggacttgatggaggaagaggattcctccttgtgcttgtgggcggactcccttgagtatgttctccctgagcttgcggacttgttgccggtcccgatctccctcat

SEQ ID NO: 4731 - DNA, 3087 bp, Zea mays
  Clone ID: TF_ZmC951_387
ttaagttggtggagattcttgcatggaggaagatggttgatcttgtgcatttggaggttcttcggattccttaggacatacatccccaatggacatgttccttagcgcgacgcacaaagcctcttcatcacctatctcatcaacatcaacttgctctacttgagagccgttagtctcatcaaacacaatgtcacaagaaacttcaactagtctagaggacttgttaaagactctatatgcccttgtgtttgaatcatatcctagtaaaaagtcttctacagccttaggagcaaatttggattttctacctcttttaacaagaataaagcatttgctaccaaagactctaaaatatgagacattgggctttttaccggttaggagttcatatgatgtcttcttgaggattcggtgtagatacaaccggttgatggcgtagcaagcggtgttgaccgcctctgcccaaaaccgatctgaagtcttgtactcatcaagcatggtccttgccatgtccaatagagttctattcttcctctccactacaccattttgttgtggcgtgtagggagaagagaactcatgcttgatgccctcctcctcaagaaagccttcgatttgagagttcttgaactccgtcccgttgtcgcttctaattttcttgatccttaagccgaactcattttgagctcgtctcaagaatccctttaaggtctcttgggtatgagatttttccttggcggatttgttagtcaaaacataggatgcatcaaaagttttaaatgaaatgttagaatcatttgatgcaataggagttttcttcttaggcaattttgcacgggttgattgcctagagctagatgtctcacccttatacataaaagcatgactagggccagagtgagactttctagaatgaattctcctaatgttgtgctcgggataaccgacagggtacaaaatgtaaccctcgttatcctgaggcatgggagccttgcccttaacaaagttagataatcttttaggagggacattaagtttgacattgtctcctttttggaagccaatgtcatcgttgatgccagggcatctcccactatagagcatgcttctagcaaatttgaatttttcattttctaagtcatgctcatttattttggcattaaattgagctatgtgatcattttgtttcttaattaaatctaggtgatcatggatagcatcaacattaatgtctctacatctagtgcaaatagaaacatgctcaacggtagatgtagagggtttgcaagattttagttcaacaatcttaacatgtaaaatgtcattttcacttctaagattggaaattgtaacattgcaaacatctaggtctttagccttagcaatcaaattttcattttcatttctaagcctaataagagaatcattcaatttttcaatcctagcaagcaaattagcattatcatctctaaaattggaaattgaatcatcacatacatttgaatcaaccttagctattaaactagcattctcatttctaaggttggtaataatatcatggcacttgcttagctcactagatattttttcacatttttgtacttctagagcataagcatccttaaccttaacatgcttcttattttccttaattaggaagtcctcttgggagtccaagagttcatccttctcatgaatagcactaattaattcatttaatttttctttttgttgcatgttaaggttggcaaaaagaatacacaaattatcttcctcatcactaaaatgatattcatcactagaggatgcatatttagtggaggatcttgattttaccttctttcttttgccgtcctttgccatgaggcacttgtggtcgacgttggggaagaggagtcccttggtgacagcgatgtgggcggcgtcctcgtcggaggaggagtcgaaggagctctcttcggagtcccactcgcggcacacatgggcatcaccgcccttcttcttgtagtacctcttcttttctctcctcttgcctttcttgtcgtcgcccctgtcactgtcactagatagtggacattttgcaataaaatgaccgggcttaccacacttgtagcaaactttcttggagcggggcttgtaatccttccccctcctttgcttgaggatttggcagaagctcttgatgatgagcgtcatttcctcgttgtcgagcttggaggcgtcgatgggtagtctacttgaggtagactcctccttcttctcctctgttgccttgaatgcgacgggttgcacctcgagtgtggaggcgccaccttgctccaagttgatgatttgtttgaagcctttgatcatcaattcaaagctcacaaactttcctataacctcctcgggagacattagcttgtatctaggatcaccacgtattaattgaacttgagtaggattacgaaatacgagtgatctaagaataaccttgaccatttcatggtcatcccacttggtgctcctgaggttgcgcacttggttcaccaaggtcttgagccggttgtacattgcttgtggcttctctccttcgttgaggatgaatcgaccgagctccccctcgatcgtctcccgcttggtgatcttggtcacctcgtctccttcgtgcgcggtcttgagcacgtcccaaatctccttggcgctcttcaacccttgcactttgttatactcctgcgctccaaattcaacaatgtcccatatacttgcgtggagtgacgttaggtgatgtctcattttgtcactccacatacaataatcctcaccatcaaagaatggtggtttgctatacttattgcgctcatggcgcttagaagtgacggacgacgcgtcggagccagatgtagaaggtgatgatgaatcggtctcgtagtagaccaccttcctcatcttctttttcttgtcgccactccgatgtgatttgtgggaagaggctttcttctccttccccttttcctttttgcgggactcctccgatgaagctttcccgtggcttgtagcgggcttgtcgccggtctccatctccttcttggcgtgatctcccgacat

SEQ ID NO: 4732 - DNA, 7735 bp, Zea mays
  Clone ID: TF_ZmC951_391
ctagtggttaccccctttatgaatgtcgccgaggatggtgtcggcggggtgatctcgttggattgcttggtggactcttgggtgtggcggtcttggttcttcatcctccttgtcttgatcatttgcatctcccccttgatcattgccgtcatcttgaggtggctcatttgcttgatcttctacttcatcaacttgagcttcatcctcattttgagtcggtggagatgctggcgtggaggaggatggtttatcttgtgcatttggaggctcttcggattccttaggacacacatccccaatggacatgttccttagcgcgatgcatggagcctcttcaacacctatctcatcaagatcaacttgctctacttgagagccgttagtctcatcaaacacaacgtcacaagaaacttcaacttgtccagaggacttgttaaagactctatatgcctttgtgtttgaatcatatcctagtaaaaagccttctacagttttaggagcaaatttagattttctacctcttttaacaagtataaagcatttgctaccaaagactctaaaatatgaaatattgggctttttatcggttaggagttcgtatgatgtcttattgaggattcggtgtagatacaaccggttgatggcgtagcaagcggtgttgaccgcctcggcccaaaaccgatccgaagtcttgtactcatcaagcatggttcttgccatgtctaatagagttctattcttcctctccactacaccattttgttgtggcgtgtagggagaagagaactcatgcttgatgccctcctcctcaaggaaaccttcaatttgagagttcttgaactctgtcccgttgtcgcttcttattttcttgatccttaagccgaactcattttgagcccatctcaagaatccttttaaggtttcttgggtatgagatttttcccaaatggttttgggtcctttggcattagacacaagaactttggttacccaaacacaagtttttgaccccttgtgcttgcccccaacatatttggcaactaacttgccggatttgttagttaacacatatgatgcatcaaaagttttaaatgaaatgtcatgatcatttgatgcactaggagttttcttcttaggcaacttagcacgggttggttgcctagaactagatgtctcacccttatacataaaagcatggttcgggccagagtgagacttcctagaatgaattctcctaattttgttattgggataaccggcagggtataaaatgtaaccctcattatcctgaggcataggagccttgcccttaacaaagttagataatttcttaggaggggcattaagtttgacattgcctccttgttggaaaccaatgtcgtccttaatgccagggcgtctccctctataaagcatgcttctagcaaatttaaatttttcgttttctaagtcatgctcggcaattttagcatctaactttgttctaaggtcggaaattgtaacattgcaaacatctagttctttagccttagcaagcaatttttcattttcaatcctaaggctagcaagagtactagtgtttaattcttcaatcttagcaagcaaattatcattatcatttctaagattgggaattgaaacatcacaaacatttgaatcaaccttagctaacaaattagcattctcatttctaaggttgtctatagtctcatggcaagtgcgtagctcactagatagtttttcacatttttctacttctagagcataagcatttttcaccttaacatgctttttgttttctttaataaggaagtcctcttgggagtccaagagatcatccttctcatggatagcactaatcaattcatttaatttttctttttgttgcatgtttaagttggcaaaaagagtacgtaaattatcttcctcatcactagcattatcatcgctagaggactcatatctagtggaggatttggatttaaccttcttctttttgtcgtcctttgccatgaggcacttgtggccgacgttggggaagagaagtcccttggtgacggcgatgttggcggcgtcctcgtcgtcggaggagtcgctagagctttcgtcggagtcccactcgcggcatacatgagcgtcgccacccttcttcttgtagtattttttcttttcctttcttctcctcttcttgttgtcgcccctatcactgtcactagatagtggacattttgcaataaaatgaccgggcttaccacatttgtagcacactttcttggagcggggcttgtaatctttccccctcctttgcttgaggatttggcggaagcttttgatgacaagcgtcatttcctcgttgtcgagcttggaggcgtcgatgggtgttctactcggtgtagactcctccttcttctcctccgtcgccttaaatgcgactggttgtgcttcggacgtggaggggtcgtcaagctcgttgatctttcttgagcctttgatcataaactcaaagctcacaaaattcccgattacttcctcgggagtcattagtgtgtatctaggattgccacgaattaattggacttgagtagggttaaggaaaataagtgatcttaaaataaccttaaccacctcgtggtcatcccatttcttgctcccgaggttgcgcacttgattcaccaaggttttgagccggttgtacatgtcttgaggctcctctccttggcggagacggaagcgaccgagctccccctcgatcgtctcccgcttggtgatcttggttagctcatctccttcgtgcgcggtcttgagcacgtcccaaacttccttggcgctctttaatccttgcaccttgttatactcctctcgacttagagaggcgaggagtatagttgtggcttgggagttgaagtgctcgatttgggccacctcgtcctcatcataatcctcatcccctactgatagtcgcctagagggggggtgaatagggcgaaacttttgatcgacggatttacctccttcgtcgagatcgagatgcccattggttcccatgggtgtcttgatgggtttggcatccttcattccaaacttgtttagaatatcttgagtgtactttgtttggctaaggaaggtgccctcttggagttgcttcacttgaaatcctaagaaatacttgaactcccccatcatagacatctcgaacttttgtgtcatgatcctactaaattcttcacatgtagactcgttagtagacccaaatataatatcatcaacataaatttggcatacgaacaagtcattttcgagagttttagtaaataaagtaggatcggcctttccgactttgaatccattagtgataagaaaatccctaaggcattcataccatgctcttggggcttgcttgagcccataaagcgccttagagagcttataaacatggttagggtactcactatcttcaaagtcgggaggttgctcaacatagacctcttccttgattggtccattgaggaaggcacttttcacgtccatttgataaaagcttaaagccatggtaagtagcataggccaataatatacgaattgactcaagcctagctacgggtgcataggtttcaccgaaatccaaaccttcgacttgggagtatcccttggccacaagtcgagctttgttccttgtcaccacaccatgctcatcttgcttgttgcggaagacccatttggttcctacaacattttgattaggacgtggaactaaatgccatacctcattcctagtgaagttgttgagcttctcttgcatcgccaccacccaatccgaatcttgaagtgcttcctctaccctgtgtggctcaatagaggaaacaaaggagtaatgctcacaaaaatgtgcaacacgagatctagtggttacccccttatgaatgtcgccgaggatggtgtcgacggggtgatctcgttggattgcttggtggactcttgggtgtggcggcctttgttcttcatcctccttgtcttgatcatttgcatctcccccttgatcattgccgttatcttgaggtggctcatttgcttgatcttctatttcatcaacttgagcttcatcctcattttgagtcggtggagatgcttgcgtggaggaggatggttgatcttgtgcatttggaggctcttcggattccttaggacacacatccccaatggacatgttccttagcgcgatgcgtggagcctcttcattacctatctcatcaagatcaacttgctctacttgagagccgttagtctcatcaaacacaacgtcacaagaaacttcaacttgtccagaggacttgttaaagactctatatgcccttgtgtttgagtcatatcctagtaaaaagccttctactgtcttaggagcaaatttagattttctacctcttttaacaagtataaagcatttgctaccaaagactctaaaatatgaaatattgggctttttaccggttaggagttcatatgatgtcttcttgaggattcggtgtagatataaccggttgatggcgtagcaggcggtgttgaccgcctcggcccaaaactgatccgaagttttgtactcatcaagcatggttcttgtcatgtccaatagagttctattctttctctccactacaccattttgttgtggcatgtagggagaagagaactcatgcttgatgccctcctcctcaaggaagccttcgatttgagagttcttgaactccgtcccattgtcgcttcttattttcttgatccttaagccgaactcattttgagtccgtctcaagaatccctttaaggtctcttgggtttgagatttttccctgtctttctcaaaatgaacattggttagtcctaaaatgtgctctccctttagaagcttatgaagattcttcatcccaacataggctagtcggcggtgccagagccaacccatgttagtcttagcaattaagcatgtgtcgagttcagctctatcaaaatctactaagtatagctgaccctctaacacacccttaaatgctattgaatcatcacttcttctaaagacagtgacacctttgaccaatccttgatttccatccccgaatgtgatagctcgttggggatcttggtttttctcgtaggaggagaacatcttcttctcccttgtcatatggtttgtgcacctgctgtcaattatccaacttgagaccccggatgcataaaccttgccggatttgttagttaaaacatatgatgcatcaaaagttttaaatgaaatgtcatgatcatttgatgcactaggagttttctttttaggcaacttagcacgggttggttgcctagaactagatgtctcacccttatacataaaagcatggttagggccagagtgagacttcctagagtgaattctcctaattttactctcaggataaccgacagggtacaaaatgtaaccctcgttatcctgagacatgggagctttgcccttgacaaagttggacaatttcttaggaggggcattaattttgacattgccttcctgttgaaagccaatgccatccttaatgccaggacgtctccctctatagagcatgcttctagcaaatttaaaattttcattctctaagtcatgctcggcaattttagcatctaattttgctatatgatcattttgttgtttaattaaagccatgtgatcatgaatagcatcaatgttaacatctctacatctagtacaaatagaagtgtgctcaacgatagatgtagagggtttgcaagatttcaattctacaaccttagcatgcaatatatcatttttagttctaaggtcggaaattgtagcattgcaaacatctaattctttagccttagcaagcaatttttcattttcaatcctaaggctagcaagagacatgtttaattcttcaatcttagcaagcaaatcatcattatcatttctaagattgggaattgaaacattacaagcaatagaatcaaccttagctaacaaattagaattctcatttctaaggttgtctatagtctcatggcaagtgcttagctcactagataattttttacatttttcaacttctagagcataagcatttttaactttaacatgctttttgttttccttgattaggaagtcctcttgggagtccaagagatcatccttctcatggatgacactaattaactcatttaatttctctttttgttgcatgtttaagttggcaaaaagagtacgcaaattatcttcctcgtcactagcattatcatcactagaggactcatatctagtggaggatttagatttaaccttcttctttttgccgtccttcgccatgaggcacttgtggccgacgttggggaagaggagtcccttggtgacgacgatgttggcggcgtcctcgtcgtcggaggagtcgctagagctttcgtcggagtcccactcccgacaaacatgggcatcgccgcccttcttcttgtagtacctcttcttttcctttcttctcccttttttgtcgtcgcccctgtcattgtcactagaaataggacattttgctataaagtgaccgggcttaccacacttgtagcaaaccttcttggagcggggcttgtaatctttccccctcctttgcttgaggatttggcggaagcttttgatgacaagcgccattttctcgttgtcgagtttggaggcgtcgatgggtgttctactcggtgtagactccttctcttccgtcgctttgaatgcgatcggttgagcttcggacgtagaaggaccgtcaagctcgttgatcttccgtgagcccttgatcataaattcaaagctcacaaaattcccgattacttcctcgggggtcattagtgtatatcttgggttgccacgaattaattgtacttgagtagggttaaggaaaataagtgatcttaaaataaccttaaccatctcgtggtcatcccactttttgctcccgaggttgcgcacttgattcaccaaggttttgagccggttgtacatgtcttgtggctcctccccttggcgaagacggaagcgaccgagctccccctcgatcgtttcccgcttggtgatcttggtgagctcatcaccctcgtgcgcggtcttgagcacgtcccaaacttccttggctctttttaatccttgcaccttgttgtactcctccctacttaaagaggcgaggagtatggttgtagcttgggagttgaagtgctcgatttgggccacctcgtcttcatcataatcctcatcccctacagatggtacctgtgctccaaactcaacaacattccatatacttttgtggagtgaggttagatgaaatttcattaattcactccacctagcataatcttcaccgtcaaaggttggcggtttgcctaatggaacggaaagtaatggagtatgtctagaagtgcgagggtaatgtaaggggatcttactaaacttcttgcgctcatggcgcttagaagttacgaagggcgcgtcggagccggaggtagatggcgatgaggtgtcggtctcgtagtagaccaccttcctcatcttctttttcttgtccccactccgatgcgacttgtgggaagaggctttcttctccttcccctttccctttttgtgggactcttccgatgaagctttcccgtggcttgtagcgggcttgtcgccggtctccatctctttcttggcgtgttctcccgacat

SEQ ID NO: 4733 - DNA, 4239 bp, Zea mays
  Clone ID: TF_ZmC951_392
ctaagggtttgcctcatccaaagtaattgcgcgcaacaatggcccgcggcaatatactcggcttcggcggtagaaagagctacggaattttgcttctttgaagcccaagacaccaaggatcttcccaagaactggcaagtccccgatgtgctctttctttggatcgacggttttacctcccgtgtcgaggtcgagatgcccattggttcccatgggtgtcttgatgggcttggcatccttcatcccaaacttgtttagaatgtcttgaatatacttcgtttggctaatgaaggtgccctcttggagttgctttacttgaaatcctaagaagtatttcaactcccccatcatcgatatcttgaacttctgtgtcatgatcctactaaattcttcacatgcagattcgtttgtagatccaaatatgatatcatcaacgtaaatttggcatacaaacaaatcattgtcaagagttttagtgaacaaagtaggatcggcttttccgactttgaagccattagtgataaggaaatctcttaggcattcataccatgctcttggggcttgcttgagcccataaagcgccttagagagtttatagacatggttagggtactcactatcttcaaagccgggaggttgctcgtcttgcttgttgcggaagacccacttggttcctacaacattttggttaggacgtggaactaaatgacatacctcattcctagtgaagttgttgagctcctcttgcatcgccaccacccaatccgaatcttgtagtgcttcctctaccctgtgtggttcaatagaggaaacaaaagagtaatgctcacaaaaatgtgcaacacgagatctagtggttacccccttatgaatgtcaccgaggatggtgtcgacggggtgatctcgttgtattgcttggtggactcttgggtgtggcggtcttggttcttcatcctccttgtcttggtcatttgcatctcccccttgattattgtcgtcatcttgaggtggctcatctgtttgatcttctccttcatcaacttgagcctcatcctcattttgagttggtggagatgcttgcgtggaggaggatggttgatcttgtgcatttggaggctcttcggattccttaggacacacatctccaatggacatgttccttagcgcgatgcatggagcctcttcatcacctatctcatcaagatcaacttgctctacttgagagccgttagtctcatcaaacacaatgtcacaagaaacttcaacttgtccagaggacttgttaaagactctatatgcccttgtgtttgaatcatatcctagtaaaaagccttctacagccttaggagcaaatttggattttctacctcttttaacaagaataaagcatttgctaccaaagactctaaaatatgaaacattgagctttttaccggttaggagttcgtatgatgtcttcttgaggatccggtgtagatataaccggttgatggcgtagcaagcggtgttgaccgcctcggcccaaaaccgatctgaaatcttatattcatcaagcatggttcttgccatgtccaatagagttctattcttcctctccactacaccattttgttgtggcgggtagggagaggagaactcatgcttgatgccctcctcctcaaggaagccttcaatttgagagttcttgaacttcgtcccgttgtcgcttctaattttcttgatccttaagccgaactcgttttgagcccgtctcaagaatccctttaaggtttcttgggtatgagatttttccagcaaaaataacacccaagtgaagcgataataatcatccacaataactagacagtacttactcccgccgatgcttatgtaagctatcgggccgaatacgtccatgtgtaggagctcgagtggcgtgtcagttgtcataatgttcttgtgtggatgatgaacaccaacttgctttcctgcctgacatgcactacaaaccctgtctttctcaaaatgaacatttgttagtcccaaaatgtgttctccctttagaagcttgtgaagattcttcattccaacatgtgctagtcggcggtgccagagccagcccatgttagtcttagcaattaagcaagtgtcgagttcagctctatcaaaatctactaagtatagctgaccctctaacactcccttaaatgctattgaatcatcacttcttctaaagacagtaacacctacatcttgatttccatccccgaatgtgatagctcgttggggatcctggtttttttcgtaggaggagaacatcttcttctcccctgtcatgtggtttgtgcacccgctatcgatgatccaacttgagcccccggatgcataaacccaaacacaagtctttgatcccttgtgtttgcccccaacatacttggcaactatcttgtcggatttgttagttaaaacataagatgcatcaaaagttttaaatgaaatgttatgatcatttgatgcactaggagttttcttcttaggcaattttgcacaggttgattgcctagagctagatgtctcacccttatacataaaagcatgattagggccagagtgagacttcctagagtgaattctcccaattttgctctcgggataaccggcagggtacaaaatgtaacccttgttatactgaggcatgggagccttgcccttaacaaaattagacaatcttttaggagggtcattaagtttgacattgtcccccttttggaagccaatgtcatcctttatgccagggcgtctcccactatagagcatgcttctagcaaatttaaatttttcgttttctaagtcatgctcggcaattttagcattaagttgagctatgtgatcattttgtttcttaattaaggctaggtgatcacggatagcatcaacattaatgtctctacatctagtacaaatggaagtatgttcaacggtagatgtagagggtttgcaggattttaattctacaaccttaccatgcaatatatcatttttacttctaaggtcggaaatggaagcattgcaaacatctaattctttagccttagcaagcaatttttcattctcaatcctaaggctagcaagagagatattcaattcttcaatcttagcaagcaaatcaacattatcatttctaagattgggaattgaaacatcacaaacatttgaatcaaccttggcaattaaattagcattctcatttctaaggttggtaatgacatcatggcaagtgcttagctcactagatagtttttcacaattttctacttctagagtgtaagcatttttaaccttaacatgcttcttgttttctttaatgaggaagtcctcttgggtgtctaagagatcatccttctcatgaatagcactaatcaattcattcaatttttctttttgttgcatgtttaggttggcaaaaaggatgcgcaagttatcctcctcattactagcattatcctcatcactagaggtttcatatttagtggaggatcttgattttaccttcttccttttgtcgtcctttgccatgaggcacttgtggccgacattggggaagagaagacccttggtgacggcgatgtttgcggcgtcctcgtcggaggaggagtcggtggagctctcatcggagtcccactcccggcaaacatgagcatcgccgcccttcttcttgtagtatctcttcttctcctttcttctccccttcttgtcgtcgcccctgtcactgtcactagatagtggacattttgcaataaaatgaccgggcttaccacatttgtagcacactttcttggagcggggcttgtaatccttccccttcctttgcttgaggatttggcggaagctcttgatgatgagcgtcatttcctcgttgtcgagcttggaggcgtcgatgggtgttctacttgatgtagattcctctttcttttctttcgtcgccttgaatgcgaccggttgtgcttcggacatggaggggccatctagctcgttgattttctttgagcctttgatcatcaactcaaagctcacaaagtttcctatcacttcctcgggagtcattagtgtatatctaggattaccacgaattaattgaacttgagtagggttaaggaaaacaagtgatctaagaataaccttaaccacttcgtggtcatcccattttttgctcctgaggttgtgcacttggttcaccaaggttttaggccggttgtacat

SEQ ID NO: 4734 - DNA, 4077 bp, Zea mays
  Clone ID: TF_ZmC951_393
tcaaatcaaatgtggatccccttccgtgtcaaggtcgagatgcccattagttcccatgggtgttttgatgggcttggcatccttcatcccaaacttgtttagaatatcttgaatatacttcgtttggctaatgaaggtgccctcttggagttgctttacttgaaatcccaagaagtacttcaactcccccatcatcgacatctcgaatttttgtgtcatgatcctactaaattcttcacatgtagattcgttagtagacccaaatataatatcatcaacataaatttggcatacaaacaaatcattttcaagtgttttggtaaagagtgtaggatcgacctttccgactttgaatccattagtgataaggaaatctctaaagcatttataccatgctcttggggcttgcttgagcccataaagcgccttagagagtttataaacatggttagggtactcactatcttcaaagccgggaggttgctcaacatagacctcttccttgattggtccattgaggaaggcacttttcacgtccatttgataaagcttgaagccatggtaagtagcataggctaataatatacgaattgactcaagcctagctacgggtgcataggtttcaccgaaattcaaaccttcgacttgtgaatatcctttggccacaagtcgtgctttgttccttgtcaccacaccatgctcgtcttgcttgttgtggaacacccacttggttcctacaacattttgattaggacgtggaactaaatgccaaacctcatttctagtgaagttgttgagctcctcttgcatcgccaccacccaatccgaatcttgaagtgcttcctctaccctgtgtggctcaatagaggaaacaaaagagtaatgttgacaaaaatgagcaacacgagatctagtggttacccccttatgaatgtcgtcgaggatggtgtcgacggggtgatctcgttggattgcttggtggactcttgggtgtggcggtcttggttcttcatcctctttgtcttgatcatttgcatctcccccttgattattgccatcatcttgaggtggctcatcttcttgattttctccttcatcaaattgagcctcattctcattttgagttggtggagatgcttgcggggaggaggatggttgatcttgtgcatttggaggctcttcggattccttaggacacacatccccaatggacatgttccttaacgtgatgcacgaagcctcttcatcacctatctcatcaagatcaacttgctcggttaggagttcatatgatgtcttcttgaggattcggtgtagatataatcggttgatggcgtagcaggcggtgttgaccgcctcggcccaaaaccgatccgaagtcttgtactcatcaagcatggttcttgccatgtccaaaagatttctatttttcctctccactacaccattttgttgtggtgtgtagagagagaagaactcatgcttgatgccctcctcctcaaggaagccttcgatttgtgagttcttgaactccgtcccgttgtcgcttcttattttcttgatccttaagccgaactcgttttgagcccgtctcaagaatccctttaaggtctcttgggtatgagatttttcatttgttagtcccaaaatgtgttctccctttagaagtttgtgaagattcttcattccaacatgtgctagtcgacgatgccagagccagcccatgttagtcttagcaattaagcaagtgtcgagttcagctctatcaaaatctactaagtatagctgaccctctaacactcccttaaatgctattgaatcatcactccttctaaagacagtaacaccttgatttccatccccgaatgtgatcgctctttggggatcttggtttttctcgtaggaggagaacattttcttctcccctgtcatgtggtttgtgcatccgctgtcgattatccaacttgagcccccggatgcataaaccttgccggatttgttagttaagacataagaggcatcaaaagttttaaataaaatgctatggtcatttgatgcactaggagttttcttcttaggcaacttagcacgggttggttgcctagagctagatgtctcacccttatacataaaagcatgatttgggccagagtgagacttcctagagtgaattctcctaatcttgtcctcgagataaccggcagggtacaaaatgtaaccctcgttatcctgaggcatgggagccttgcccttaacaaagttggacaattttttaggaggggcattaagtttgacattgcctccctgttggaagccaatgccatccttaatgccagggcgtctcccattataaagcatactacgagcgaacttaaatttttcattttctagttcatgctcggcaattttagcatctaatttggctatatgatcattttgttgtttaatcatggaaaggtgatcatgtatagcactaacatcaacatctctacatctagtgcaaatagtgacatgctcagtaatagatgtagagggtttgcaagaattgagttcaacaatcttagcacgcaatatatcatttttatctctaagatcggaaattgtaacattgcaaacatctagttctttagccttagcaattaatttctcattttcaatcctaaggctggcaagagtaacatttaattcttcaatcttagcaagtaaatcaacattatcatctctaagattggaaattgaaacattacaagcatttgaatcaaccttagcaattaaactagcattctcatttctaaggttgtcaatagtctcatggaaagtgcttagctcactagatagtttttcacatttttcaacttctagagcgtaagcatttttaattttaacatgcttcttgttttctttaataaggaagtcttcttgggtgtccaagagatcatccttctcatggatagcactaattaattcatttagtttttctttttgttgcatgtttagattggcaaaaagaatgcacaagttgtcctcctcattgctagcattttcctcatcactagaggtttcatatttagtggagaatcttgattttaccttcttccttttgccgtcttttgccatgaggcacttgtggccgacgttggggaagagaagacccttggtgacggccatgtttgcggcgtcctcgtcggaggaggagtcggtggagctctcgtcggagtcccactcccggcaaacatgggcatcgccgcccttcttgtagtacctcttcttttcctttcttctccccttcttgtcgtcgcccctgtcactgtcactagatagtggacattttgcaataaaatgaccgggcttaccacatttgtagcaaactttcttggagcggggcttgtaattcttccccctccttagcttgaggatttggcggaagctcttgatgacgagcgccatttcctcattgtcgagcttggaggcgtcgatgggtgttctactcgatgtagactcttccttcttctcctccgtcgccttaaatgcgaccggttgtgcttcgaacgtggaggggccatcaagctcgttgatcttctttgagcctttgatcatcaattcaaagctcacaaagtgtcctatcacttcctcgggagacattagtgtgtatctaggattaccacgaattaattgcacttgtgtagggttaaggaaaacaggtgatctaagaataaccttaaccatttcgtggtcatcccatttcttgctcccgaggttgcgcacttggttcaccaaggttttgagccggttgtacatgtcttgtggctcctccctaaacttcttgcgctcatggcgcttagaagtgatggacggcgtgtcagagccgaaggtggatggcgatgaggtgtcggtctcgtagtagaccactttcctcatcttcttcttcttgtcaccgctccgacacgacttgtgtgaaggggattccttttccttccccttccctttgttgtaggactctcccgatggagccttcccgtggcttgtagcgggcttcctgccggtcaccatatccttcttggcgtgatctcccgacat

SEQ ID NO: 4735 - DNA, 3685 bp, Zea mays
  Clone ID: TF_ZmC951_397
ctaagggtttgcctcatccaaagcaattgcgtgcaacaatggcctgtggcaatataatcggcctcggtggtagaaagagctacggaattttgcttctttgaatcccaagacaccagagaccttcccaagaactggcaagtccccgatgtgctctttcttttgatctacggatttacctcccgtgtcgaggtcgagatgcccattggttcccatgggtgtcttgatgggcttggcatccttcatcccaaacttgtttagaatgtcttgaatatacttcgtttggctaatgaaggtgcccgcttggagttgcttcacttgaaatcccaagaagtacttcaactcccccatcatagacatctcgaatttttgtgtcatgatcctactaaattcctcacatgtagattcgttagtagacccaaatataatatcatcaacataaatttggcatacaaacaaatcattttcaagagttttagtaaataaagtaggatccgccttttcgactttgaagccattagtgataagaaaatctcttaggcattcataccatgctgcttggggcttgcttgagcccataaagcgccttagagagtttgtaaacatggttaggatactcactatcttcaaagccgggaggttgctcaacatagacctcttccttgattggtccattgaggaaggcactcttcacgtccatttggtaaagcttgaagccatggtaagtagcataggcaagtaaaatgcgaattgattctagcctagctacgggtgcataggtttcaccaaaatccaaaccttcgacttgtgaatatcccttggccacaagtcgggctttgttccttgtcaccacaccatgctcatcctgtttgttgcggaagacccacttggttcctacaacattttggttaggacgtggaactaaatgccatacctcgttcctagtgcagttgttgaggtcctcttgcatcgccaccacccaatccgaatcttgtagtgcttcctctaccctgtgtggctcaatagaggaaacaaaagagtaatgttcacaaaaatgagcaacacgagatcgagtagttacccccttttgaatatcgccgaggatggtgttcacggggtgatctcgttggattgcttggtgaactcttgggtgtggcggtcttggaacttgttcatcttccttaacttgatcatgggcatctcccccttgatcattgctctcctcttgaggtggctcaacttcttgatcttctcctttatctttttgagcctcatcctcatcttgagttggtggagatgcttgtgtgtaggaagatggttgatcttgtgcttgtggaggctcttcggattccttaggacatacatccccaatggacatgttccttagcgcgacgcacggagcctcttcatcatctaactcatcaagatcaacttgctctacttgagagctgttagtctcatcaaacacaatgtcacaagaaacttcaactagtccagtggacttgttaaagactctatatgcccttgtgtttgaatcatatcctagtaaaaagccttctacagccttaggagcaaatttggattttctacctcttttaacaagaataaagcatttgctaccaaagactcgcctccgcccaaaaccgatctgaagtcttgtatcatcaagcatggtccttgccatgtccaatagagttcgattcttcctctccactacaccattttgttgtggcgtgtagggagaagagaactcatgcttgatgccctcctcctcaaggaagccttcgatttgtgagttcttgaactccattccgttgtcgcttcttattttcttgatccttaagccaaactcgttttgagcccgtctcaagaatccctttaaggtttcttgggtgtgagatttttccaaaccttgatttccatccccgaatgtgatagctcgttggggatcttggtttttctcgtaggaggagaacatcttcttctcccatgtcatgtggtttgtgcatccgctgtcgatgatccaacttgagaccccggatgcataaaccttgccggatttgttagttaaaacataagatgcatcaaaagttttaaatgaaatgttagaatcatttgatgcaatagaagttttctttctaggcaatttggcacgggttgattgcctagagctagatgtctcacccttatacataaaagcatgattagggccagagtgagacttcctagagtgaattctcctaattttgtgctcgggataaccggcagggtacaaaatgtagccctcgttatcctgaggcatgggagccttgcccttaacaaaattagacaatcttttaggagaggcattaagtttgacattgtctcccttttggaagccaatgccatccttgatgccagggcgtctcccactatagagcatgcttctagcaaatttaaatttttcattttctaagtcatgctcatttattttggcattaagttgagctatgtgatcattttgtttcttaattaaagctaggtgatcatgaatagcatcaacattaatggaaacatgctcgacagtagatgtagagggtttgcaagatttaagttcaacaatcttagcatgtaaaatgtcattttcacttctaagattggaaattgtaacattgcaaacatctaagtctttagccttagcaattaatttttcattatcatttctaaggctagcaagagaatcattcaatttttcaatcttagcaagcaaattagcattatcatctctaagattggaaattgaatcatcacatagatttgaatcaaccttagctattaaactagtattctcatttctaaggttggtaataatatcatggcacttgcttagctcactagataatttttcacatttttctacttctagagcataagcatccttaaccttaacatgcttcttattctccttaattaggaagtcctcttgggagtccaagagttcatccttctcatgaatagcactaattaactcatttaatttttctttttgttgcatgttaaggttggcaaaaagagtgcgcaaattatcctcctcatcactagaattatcttcatcactagaggatgcatatttagtggaggaccttgattttaccttcttccttttgtcgtcctttgccatgaggcacttgtggccgacgttggggaagaggagtcctttggtgacgacgatgttggcggcgtcctcgtcggaggaggagtcggaggagctctcgtccgagtcccactcgcggcatacatgggcatcgccgcccttcttcttgtagtatctcttcttttctctcctctttcctttcttgtcgttgcccctgtcactatcacttgataatggacattttgcaataaaatgaccgggcttaccacacttgtagcacactttcttggtgcgggacttgtagtccttccctctcctttgcttgaggatttggcggaagctcttgatgatgagcgccatttcctcgttgtcgagcttggaggcgttgatggggagtctacttgatgtagattctttcttcttctcctctgtcgccttgaatgcgaccggttgtgcttcgggcgtggagggaccatcttgctcgatgattttatttgagcctttgatcatcaattcaaagctcacaaattttcctattacttcctcgggagacat

SEQ ID NO: 4736 - DNA, 4752 bp, Zea mays
  Clone ID: TF_ZmC951_406
ctaagacaccagggaccttcctaagaactggcaagtccccgatgtgctctttctattaattttacaccctcccgtgtcgaggtcgagatgcccattggttcccatgggtgtcttgatgggcttggcgtccttcatcccaaacttgtttagaatgtcttgtatatacttcgtttggctaatgaaggtgccctcttggagttgcttcacttgaaatcccaagaagtacttcaactcctccatcatagacatctcgaatttctgtgtcatgatcctactaaactcttcacatgtagattcgttagtagacccaaatataatatcatcaacataaatttggcatacgaacaaatcattttcaagtgttttagtaaagagtgtaggatcggcctttccaactttgaagccattagtgataagaaaatctcttaggcattcataccatgctcttggggcttgcttgagcccataaagcgccttagagagtttatatacataattaggatactcactatcttcaaagctgggaggttgctcaacatagacctcctccttgattggtccattgaggaaggcacttttcacgtccatttggtagagcttaaagccatggtaagtagcataggcaagtaatattcgaattgactcaagcttagctatgggtgcataggtttcaccgaaatccaaaccttcgacttgtgaataccccttggccacaagtcgggctttgttccttgtcaccacaccattctcatcttgcttgttgcggaagacccacttggttcctacaacattttggttaggacgtggaactaaatgccatacctcattcctagtgaagttgttgagctcctcttgcattgccaccacccaatccgaatcttgaagtgcttcctctaccctgtgtggctcaatagaggaaacaaaagagtaatgttcacaaaaatgagcaacacgagatcgagtagttacccccttttgaatatcgccgaggatggtgttcacggggtgatcacgttggattgcttggtggactcttgggtgtggcggctttggagcttgttcatcttcctcatcttgatcatgggcatctcccccttgatcattgctctccccttgaggtggctcaacttcttgatctacgacttcatcattttgagcctcatcctcatcttgagttggtggagatgcttgcattgaggaagatggttgatcttctgcatgtggtggctcttcggattccttaggacacacatccccaatggacatgttccttagtgcgacgcacgaagcctcttcatcacctatctcatcaagatcaacttgctctacttgagagccgttagtctcatcaatcacaatgtcacaagaaacttcaacttgtccagaggacttgttaaagactctatatgcccttgtgtttgaatcatatcctagtaaaaagccttctacagctttaggagcaaatttagattttctacctcttttaacaagaataaagcatttgctaccaaagactctaaaatatgaaacattgggctttttaccggttaggagttcatacgatgtcttcttgaggattcggtgtagatacaaccggttgatggcgtagcaagcggtgttgaccgcctcgacccaaaaccgatccgaagtcttgtactcatcaagcatggttcttgccatgtccaatagagttctgttcttcctctccactacaccattttgttgtggcgtgtagggagaagagaactcatgcttgatgccctcctcctcaaggaagccttcaatttgagagttcttgaactccgtcccgttgtcgcttctaattttcttgatccttaagccgaactcgttttgagcccgtctcaagaatccctttaaggtctcttgggtatgagatttttccaaaccttgatttccatccccgaatgtgatagctcgttggggatcttgatttttctcgtaggaggagaacatcttcttctcccctgtcatgtggtttgtgcacccgctatcgatgatccaacttgagcccccggatgcataaaccttgcctgatttgttggttagcacataagatgcatcaaaggttttaaatgaaatgttatgatcatttgatgcagtaggagttttctttttaggcaattttgcacgggttgattgcctagagctagatgtctcacccttatacataaaatcttgattagggctagagtgagacttcttagaatgaattctcctaattttgctctcgggataaccggcagggtacaaaatgtaaccctcgttatcctgaggcatgggggccttgcccttaacaaagttggacaatcttttaggaggggcattaagtttgacattgtcccccttttggaagccaatgccatccttaatgccagggcatctcccactatagagcatgcttctagcaaatttaaattttccattttctaagtcatgctcattaatcttagcattaagttgagctatgtgatcattttgtttcttgattaaggctaggtgatcatggatagcatcaacattaatgtatctacatctagtgcaaatggaaacatgctcaatggtagatgtagagggtttgcaagattttagttcaacaatgttagcatgtaaaatgtcattttcacttctaaggttggaaattgtaacattgcaaacatctaaatctttagccttagcaatcaattcttcattttcaatcctaaggctagcaagtgaatcattcaacttttcaatcttagcaagcaaattagcattatcatcactaagattgggaattgaatcattacaaacatttgaatcaaccttagcaattaatttagcattctcatttctaaggttgacaatagtatcatggcaagtgcttagctcactagatagtttttcacatttttctacttctagagcgtaggcatttttaaccttaacatgcttcttattttccttaattaggaagtcctcttgggtgtccaagagttcatccttcttccttttgccgtcctttgccatgaggcacttgtggccgacgttggggaagaggagtcccttggtgacggcgatgttggcggcgtcctcgtcagaggaggagtcggaggagctctcatcggagtcccactcgcggcacacatgggcatcgccgcccctctttttgtggtacctcttattttctgtcctctttcccttcttgtcgtcgcccctgtcactgtcactagatagtggacattttgcaataaaatgaccaggcttaccacacttgtagcacactttcttggagcggggcttgtaatccttccccctcctttgcttgaggatttggcggaaactcttgatgatgagcgccatctcctcattgtcgagcttagaggcgtcgatgggttgcctacttgatgtagactcctcctttttctcctccgttgccttgaatgcgatgggttgcacctcgggtgtggaggtgccgccttgctccaagtcgacgatgtgtttggaacctttgatcatcaactcaaagctcacaaacttcccaattacctcctcaggagacattagcttatatctaggatcaccacgtattaattgaacttgagtaggattacaaaatacgagggatctaagaataaccttgaccatctcatggtcatcccattttttgctcccgaggttgcgcacttgattcaccaaggctttgagccagttgtatattgcttgtggctcctctccttggtggaggacgaatcgacctagctccccctcgatcgtttcccgcttggtgatcttggtcactgtggggggacggatatcccctgggtccactagaaggcaagaaggcctcgcgaaaggccttgggcctgttgactcgcgaggccatcccttcgtgggccaagggagaactgcgggcagaatgggccggcgtagggaatgagcagactcgggtccaggtggctcgttggatttaaacgttatccacatccttgatccgattctcccgcgcgacacctctcgaggggtaaccccaggtgcacggtcgggctccaaacactgacaactggtgcaccaggaagggggtgtgttgttgatccaagctagctcaatggctgtcactttccaatgccagattgctttctgccctggatccgtattttgctttgcgaccatctcgtccgtagcggatgagaagggagttcgcgacactgcatcaatgactggagcgacttcagtcggtgcttcatcgccaactttcagttcctctccgacaagccggcgcagccatgggacctcaaatccatcaggcatcggggcgatgaaacacttcggtcgtacctcaagaggttttagaccatgagaaatcgcataaccgtggtcactgaggcagtggtaattgaggatttctaccggggatctaatgacttggcctttgttcgagccatactgcataaggcgccaaccacctccgagcagctgtttcgggaagtggacctctacatcaccgccgacgaacgggctcaagacctcatctggggagcgaagcctgcaccgtcggacttcggtcttccgccgccgtgcgtggaccgagctatccagtgagtctccgcccaattcctcgcgctcatatcttctctggcatcccgtggacctctctgacccatttgattgaactatctcgccgtgaccaggccggtctcctcgccgccgacgagcatccccgcctgcgcgcgtggaccgaccgactccggccat

SEQ ID NO: 4737 - DNA, 4642 bp, Zea mays
  Clone ID: TF_ZmC951_409
ctaagggtttgcctcatccaaagtagttgtgcgcaacaatgacctgcggcaatatactcggcttcggcggtagaaagagctacggaattttgcttctttgaagcccaagacaccaaggatcttcccaagaactggcaagtccccgatgtgctctttcttttgatcgacagatttacctcccgtgtcgaggtcgagatgcccattggttcccatgggtgtcttgatgggcttggcatccttcatcccaaacttgtttagaatgtcttgaatatacttcgtttggctaatgaaggtgccctcttggagttgctttacttgaaatcccaagaagtacttcaactcccccatcatagacatctcgaatttttgtgtcatgatcctactaaattcctcacatgtagattcgttagtagacccaaatatgatatcatcaacataaatttggcatacaaacaaatcattgtcaagagttttagtaaataaagtaggatcgacctttccgactttgaagccattagtgataagaaaatctcttaggcattcataccatgctcttggggcttgcttgagcccataaagtgccttagagagtttgtaaacatggttagggtactcactatcttcaaagccgggaggttgctcaacatagacctcttctttgattggtccattgaggaaggcactcttcacatcgatttgataaagcttaaagccatggtaagtagcataggcaagtaatatacgaattgactcaagcctagctacgggtgcataggtttcaccgaaatccaaaccttcgacttgtgagtatcccttggccacaagtcgggctttgttccttgtcaccacaccatgctcgtcttgcttgttgcggaagacccacttggttcctacaacattttgattaggacgtggaaccaaatgccatacctcattcctagtgaagttgttgagctcctcttgcatcgccactacccaatccgaatcttgtagtgcttcctctatcccccttatgaatgtcgccgaggatggtgtcaacggggtgatctcgttagattgcttggtggactcttgggtgtggcggtcttggaacttgttcatcttcctcatcttgatcgtgggcatctcccccttgatcattgcactcctcttgaggtggctcaacatcttgatcttctccttcatcattttgagccttatcctcatcttgagttggtggagatgcttgcatggaggaagatggttgatcctgtgcttgtggaggctcttcgggttccttaggacacacatccccaatggtcatgttccttagcgcgacgcacggggccttctcatcatctagctcatcaagatcaacttgctctacttgagagccgttagtctcatcaaacacaatgtcacaagaaacttcaactagtccagaggacttgttaaagactctatatgcccttgtgtttgaatcatatcctagtaaaaagccttctacagccttaggagcaaatttggattttcttcctcttttaacaagaataaagcatttgctaccaaagactctaaaatatgaaacattgggctttttaccggttaggagttcgtatgatgtcttcttgaggattcggtgtagatacaaccggttgatggcgtagcacacggtgttgaccgcctccgcccaaaaccgatccgaagtcttgtactcatcaagcatggtccttgccatgtctagtagagttcgattcttcctctccactacaccattttgttgtggcgtgtagggagaagagaactcatgcttgatgccctccttctcaaggaagccttcgatttgtgagttcttgaacttcgtcccgtttcgcttcttattcccgctgatgcttatgtaagctatcgggccgaataggtccatgtgtaggagctcgagtggcctgtcagtcgtcatgatgttcttgtgtggatgattaacaccaacctgctttcctgcctgacatgcactacaaattctgtctttctcaaaatgaacatttgttagtcccaaaatgtgttctccctttagaagcttgtgaagattcttcattccaacatgtgctagtcggcgatgccagagccagcccatgttagtcttagcaattaagcaagtgtcgagttcaactctaccaaaatctactaagtatagctgaccctctaacactcccttaaatgctactgaatcatcacttcttctaaagacagtaacaccttgattcccatccccgaatgtgatagctcgttggggatcttgatttttctcataggaggagaacatcttcttctcccctgtcatgtggtttgtgcacccgctatcgatgatccaacttgagcccctggatgcataaacttggcaactacccttatacataaaagcatgattagggccagagtgagacttcctagagtgaattctcctaatcttgtgctcgggataaccggcagggtacaaaatgtaaccctcgttatcctgaggcatgggagccttgcccttaacaaagttagataattttttaggaggggcattaagtttgacattgtctcccttttggaagccaatgccatccttgatgccagggcgtctcccactatagagcatgcttctagcaaatttaaaattttcattttctaagtcatgctcattaattttggcattaagttgagctatgtgatcatttcgtttcttaattaaagctagttgatcatgaatagcattaacattaatgtctctacatctagtacaaatgaaaacatgctcaacggtagatgtagagggtttgcaagattttagttcaacaatcttagcatgcaaaatgtcattttcacttctaagattggaaatggtaacattgcaaacatctaagtccttagccttagcaattaatttttcattctcatttctaaggctagcaagagagacattcaattcttcaatcttagcaagtaaactaacattatcatctctaagattgggaattaaaacatcacaaacatttgaatcaaccttaacatgcttcttgttttctttaattaggaagtcctcttgagagtccaagagttcatccttctcatgaatagcactaattaattcatttaatttttccttttgttgcatgtttaggttggcaaaaagagtgcgcaaattatcctcctcatcactagaattgtcttcatcactagaggatgcatatttagtggaggatcttgattttaccttcttccttttgccggtctttgccatgaggcacttgtggccgacgttggggaagaggagtcctttggtgacggtgatgttggcggcgtcctcgtcggaggaggagtcggtggagctctcgtcgaagtcccactcgcgacacacatgggcatcgtcgcccctcttcttgtggtacttcttcttttctctcctcttgcccttcttgtcgttatccctgtcactgtcacttgataatggacattttgcaataaagtgaccgggcttaccacacttgtagcacactttcttggagcgggacttgtagtccttccctctcctttgcttgaggatttggcggaagctcttgatgatgagcgccatttcctcgttgtcgagcttggaggcgtcgatggggagtctacttgatgtagactcttccttcttctcctccatcgccttgaatgcgaccggttgtgcttcgggcgtggaggggccatcttgctcgatgattttctttgagcctttgatcatcaattcaaagctcacaaatttttctattacttccttgggagacattagtgtgtatctaggatcaccacgtattaattgtacttgcatagggttaagaaaaacgagtgatctaagaataaccttgaccatttcatggtcatcccattttttgctcccgaggttgcgcacttggttcaccaaggtcttgagccggttgtacatctcttgtggctcctccccttggcgaagccggaagcgaccgagctccccctcgatcgtctcccacttggtgatcttggtcacctcgtctccttcgtgcgcggtcttcagtacgtcccaaatatccttggcactcttcaatccttgcaccttgttatactcctctcgacttagagaggtgaggagtatagtggtggcttgggagttgaagtgcacgatttgggccacctcgtcctcatcataatcttcatcccctacggatggtacctgtacaccaaactcaacaacatcccatatgcttttgtggagtgaggttaggtgatatctcatcatatcactccttctagaataatcttcaccgtcaaatgtcggtggtttgcctaatgggacggaaagtaatggagtatccttaggaatgcgaggatagcgtaggggggtcttactatacttcttgcgctcttggcgcttagaagtgacggacgcggcgtcggatccggatgtagagggcgaggaagaatcagtctcgtagtagaccactttcttcattttcttcttcttctcgccactcttgtgcgatcgaatgcgtgaaggggatccatccttcttgttgttggcggactcccttgatggagccttcccgtggcttgtagcggacttctcaccgccgatcaccatcttcttggcgtcatctcccgacat

SEQ ID NO: 4738 - DNA, 3219 bp, Zea mays
  Clone ID: TF_ZmC951_414
ctaagggtttgcctcatccaaagtagttgcgcgcaacaatggcctgcggcaatgtactcggcctcggcggtagaaagagctacgaaattttgcttctttgaagcccaagacaccaaggatcttcccaagaactgacaagtcctcgatgtgctctttcttttgatctacggatttacctcccgtgtcgaggtcgagatgcccattggttcccatgggtgtcttgatgggcttggcatccttcattccaaacttgcttagaatgtcttgagtatactttgtttggctaatgaaggtgcctcttggagttgcttcacttgaaatcccaagaagtacttcaactcccccatcatcgacatctcgaatttttgtgtcatgatcaaacaaatcattgttaagagttttagtgaatagagtaggatcggcttttccgactttgaagccattagcaataaggaaatctcttaggcattcataccatgctcttgggtcttgcttgagcccataaagcgccttagagagtttataaacatggttaggatacttactatcttcaaagccgggaggttgctcaacatagacttcttctttgattggtccgttgaggaaggcactctttacgtccatttgataaagcttgaagccatggtaagtagcataagtcccgccgatgcttatgtaagctatcaagccgaataggtccatgtgtaggagctccagtggcctgtcagtcgtcatgatgttcttgtgtggatgatgagcaccaacttgcttccctgcttggcatgcgctacaaatcctgtctttctcaaaatgaacatttgttaatcctaaaatgtgttctccctttagaagtttatgaaggttcttcatcccaacatgggctagtcggcggtgccagagccaacccatgttagtcttagcaattaagcaagtgtcgagttcagctctatcaaaatctaagtatagctgaccctctaacactcccttaaatgctattgaatcatcacttcttctaaagacagtgacacctttgaccaaaccttggtttccatccccgaatgtgatcgctctttggggatcttggtttttctcataggaggagaacatctttttctcccctgtcatgtggtttgtgcacccgctgtcgatgatccaacttgagcccccggatgcataaaccatatgatcacgaatagcatcaatatcaacatctctacatctggtgcaaataggaacatgctcaacggtagatgtagagggtttgaaggattttaattctacaaccttagcatgtaatatatcattttcacttctaaggttagaaatagtaacattgcaaacatcaaaatctttaaccttagcaagcaatttttcattctcaatcctaaggctatcaagagatatatttaattcttcaatcttagcaagcaaatcaacattttcatctctaagattgggaattgaaacatcacaagtattagaatcaactttagcaattagtttatcattttcatttctaaggttggtaatagtgtcatggcaagtgcttagctcactagataatttttcacatttttctacttctagagcgtaagcatttttaaccttaacatgcttcttgttttccttaattaggaagtcctcttgagagtccaagagatcatccttctcatgaatagcactaattaattcatttaatttttccttttgttgcatgttgaggttggcaaaaagggtgcgcaaattatcctccttatcactagcattatcctcatcactagaggtttcatatttagtagaggatcttgattttaccttcttctttttgtcgtcctttgccatgaggcacttgtggccgacgttggggaagagaagtcccttggtgatggcgatgttggcggcgtcctcgtcggaggaggagtcggtggagctctcgtcggattcccactcgcggcacacatgggcattgccgcccttcttcttgtggtacctcttcttttcctttcttctccccttcttgtcgtcgcccctgtcactatcactagacaaaggacatttagcgataaaatgaccgggcttaccacatttgtagcaaaccttcttggagcgggacttgtagtctttccccctcctttgcttgaggatttggcgaaagctcttgatgatgagcgccatttcctcgttgtcgagcttggaggcgtcgatggggaccctacttggtgtagagtcttctttcttctcctctgttaccttgaagtcgacgggttgcacctcgggtgttgaggtggcgccttgctcgatgatcttcttggagcctttgatcatcaattcaaagctcacaaattttcctataacttcctcgggagacattagcttatatctaggatcaccacgaattaattgtacttgagtaggattaagaaatacaagtgatcttagaataaccttgaccatttcatggtcatcccacttggagctcccgaggttgagcacttggttcaccaaggtttttagccggttgtacatggcttgcagttcttctccttggttgagcataaagcgaccgagctccccctcgatcgtttcccgcttggtgattttggtcacctcatctccctcgtgcgcggtcttgagtacgtcccaaatctctttggcgctcttcaacccttgcaccttattatactcctctcgacttagagaggtgaggagtatagtagttgcttgagagtagaagtgctcgatttgggccacctcgtcctcatcataatcttcatcccctacggatggtacctgtactccaaactcaacaacatcccatatgcatttgtggagtgaggttaggtgatatctcatcatatcactccacctagaataatcttcaccgtcaaacgtcggtggtttgcctaatgggatcgaaagtaatggagtatgtctaggaatgcaagggtagcgtagggggatcttactatacttcttgcgctcttggcgcttagaagtgatggacgcggcgtcggatcccaatgtagagggcgatgaagagtcggtctcgtagtagaccactttcttcattttcctcttcttttcgccactcttgtgcgtcctaatgcgtgaaggggatccctccttctttttgttgccggactcctttgatggaaccttcccatggcttgtggcgggtttctcgccggtcaccatctccttggcgtgatctcccgacat

SEQ ID NO: 4739 - DNA, 4298 bp, Zea mays
  unsure (1)..(4298): unsure at all n locations
  Clone ID: TF_ZmC951_418
ctttccgactttgaagccattagcgataagaaaatctcttaggcattcataccatgctcttggggcttgcttgagcccataaagcgccttagagagtttgtaaacatggttagggtactcactnatcttcaaagctgggaggttgctcaacatagacctcccttcttgattggtccattgaggaaggcacttttcacgtccattggtaaagcttaaagccatggtaagtagcataggcaagtaatatgcgaattgactcaagcctagctacgggtgcatagggtttcaccgaaatccaaacctttgacttgtgaataacccttggccacaagtcgggctttgttccttgtcaccacaccatgcatcatcttgcttgttgcggaagacccacttggttcctacaacattttgattaggacgtggaacaagatgccataccttattcctcatgaagttgttgagttcctcttgcattgccaacacctaatttaatcccttaatgcgtcttccaccctgtatggctcaatagaagacacaaaagagtaatgttcacagaaatgagcaacacgagatcgagtagttacccccttatgaatatcgccgaggatggagttcacggggtgatctcgttgtattgcttggtggactcttgggtgtggcggtcttggaccgtcatcatcttccttgtcttgatcatttgcatctcctcctcgatcattgttctcctcctgaggtggctcctcttgatcgtcatcttcatcatcttgagcttgatcctcatcttgagttggtgtagatgcttgcatggaggaagatggttgatcttgtgcatgtggaggctcttcggattccttaggacacacatccccaatggacatgttccttagtgcgacgcatggagcctcttcatcatctagctcatcaagatcaacttgctctacttgagagccgttagtttcatcaaacacaatgtcacaagaaacttcaactagtccagtggacttgttaaagactctatatgcccttgtgtttgaatcataaccaagtaaaaagccttctacagccttaggagcaaatttagattttctacctcttttaacaagaataaagcatttgctaccaaagactctaaaatatgagacattgggctttttaccggtgaggagttcatatgatgtcttcttgaggattcggtgaagatataaccggttgatggcgtagcaagcggtgttgaccgcctcggcccaaaaccgatccaaagtcttgtactcatcaagcatggttcttgccatgtccaatagagttctattcttcctctccactacaccattttgttgtggcgtgtagggagaagagaactcatgcttgatgccctcatcctcaaggaagccttcaatttgagagttcttgaactccgtcccgttgtcgcttcttattttcttgatcctcaagccgaactcattttgagcccgtctcaggaatccctttaaagtctcttgggtttgagatttttcatccgtaaaaagacaattgtagcccattttgcataattgagaaacagaaagcaaattgtaatctaatgaatcttgatttccatccccgaatgtgatggctcgttggggatcttggtttttctcataggaggagaacatccttttctcccctgtcatgtggtttgtgcacccgctatcaatgatccaacttgagcccccgaatgcataagccttgggtacccaaacacaagtctttgaccccttgtgtttgcctccaacatatttggcaactactttgcctgatttgttagtcaaaacataagatgcatcaaaagtcttaaatgaaatgttatgatcatttgatgcaataggagttttcttcttaggcaatttagcatgggttgattgcctagaactagatgcctcactcttatacataaaagcataattagagccagagtgagacttcctagagtgaattttcctaattttgtgctcgggataaccggcagggtataaaatgtaaccctcgttatcctgagccatgggagtcttgcccttaacaaagttagataatcttttaggaggggcattgagtttgacatttcctccctgttggaagccaatgccatccttaatgccagggcgtctcccactatagagcatactacgagcaaatttaattttttcattttctaattcatgctcggtaattttagcatctaattttactatatgatcattttgttgtttaatcatagccatgtgatcatgaatagcatcaatgttaacatctctacatctagtgcaaatagtaacatgctcaatggtagatgtagagggtttgcaagaatttaattcaacaatcttagcatgtaatatggcattttcatctctaagactggaaatggaaacattgcaagcatttaattccttagccttagcaattaatttttcattctcatttctaaggctagcaagagaggcatttaatttttcaaccttagcatgtgaactagcattatcatttctaagattgtcaattgaatcattacagacatttgatttctcaaccttagcaattaatttggcattttcatttctaaggttggaaataacatcatggcaagtgcttagctcactagataatttttcacatttttctacctctagagcataagcatttttaaccttaacatgttttttgttttctttaattaggaagtcctcttgggtgtccaagtgttcatccttctcatgaatagcactaattaactcatttaatttctccttttgttgcatgtttaggtgggcaaaaagtgttaataaatcatcctcattatcactagagctagcctcatcactagatgttgcgtacttagtggaggatttagattttaccttcttccttttgtcgtcctttgccatgaggcacttgtggccgacgttggggaagaggaggcctttggtgacgacgatgttggtggcgtcctcgtcggaggaggagtcggtagagctctcgtcggagtcccactcccggcaaacgtgggcatcgccgcccttcttcttgtagtacctcttcttttctcttctctttcccttcttgtcgtcgcccctgtcactatcacttgataatggacattttgcaataaaatgaccgggcttaccacacttgtagcaaactttattggagcggggcttgtagtccttccccctcctttgcttgaggatttggcgaaagctcttgatgatgagcgtcatttcctcattatcgagcttggaggcgtcgatggggaccctactaggtgtagggttttctttcttctcctctgttgccttgaatgccacgggttgcacatcgggtgtggaggaggtgccttgctcgatgattttcttggagcctttgatcatcaactcaaagctcacaaattttcctattacttcctcgggagacattagtgtgtatctagaatcaccacgaattaattgaacttgcgtagggttaaggaaaacgagtgatctaagaataaccttgactatttcatggtcatcccatttggtgctcccgaggttgcgcacttggttcaccaaggtcttgagccggttgtacatcgcttgtggctcctctccttggtgaagcatgaagcgaccgagctccccctcgatcgtctcccgcttggtgatcttggtcacctcgtctctttcgtgcgcggtcttgagtacgtcccaaatctcctttgcgctcttcaatccttgcaccttattatactcctctcgacttagagaggcgaggagtatagtagtggcttgggagttgaagtgttggatttgttcgacctcctccgagtcgtaatccttgtctcccttctttggtacctgcggtccatactcaacaatatcccatatgcttttgtggagtgaggttaggtgatgcctcattttatcactccatattgaataatcttcaccttcaagcataggtggtttgcctaatggaacggaaagtaatggagtgcgttttgaaatacgagaatagcgaaggggcatcttactatacttcttgcgctcatggcgcttagaagtggcgaatgccgattccgagccggaggttgagggtgacgaagagtcggtctcgtagtagaccaccttcttcatcttcttcttcttgtcaccctttcgttgggacttgatggaggaagaggattcctccttgtgcttgtgggcggactcccttgagtgtgttctccccgagcttgcggacttgtcgtcggtcccgatctccctcttggcggatgctcccgacat

SEQ ID NO: 4740 - DNA, 4470 bp, Zea mays
  Clone ID: TF_ZmC951_440
ctaggttagaatatcttgaatatacttcgtttggctgatgaaggtgccctcttggagttgcttcacttgaaatcccaagaagtacttcaactcccccatcatagacatctcgaatttttgtgtcatgatcctactaaactcttcacatgtagattcgttagtagacacaaatataatatcatcaacataaatttggcatacaaacaaattattttcaagtgttttggtaaagagtgtaggatcggcctttccgactttgaatccattagtgataaggaaatctctaaggcattcataccatgctcttggggcttgcttgagcccataaagcgccttagagagtttataaacatggttagggtactcactatcttcaaagccgggaggttgctcaacatagacctcttccttgattggtccattgaggaaggcacttttcacgtctatttgataaagcttgaagccatggtaagtagcataggctaataatatacgaattgactcaagcctagctacgggtgcataggtttcaccgaaatccaaaccttcgacttgggagtatcccttggccacaagtcgagctttgttccttgtcaccacaccatgctcatcttgcttgttgcggaacacccacttggttcctacaacattttgattaggacgtggaaccaaatgccatacctcattcctagtgaagttgttgagctcctcttgcatcgccaccacccaatctgaatcttgaagtgcttcctctaccttgtgtggctcaatagaggaaacaaaagagtaatgttcacaaaaatgagcaacacgagatcgagtagttacccccttttgaatatcgccgaggatagtgttcatggggtgatctcgttggattgcttggtggactcttgggtgtggcggccttggaacttgtttatcttcctcatcttgatcatgggcatctcccccttgatcattgctctcctcttgaggtggctcaacttcttgatcttctctttcatcattttgagcctcatcctcatcttgagttggtggagatgcttgcgtggaggaagattgttgatcttgtgcttgtggaggctcttcggattccttaggacacacatccccaatggacatgttccttagtgcgacgcacaaagcctcttcatcatctagctcatcaagatcaactttctctacttgagagccgttagtctcatcaaacacaatgtcacaagaaacttcaactagtctagaggacttgttaaagactctatatgcccttgtgtttgaatcatatactagtaaaaagccttctacagccttaggagcaaatttggattttctacctcttttaacaagaataaagcatttgctaccaaagactcgatccgaagtcttgtactcatcaagcatggtccttgccatgtccaatagagttctattcttcctctccactacaccattttgttgtggcgtgtagggagaagagaactcatgcttgatgccctcctcctcaaggaagccttcaatttgagagttcttgaactccgttccgttgtcgcttcttattttcttgatcctcaagctgaactcattttgagcatgtctcaagaatccctttaaggtctcttgggtatgagatttttcctgcaaaaagaacacccaagtgaagcgagaatagtcatccacaataactagacagtacttactcccgccgatgcttatgtaagctatcgggccgaataggtccatgtggaggagctccagtggcctgtcagtcgtcatgatgttcttgtgtggatgatgaacaccaacttgtttccctgcttggcatgcgctacagatcctatctttctcaaaatgaacatttgttagtcgtaaaatgtgttctccctttagaagcttgtgaagattctttatcccaacatgtgctagtcggcgatgccagagccagcccatgttagtcttagcaatcaagcaagtgtcgagttcagctctattgaaatcaactaagtatagctgaccctccaacactcccttgaatgctactgaatcatcactccttctaaagacagtgacaccttgatttccatccccgaatgtgatagctctttggggatcttggtttttctcataggaggagaacatcttcttctcccctgtcatgtggtttgtgcacctgctgtcgatgatccaacttgagcccccggatgcataaaccttgccggatttgttagttaaaacataagatgcattaaaagtcttaaatgagatgttagaattatttgatgcaataggagttttcttcttaggcaattttgcacgggttgattgcctagagctagatgtctcacccttatacataaaagcatgattagggccagagtgagacttcctagaatgaattctcctaatcttgtgcttgggataaccgacagggtacaaaatgtaaccctcgttatcctgaggcatgggagccttgcccttaacaaagtttgacaatcttttaggaggggcattaagtttgacattgtctcccttttggaagccaataccatccttgatgccagggcgtctcccactatagagcatgcttcttgcaaatttaaaattttcattttctaagtcatgctcattaattttggcattaagttgagctatgtgatcattttgtttcttaattaaagctaggtgatcattaatagcatcaacattaatatctctacatctagtgcaaatggaaacatgctcaacgatagatgtagagggtttgcaagattttagttcaacaatcttagcatgtaaaatgtcattttcacttctaagattggaaattgtaacattgcaaacatctaagtctttagccttagcaattaatttttcattttcaatcttaaggctagcaagagagacattcaattcttcaatcttagcaagtaaactaacattatcatctataagattgggaattgaaacatcacaaacatttgaatcaaccttaacaattactttagcattttcatttctaaggttggaaataacatcatgacaagtgcttagctcactagataatttttcacatttttctacttctagagcataagcattcttaaccttaacatgcttcttgttttctttaattaggaagtcctcttgagaatccaagagttcatccttctcatgaatagcactaattaattcatttaatttttctttttgctgcatgtttaggttggcaaaaagggtgcgcaaattatcctcctcaacaccagagttatcctcatcactagaggtttcatatttagtggaggattttgattttaccttcttccttttgccgtcctttgccatgaggcacttgtggccgacgttggggaagaggaggcccttggtgacggcgatgttggcggcgtcctcgtcagaggaggaatcggtggagctctcgtcggagtcccactcgcggcacacatgggcatcgccacccttcttcttgtagtatctcttcttttctcccctctttcctttcttgtcgtcgcccttgtcactatcagtagataatggacatttagcaatgaaatgaccgggcttaccacacttgtagcacaccttcctggaacggggcttgtaatctttccccttcctttgtttgaggatttgacggaagctcttgatgatgagcgccatctccttattgtcgagcttagaggcgtcgatggggattctacttggagtagaatcttctttcttctcctccgttgctttgaatgcaacgagttgtgcttcgggcgtggaggagtcgccttgctcgatgatcattttggagccgagctccccctcgatcgtctcccgcttggtgattttagtcacctcatctccttcgtgcgcggtcttgagcacgtcccaaatctccttggcgctctttaatccttgcaccttgttatactcctctcgacttagagaggcgaggagtatagtggtggcttgagagttgaagtgtcggatttgggcgacctcgtccgaatcatagtcttcatcccccggtgatggtacctgtactccaatctcaacaacatcccaaatgctagtgtggagtgaggttagatgatgcctcattttatcactccacatattataatcttcaccatcaaacatgggtggtttgcctagtgggacggaaagtaatggagtacgtatggaaatgcgagggtagcgtagggggatcttactaaacttcttgcgctcatggcgcttagaagttacggacggtgtgttagagccggaggtggatggtgacgaagagtcggtgtcgtagtagaccaccttcttcatctttttcttcttgtcaccgctctgacgcgacttgttgtgtgaagaagatcccttcaccttgttggcggactccccggatggagccttcccattgcttgtggcgggcttctcgccggtcccgatctccctcttggcggatgctcccgacat

SEQ ID NO: 4741 - DNA, 5007 bp, Zea mays
  Clone ID: TF_ZmC951_453
ttacagaggtctcagacggtccacgcttatcctccggacggtccatagtgcagactcggatttttgcattggttctgtccgagggtcatccttgtgtcgcggacgatccgctgcaagggcccggacggtccgcgcttggcctgtttttccaaaaagcttctcctgtccggaataatctatggtattccggacagtcgatttagtatagttgtagatgaacctttgacacttttgcaaattcttttgtaaatccttttcaaaggtcttttgcaaaatagtcaaaggtaaatgaataagattttgcgaagcatctcccgtgtcgaggtcgagatgcccatttgttcccatgggtgtcttgatgggcttggcatccttcatcccaaacttggttagaatgtcttgagtgtacttcgtttggctaatgaaggtgccctcttggagttgcttgacttggaatcctagaaaatacttcaactcccccatcatagacatcacgaatttttgtgtcatgatcctactaaattcttcacatgtagattcgttagtagacccaaatataatatcatcaacataaatttggcatacaaacaaatcattgtcaagagttttagtgaataaagtaggatcggccttgccgactttgaagccattagcaataaggaaatctctaaggcattcataccatgctcttggggcttgctttagcccataaagcgccttagagagcctatagacatggttagggtactcactatcttcaaagccgggaggttgctcaacatagacctcttccttgattggtccgttgaggaaggcacttttcacgtccatttgatacagctcattcctagtaacgttgttgagctcctcttgcatcgccaccacccaatccgaatcttgaagtgcttcctctaccctgtgtggctcaatagaggaaacaaaagagtaatgctcacaaaaatgtgcaacccgagatctagtggttacccccttatgaatgtcgtcgaggatggtgtcgacggggtgatctcgttggattgcttggtggactcttgggtgtggcggccttggttgttcatcctccttgtcttgatcatttgcatctctcccttgatcgttgtcgtcatcttgaggaggctcatctctttgatcttctccttcatcaacttgagcctcgtcctcattttgagttggcggagatgcttgcgtggaggaggatggttgatcttgtgcatgtggaggctcttcggattctttgggacacacatccccaatggacatgttccttagcgcgatgtacggagcctgttcttcacctatctcatcaagatcaacttgctctacttgagagccattagtctcatcaaacacaacgtcacaagaaacttcaacaagtcctgaggacttgttaaagactctatatgcctttgtgtttgagtcatatcctagtaagaagccttctacagttttaggagcaaatttagattttctacctctcttaacaagaataaaacatttgctaccaaaaactctaaaataagaaatatttggctttttaccggttaggagttcataggatgtcttcttgaggattcggtgtagatataaccggttgatggcgtagcaggcagtgttgacggcctcggcccaaaaccgatccggtgtcttgtactcatcaagcatggtcctcgccatgtccaaaagagttcgattcttcctctccactacaccattttgttgtggggtgtagggagaagagaactcatgcttgatgccctcctcctcaaggaagccttcaatttgagagttcttgaactccatcccgttatcgcttctaattttcttgatccttaagccgaactcaatttgagctcgtctcaagaatccctttaaggtctcttgggtatgagatttttcctgcaaaaagaacacccaagtgaagcgagaataatcatccccaataactagacagtacttacttccgccgatgcttatgtaagcgatcgggccgaataaatccatgtgtaggagctccagtggcctgtcacttgtcataatgttcttgtgcggatgatgagtgccaacttgctttcctgcttggcatgcgctacaaatcctgtctttctcaaaatgaacatttgttagtcccaaaatgtgctctcccttcagaagcttatgaagattcttcatcccaacgtgggctagtcggcgatgccagagccaacccatgttagtcttagcaattaagcatgtgtcgagttcagctctatcaaaatctaccaagtatagctgaccctctaacacacccttaaatgctattgaatcatcacttcttctaaaaacagtgacaccttggtttccatccccgaatgtgatagctcgttggggatcttggtttttctcatatgaggagaacatcttcttctcccctgtcatgtggtttgtgcacccgctgtcgatgatccaacttgagcccccagatgcataaaccttgccggatttgttagtcaaaacataagatgcatcaaaagtcttaaatgagatgctaggttcatttgatgcactaagagttttcttcttaggcaattttgcatgggttgatttcctagaactagatgtctcacccttatacataaaagcatgatttgggccagagtgagacttcctagagtgaattctcctaattttgctctcaggataaccggcagggtacaaaatgtaaccctcgttatcctgaggcatgggagccttgcccttaacaaaattagataatcttttaggaggggcattaagtttgacattgtcccctttttggaagccaatgccatccttgatgccagggcgtctcccactataaagcatactacgagcaaacttaaatttttcattttctagttcatgctcggcaattttagcatctaatttagctatatgatcattttgttgtttaatcatggaaaggtgatcatgtatagcattaacatcaatatctctacatctagtgcaaatagtgacatgctcagtggtagatgtagagggtttgcaagaattaagttcaacaatcttagcacgcaatatatcatttttatctctaagatcggaaattgtaacattgcaaacatctagttctttagccttagcaagcaatttttcattctcaatcctaaggctagcaagagaaatgtttaattcttcaatcttagcaagcaaatcatcattatcatttctaagatttggaattgaaacatcacaagcatttgaatcaaccttagcaattaaactagcattttcatttctaaggttgttaatggtctcatggcaagtgcttagctcattagatagtttttcacatttttctacttctagagcataagcatttttaaccttaacatgcttcttattttctttaataaggaagtcctcttgggtgtctaagagatcatccttctcatgaatagcactaatcaattcatttaatttttccttttgttgcatgtttaggttggcaaaaagaatgcgtaggttatcctcctcattgctagcattatcctcatcactagaggtttcatatttagtggaggatcttgattttaccttcttccttttgtcgtcctttgccatgaggcacttgtggccgacgttggggaagagaagacccttggtgacggcgatgtttgcggcgtcctcgtcggaggaggagtcggtggagctctcgtcggagtcccattcccggcaaacatgggcatcgccgcccttcttcttgtaatacttcttcttctcctttcttctccccttcttgtcgtcgcccctgtcactatcactagataatggacatttagcaatgaaatgaccgggcttaccacatttgtagcaaactttcttggagcggggcttgtaatcttcccccctcctttgcttgaggatttggcggaagctcttgatgatgagcgccatctcctcattatcgagctttgaggcgtcgattggttgtctacttgatgtagactcctccttcttctcctccgtcgctttgaatgcgatcggttgtgcttcggacgtggaggggccatcaagctcgttgattttctttgagcctttgatcatgcactcaaaacttacaaaatgcccgataacttcctcgggggtcattttagtatatctaggattaccacgaatcaattgaacttgagtgggattaagaaaaatgagagatcttaagataacatttaccacttcgtgatcgtcccacttcttgctcccgaggttgcgcacttggttcaccaaggttttgagccggttgtacatgtgttgcggctcctctcctttgtgaagccggaaccgaccgagctccccctcgatcgtttcccgcttggtgatcttggtgagctcgtctccctcgtgcgcggttttgagtacatcccaaatctctttagcactcttcaacccttgcaccttattatactcctctttgcttaaagaggcgaggagtatcgttgttgcttgagagttgaagtgctcgatttgggccacttcgtcctcatcataatcatcatcccctacgaaaggtacctgtacaccaaactcaacaacatcccatatacttttatggagcgaggttaggtgatatcgcatcatatcactccacctagcataatcttcaccatcaaacgttggtggtttgcctaatgggacagaaagtaaaggtgtatgtttaggaatgcaaggatagcgtagggggatcttactaaacttcttgcgctcatggcgcttagaagtgacggacggtgcgttggagccggaggtggaaggtgatgaagtatcagtctcgtagtagaccaccttcctcatcttctttttcttgtcgccatttcgatacgacttgtgggaagaggatttcttctctttccccttccccttgttgcgggactcttccgatgaagccttctcgtggcttgtagtgggcttgtcgccggtctccatctccctcttggtgtgatctcccgacat

SEQ ID NO: 4742 - DNA, 2697 bp, Zea mays
  Clone ID: TF_ZM3615.C3.o9.fg
atgtcgggagatcacgccaagaaagagatggagaccggcgacaagcccactacaagccaaggaagcacttcatcggaagagtcccgcaccaagaggaaggagaagaaaaaggactcctccaaacggaaggagaaaagattttcttcctcacatcacaaagagaagaaggaaaaatcttcttcccacaagtcgcatcggaaaggcgacaagcacaagaggatgaggaaagtggtctactacgagaccggcacttcatcaacatcgacctccgactccgatgcgccctccgtaacttctaaacgccaagagcgtaagaagtttagtaagatccccttacactatcctcgtacatctagacatactccattactttccgttccattaggcaaaccgccaacctttgacgatgaagattatgctaggtggagtgatttaatgaaatttcatctaacctcactccacaaaagtatatggaatgttgttgagtttggagcacaggtaccatccgtaggggatgaggattatgatgaggacgaggtggcccaaatcgagcacttcaactctcaagctacaaccatactcctcgcctctctaagcaaggaggagtacaacaaggtgcaagggttgaagaatgcaaaggagatttgggacctactcaagaccacgcacgaaggtgatgaactcaccaagatcaccaagcgggaaacgattgagggggagctcggtcgcttcagtcttcgccaaggggaggagccacaagatatgtacaaccggctcaaaaccttggtgaaccaagtgcgcaacctcgggagcaagaaatgggatgaccacgaggtggttaaggttattttgagatcacttattttccttaaccccactcaagttcaattaattcgtggtaatcctagatatactcaaatgacccccgaggaagttatcgggaattttgtgagctttgaatgtatgatcaagggctccaagaagatcaacgagcttgatgaaccctccacgtccgaagcacaaccggtggcatttaaggcgacggaggagaagaaggaggagtctacaccgagtagacaaccaattgacgcctccaagctcgacaatgaggagatggctttaatcatcaaaagctttcgccaaatcctcaagcaacggaaggggaaggattacaaatcccgttccaagaaggtttgctacaagtgtggtaagcccggtcactttatcgctaaatgtccattatcaagtgacagtgacagggataacgacaagaagggaaagaggaaagaaaagaagagataccacaagaggaggggcgatgcccacgtatgccgcgagtgggactccgacgagagctccaccgactcctcctcagacgaggacgccgccaacatcgccgtcaccaaggggcttctcttccccaacgtcggccacaagtgcctcatggcaaaggacggcaaaaggaagaaggtaaaatcaagatcctccactaaatatgaaacctctagtgatgaggatgatgctagcaatgaggaggataacttgcgcgttctttttgccaaccttaacatggaacaaaaagaaaaactaaatgagctaattagtgccatccatgagaaggatgatctcttgcactcacaagaagacttccttattaaggaaaacaaaaagcatgttaaggttaaaaatgcttatgctctagaggtagaaaaatgtgaaaaattgtctagtgagctaagtacttgccatgagaccattgacaaccttagaaatgaaaatactagattaaatgctaaggttgattctcatgtttgtgatgtttcaattcccaatcctagagataataatgatgatttgcttgccaggattgaagaattaaacatttctcttgctagccttaaaatcgttgaacttaactcatgcaaaccctctacatctagtgttgagcatgtttccatttgtactagatgtagagatgttgatattaatgctattcatgatcacatgactttgattaaacaacaaaatgatcatatagcaatattagatgcaaaaattgccgagcataacttagaaaatgaaaagtttaaatttgctagaagtatgctatataatgggagacaccctggcattaaggatggcattggctaccaaaggggagacaatgtcaaacttaatgcccctcctaaaaatttgtctaactttgttaagggcaaagctcccatgcctcaggataacgagggttacattttgtaccctgccggttatcccgagagcaaaattaggagaattcactctaggaagtctcactctggccctaatcatgcttttatgtataagggtgagacatctagttctaggcaaccaacccgtgctaagttgcctaagaagaagactcctaatgcatcaaatgatcatgacatttcatttaaaacttttgatgcatcttatgttttgactaataaatccggcaaggtttacgcatccgggggcacaagttggatcatcgatagcggatgcacaaaccacatgaccggggagaagaagatgttctcctcatatgagaaaaaccaagatccccaaagagcgatcacattcggggatggaaatcaaggtttggtcaaaggtgtcactgtctttagaagaagtgatgattcaatagcatttaagggagtgttagagggtcaactatacttg

SEQ ID NO: 4743 - DNA, 2238 bp, Zea mays
  Clone ID: TF_ZM4166.C5.o13.fg
atgtcgggagatcacgccaagaaagagatggggaccggcgagaagtccattacaagccacgggaaggctccatcgggagagtcctacaacaaagggaaggggaaggaaaaggaatcctcttcacacaagtcgcgtcggagcggtgacaagaagaagaagatgaggaaggtggtctactacgagaccgactcctcgtctccatccacctctggctttgacacgccgtccgtaacttctaagcgccatgagcgaaagaagtttaattatgctaggtggagtgatatgatgcgatatcacctaacctcactccacaaaagtatatgggatgttgttgagtttggtgtacaggtaccatccgtaggggatgaagactatgatgaggacgaagtagcccaaattgtgcacttcaactctcaagccaccactatactcctcgcctctctaagtcgagaggagtataataaggtgcaagggttaaagagcgcaaaggagatttgggacatgctaaagaccgagcacgaaggagacgaggtgaccaagatcaccaagcgggagacgatcgagggggagctcaatccggatgaccacgaagtggttaaggagccacaagacatgtacaactggctcaaaaccttggtgaaccaagtgtgtaacctcgggagcaaaaaatgggatgaccacgaagtggttaaggttattcttagatcacttgttttccttatccctactcaagttcaattaatttgtggtaatcctagatatacactaatgactcccgaggaagtgataggaaactttgtgagatttgagttgatgatcaaaggctcaaagaaaatcaacgagctagatggcccctccatgttcgaagcacaaccggtcgcattcaaagcgacagaagaaaagaaggaggaatctacatcaagtagaacacccatcgacgcctccaagctcgacaacaaggaaatggcgctcatcatcaagagcttccgccaaatcctcaagcaaaggaaggggaaagattacaaaccccgttccaagaaggtgtgctacaaatgtggtaagcccggtcatttcattgcaaaatgtccgctatctagtgccagtgacagggataacgacaagaagggcaagaggtaccacaagaagaggggcggcgatgcccatgtgtgtcgcgaatgggactccgacgagagctctagcgactcctcctccaacgaggacgccgccaacatcgtcgtcaccaaaggactcctcttccccaacgtcggccacaagtgcctcatggcaaaggacggcaaaaggaagaaggtaaaatcaaaatcctccactaaatatgaaacctctagtgatgaggataatgctagtgatgaggaggataatttacacatcctttttgccaaccttaacatgcaacaaaaggaaaaattgaatgaattaattagtgctattcatgagaaggatgaactcttggacacccaagaggacttcctaattaaggaaaataagaagcatgttaaggttaaaaatgcttatgctctagaaatagaaaaatgtgaaaaactatctagtgagctaagcaattgccatgacactattgccaaccttagaaatgaaaatgctaaattaattgctaaggttgattctaatatttgtgatgtttcaattcccaatcttagagatgaaaatgttgatttgcttgctaagattgaagaattgaatatctctcttgctagccttagaaatgaaaatgaaaaattgattgctaaggctaaagattttgatgtttgcaatgttactatttctaaccttagaagtgaaaatgatatattacatgctaaggttgtagaattaaaatcttgcaaaccttctacatctaccgttgagcatacttccatttgtactagatgtagagacattaacattgatgctattcatgatcatatggctttaattaaacaacaaaatgatcatatagccaaattagatgccaaaattaccgagcatgacttagaaaatgaaaaatttaaatttgctagaagcatgctctatagtgggagacgccctggcatcaaggatggcattggcttccaaaagggagacaatgtcaaaattaatgcccctcctaaaagattgtctaactttgttaagggcaaggctcccatgcctcaggataacgagggttacattttgtaccctgccggttatccccgagaacaaaataaggagaattcattctag

SEQ ID NO: 4744 - DNA, 2796 bp, Zea mays
  Clone ID: TF_ZM4328.C1.o1.fg
atgtcgggagatcacgccaagaaggagatggagaccggcgaaaagcccactacaagccacgggagcacttcatcggaagagtcccgcaccaagaggaaggagaagaagaagagctcctccaacaaagggaaggagaagaaatcttcttctcaccacaaagagaagaaggaaaaatcttcttcccacaagccgcatcggaaaggcgacaagcacaagaggatgaggaaagtggtctactacgagaccgacacttcatcaacatccacctccgactctgatgcaccgtccgtaacttctaagcgccaagagcgcaagaagtttagtaagatccccttacactatcctcatacatctagacatactccattactttccgttccattaggcaaaccgccaacctttgacggtgaagattatgctaggtggagtgatttaatgaaatttcatctaacctcactccacaaaagtatatggaatgttgttgagtttggagcacaggtaccatccgtaggggatgaggattatgatgaggacgaagtagcccaaatcgagcacttcaactcccaagccacaaccatactcttggcctctctaaatagagaggaatacaacaaggtgcaagggttgaagaatgcaaaggaaatttgggacctcctcaagaccgcgcacgagggtgatgaactaacaaagatcaccaagcgggaaacgatcgagggggagctcggtcgctttcaacttcgccaaggggaagagccacaagatatgtacaaccggctcaaaaccttggtaaaccaagtgcgcaacctcgggagcaaaaagtgggacgatcacgaggtggttaaggttattctaagagctctcattttccttaaccccactcaagttcaattaattcgtggtaatcctagatacccactaatgacccccgaggaagttatcgggaattttgtgagctttgaatgtatgattaaaggatcaaagaagatcaacgagcttgacgaactctccacatccgaggcgcaaccggtggccttcaaggcgacggaggagaagaaggaggagtctacaccaagtagacaaccaattgacgcctccaagctcgacaatgaggagatggctttaatcatcaaaagctttcgccaaatcctcaagcaacggaaggggaaagactacaaatcccgttccaagaaggtttgctacaagtgtggtaagcccggtcactttatcgctaaatgtccattatcaagtgacagtgacagggacaacgacaagaagggcaagagaagagaaaagaagaggtaccacaagaagaggggcgacgatgcccacgtgtgccgcgagtgggactccgacgagagctccaccgagtcctcctccgacgaggacgccgccaacatcgccgtcaccaaggggcttctcttccccaacgtcggccacaagtgcctcatggcaaaggacggcaaaaagaagaaggttaaatctaaatcctccacaaaatatgaatcctctagtgatgataatgctagtgatgaggaggataacttgcttaccctttttgccaatcttaacatggaacaaaaggaaaaattaaatgaattgattagtgctattcatgaaaaggatgaccttttggattcccaagaggattttctaattaaagaaaacaagaaacatgttaaggttaaaaatgcttatgctctagaagtagaaaaatgtcaaaaactatctagtgagctaagcacttgccatgacactattgccaaccttagaaatgaaaatgctagtttaattgctaaggttgagtctcatgtttgtgatgcttcaattcccaatcttagaaatgataataatgacttgcttgctaagattaaggaattgaatgattctcttgctaacattagagtagaaaatgaaaatttgattgctaaggctaaagattttgatgtttgcaattctattatttccgaccttagaactaagaatgatatgttacatgctaagattgttgaattaaaatcttgcaaaccctctacatctaatgttgagcatgtttctatttgtactagatgtagagatgttgatatcaatgctattcatgatcacatgtccttaattaaacaacaaaatgatcatatagcattattagatgcaaaaattgccgagcataacttggaaaatgaaaagtttaaatttgctagaagtatgctctataatgggagacgcccgggcatcaaggatggcattggcttccaaaggggagacaatgtcaaacttaatgcccctcctaaaaatttgtctaactttgttaagggcaaggctcccatgcctcaggataacaagggttacattttgtaccctgccggttatcccgagagcaaaattaggagaattcactctaggaagtctcactctggccctaatcatgcttttatgtataagggtgagacatctagttctaggcaaccaacccgtgccaagttgcctagaaagaaaactcctaatgcatcaaatgatcatgctatttcattcaaaacttttgatgcatcatatgtgcttactaacaaatccggcaaggtttatgcatccgggggcacaagttggatcatcgatagcggatgcacaaaccacatgaccggggagaagaagatgttctcctcatatgagaaaaaccaagatccccaaagaacaatcacattcggggatggaaatcaaggtttggtcaaaggtgtcactgtctttagaagaagtgatgattcaatagcatttaagggagtgttagagggtcagctatacttg

SEQ ID NO: 4745 - DNA, 5079 bp, Zea mays
  Clone ID: TF_ZM4398.C2.o1.fg
atgtcgggagaacacgccaagagggagatggagaccggcgacaaacccatcggcgacaagcccactacaagccacgagaaggcttcatcagaagagtcccacaacaaaaagaaaggtaaggaaaagaaagcttcttcccacaagtcgcatcagagtggcgacaagaaaaagaagatgaggaaggtggtctactacgagaccgatacttcatcaccttccacctccggctccgacgcgtcgtccgttacttctaagtgtcatgagcgcaagaagtttagtaagatccccctacgctatcctcgcattcctaaacatacacctttactttccgtcccattaggcaaaccaccaacatttgatggtgaagattatgctaggtggagtgatatgatacgatatcacctaacctcactccacaaaagtatatgggatattgttgagtttggtgtacaggtaccatccgtaggggatgaggattatgatgaggacgaagtagcccaaatccaacacttcaactcccaagccacaactatactccttacctctctaagtcgggaggagtataataaggtgcaagggttgaagagtgctaaagagatttgggacgtgctaaagaccgcgcacgaaggagacgaggtgaccaaaatcaccaagcgggaaacgatcgagggggagctcggtcgctttcgtcttcgccaaggggaggagccacaagacatgtacaaccggctcaaaaccttggtgaaccaagtgcgcaacctcgggagcaaaaaatgggatgaccacgaagtggtaaaggttattcttagatcacttgttttccttaaccctactcaagttcaattaatttgtggcaatcctagatatacactaatgactcccgaggaagtaatcgggaattttgtgagctttgaattgatgatcaaaggctcaaagaagatcaacgagctcgatggcccctccacgcccgaggcacaaccggttgcattcaaggcaacggaggagaagaaggaggagtctacatcaagtagacaaccaatcgatgcctccaagctcgacaatgaggagatggctttaatcatcaaaagctttcgccaaatcctcaagcaacggaaggggaaggactacaaatcccgttccaagaaggtttgctacaagtgtggtaagcccggtcactttatagctaaatgtccattatcaagtgatagtgacagggacaacgacaagaaggggagaagaaaggagaagaagagatactacaagaagaagggcggcgatgcccatgtttgccgggagtgggactccgacgagagctccaccgactcctcctccgacgaggacgccgccaacatcgccgtcaccaaaggcctcctcttccccaacgttggccacaagtgcctcatggcaaaggacggcaaaaagaagaaggttaaatccaaatcctccactaaatatgagtcctctagtgatgataatgctagtgatgaggaggataatttacgtaccctttttgccaacctaaacatgcaacaaaaggaaaagttaaatgaattaattagtgccatccatgagaaggatgacctcttggacacccaagaggacttcctaatcaaggaaaacaaaaagcatgttaaggttaaaaatgcttatgctctagaagtagaaaaatgtgaaaaactatctagtgagctaagcacttgccatgagactattgacaaccttagaaaagagaatcctaatttgttagctaaggttgattcaaatgtttgtgatgtttcaattcccaatcttagaaatgataataatgatttgcttgctaagattgaagaattaaacacttctattgctagccttaggattgagaatgaaaaattgcttgctaaggctaaagaacttgatgtttgcaatgttacaatttccgatcttagagataaaaatgatatattgcgtgctaagattattgaacttaattcttgcaaaccctctacatctaccactgagcatgtcactatttgcactagatgtagagatgttgatattgatgctattcatgatcatatggtattaattaagcaacaaaatgatcatatagaaaaattagatgctaaaattgccgagcatgaacttgaaaatgaaaaatttaaatttgctcgtagtatgctttatagtgggagacgccctggcattaaggatgacattggcttccaaaagggggacaatgtcaaacttaatgcctctcctaaaaaattatctaactttgttaaggggaaggctcccatgcctcaggataacgagggttacattttatatcctgccggttatcccgagagcaagattaggagaattcattctaggaagtctcactctggccctaaccatgcttttatgtataagggagagacatctagttctaggcaaccaacccgtgctaagttgcctaagaagaaaactcctagtgcatcaaatgaccatagcatttcctttaaaacttttgatgcttcttatgtgttaactaacaaatccggcaaggtagttgccaagtatgttgggggcaaacacaaggtttatgcatctgggggctcaagttggatcatcgacagcgggtgcacaaaccacatgacaggggagaagaaaatgttctcctcctacgagaaaaaccaagatccccaacgagctatcacattcggggatggaaaccaaggtttggtcaaaggtgtcattgtctttagaagaagtgatgattcaatagcatttaagggagtgttagagggtcagctatacttggtagattttgatagagctgaactcgacacttgcttaattgctaagactaacataggttggctctggcatcaccgactagcccatgttgggatgaagaatcttcataagcttctaaaaggagagcacattttgggactaactaatgttcattttgagaaagacagggaaaaatctcatacccaagaaaccttaaagggattcttgagacgggctcaaaacgagttcggcttaagagtcaagaaaattagaagcgacaacgggacggagttcaagaactctcaaatcgaaggcttccttgaggaggagggcatcaagcatgagttctcttctccctacaccccacaacaaaatggtgtagtggagaggaagaatagaactctattggacatggcaagaaccatgcttgatgagtacaaaacttcggatcggttgggcggaggcggtagaaaaactaaatttgctcctaagactatagaaggctttttgctaggatatgattcaaacacaagggcatatagagtctttaacaagtcttcgggactagttgaagtttcttgtgacgttgtgtttgatgagactaacggctctcaagtagagcaagttgatcttgatgagataggtgatgaagaggctctgtgcatcgcgctaaggaacatgaccattggggatgtgtgtcctaaggaatccgaagagcctccaaatgcacaagatcaaccatcctcctccacgcaagcatctccaccaactcaaaatgaggatgaggctcaagttgatgaaggagaagatcaaagagatgagccacctcaagatgacggcaatgatcaagggggagatgcaaaggatcaaaacaaggaggatgaagaaccaaggccgccacacccaagagtccaccaagcaatccaacgagatcaccccgtcgacaccatcctcggcgacattcataagggggtaaccactagatcttgtgttgctcatttttgtgaacattactcttttgtttcctctattgagccacacagggtagaggaagcactacaagattcggattgggtggtggcgatgcaagaggagctcaacaacttcactaggaacgaggtatggcatttagttccacgtcctaatcaaaatgttgtaggaaccaaatgggtcttccgcaacaagcaagacgagcatggtgtggtgacaaggaacaaagcccgacttgtggacaagggatactcccaagtcgaaggtttggatttcggtgaaacctatgcacccgtagctaggcttgagtcaattcgtatattgttagcctatgctacttaccatggctttaagctttatcaaatggacgtgaaaagtgccttcctcaatggaccaatcaaggaagaggtctatgttgagcaatctcctggctttgaagatagtgagtatcctaaccatgtctacaaactctctaaggcgctttatgggctcaagcaagccccaagatcatggtatgaatgcctaagagatttccttattactaatggcttcaaagtcggaaaagtcgatcctactttatttactaaaactcttgacaatgatttgtttgtatgccaaatttatgttgacgatattatatttgggtctactaacgaatctacatgtgaagaattcagtaggattatgacacagaaattcgagatgtcaatgatgggggagttgaagtatttcttaggatttcaagtgaagcaactccaagagggcaccttcattagccaaacgaagtatacccaagacattctaaacaagtttggaatgaaggatgccaagcccatcaagacacccatgggaaccaatgggcatctcgacctcgacacggaagggtgtaaaataaatagaaagagcacatcggggacttgccaattcttgggaagatccttggtgtcttgggcttcaaagaagcaaaattccgtagctctttctaccgctgaagccgagtatattgtcgcaggccattgttgcgcgcaattgctttggatgaggcaaacccttagggactatggttacaaattaaccaaagttcctcttttatgtgataatgagagtgcaatccgcatggcggataatcgcgttgagcatagccgcactaaacacatagtcattcggtatcattttctaagggatcaccaacaaaagggagatatcgacattgcatatattaacactaaagatcaattagccgatatctttaccaagccactagatgaacaaacttttaacaaacttaggcatgagctaaatattcttgattctaggaatttcttttga

SEQ ID NO: 4746 - DNA, 1914 bp, Zea mays
  Clone ID: TF_ZM4406.C6.o3.fg
atgtcgggagatcacgccaagaaggagatggaaaccggcgacaagcccactacaagccaagggagcacttcatcggaagagtcccgcaccaaaaggaaggagaagaagaagagctcctccaacaaagggaaggagaagaaaccttcttctcatcacaaagagaagaaggagaaatcttcctctcacaagccgcatcagagtggggacaagcataagaggatgaggaaagtggtctactacgagaccgacacttcatcaacatcgacctccggctccgatgcgccctccgtaacttctaaacgccaagagcgggatgaggattatgatgaggacgaagtggcccaaatcgagcacttcaactctcaagctacaaccatactccttgcctctctaagcaaggaggagtacaacaaggtgcaagggttgaagaatgcaaaggagatttgggacctactcaagaccgcgcacgagggtgatgaactcaccaagatcaccaagcgggaaacgatcgagggggagctcggtcgcttccgtcttcgccaaggggaggagccacaagatatgtacaaccggcttaaaaccttggtgaaccaagtgcgcaacctcgggagcaagaaatgggatgaccacgaggtggttaaggttattttgagatcacttattttccttaaccccactcaagttcaattaattcgtggtaatcctagatatactcaaatgacccccgaggaagttatcgggaattttgtgagctttgaatgtatgatcaagggctccaagaagatcaacgagcttgatgaaccctccacgtccgaaacacaaccggtggcatttaaggcaacggaggagaagaaggaggagtctacaccaagtagacaaccaattgacgcctccaagctcgacaatgaggagatggctttaatcatcaaaagctttcgccaaatcctcaagcaacggaaggggaaggattacaaatcccgttccaagaaggtgtgctacaaatgtggtaagcccggtcactttatcgctaaatgtccattatcaagtgacagtgacagggataacgacaagaagggaaagaggaaagaaaagaagaggtaccacaagagaaggggcggcgatgcccacgtatgccgcgagtgggactccgacgagagctccaccgactcctcctccgacgaggacgccgccaacatcgccgtcaccaagggactcctcttccccaacgtcggccacaagtgcctcatggcaaaggacggcaaaaggaagaaggaaaaatctcaaacccaagaaaccttaaagggattcttgagacgagctcaaaatgagttcggcttaaggatcaagaaaataagaagcgacaacgggacggagttcaagaattctcaaattgaaggcttccttgaggaggagggcatcaagcatgagttctcttctccctacacgccacaacaaaatggtgtagtggagaggaagaatcgaactctattagacatggcaagaaccatgcttgatgaatacaagacttcggatcggttttgggcggaggcggtcaacaccgcttgctacgccatcaaccggttgtatctacaccgaatcctcaagaagacatcatatgaactcctaaccggaaccaaatgggtcttccgcaacaagcaagatgagcatggtgtggtgacaaggaacaaagctcgacttgtggccaagggatactcccaagttgaaggatttcaagtgaagcaactccaagaaggcaccttcatcagccaaacaaagtacactcaagacattctaaacaagtttgggatgaaggatgccaagcccatcaagacacccatgggaactaatgggcatctcgacctcgacacgggagatttcaagccgaccctaaggaagctcaccttacggccgtaa

SEQ ID NO: 4747 - DNA, 2131 bp, Zea mays
  Clone ID: TF_ZM4444.C4.o5.fg
atgtcgggagatcacgccaagaaggagatggagaccggcgaaaagcccactacaagccacgggagcacttcatcggaagagtcccgcaccaagaggaaggagaagaaagactcctccaaaggaaaagagaagaaatcttcttcacacaaagagaagaaggagaagtcttcctcccacaagcctcgtcggagtggggacaagaaaaagaggatgaggaaagtggtctattacgagaccgattcttcatcggcatccacctccggctccgacgcggcatccgtcacttctaagcgccaagagcgcaagaagtatagtaagattcccctacgctaccctcgcatttctaaacatacacctttactttccgtcccattaggcaaaccaccaacttttgatggtgaagattacgctaggtggagtgatttaatgcgatttcatctaacctcactccacaaaagtatatgggatgttgttgagtttggtgcacaggtaccatccgtaggggatgaagattatgatgaggacgaggttgcccaaatcgagcacttcaactctcaagcaacaacaatactcctcgcttctctaagtagagaggagtataacaaagtacaagggttgaagagcgccaaggaggtttgggatgtgctcaaaaccgcacacgaaggagatgagcttacaaagatcaccaagcgggagacgatcgagggggagctcggtcggttccggcttcgcaaaggggaggagccacaaaatatgtacaaccggctcaagaccttggtgaatcaagtgcgcaacctcgggagcaagaaatgggatgatcacgaaatggttaaggttattttaagatcacttatttttcttaaccctactcaagttcaattaattcgtggcaaccctagatatacactaatgactcccgaggaagtaatcgggaattttgtaagttttgagtgcatgatcgaaggctcgaggaagatcaacgagcttgatgatccctccacgtccgaagctcaacccgtcgcattcaaggtgacggaggaaaagaaggaggagtctacatcaagtagaacacccatcgacgcctccaagctcgacaacgaggaaatggcgcttgtcatcaaaagctttcgccaaatcctcaagcaaaggagggggaaagactataagtcccgctccaagaaggtttgctacaagtgtggtaagcccggtcactttatagctaaatgtccattatcaagtgatagtgacaggggcgacgacaagaagggaagaagaaaggagaagaagaggtactacaagaagaagggcggcgatgcccatgtttgtcgggagtgggactccgacgaaagctctagcgactcctccgacgacgaggacgccgccaacatcgccgtcaccaagggacttctcttccccaacgtcggccacaagtgcttcatggcaaaggacgacaaaaagaagaaggatgatctcttggacacccaagaggacttccttattaaagaaaataagaagcatgttaaggttaaaaatgcttatgctctagaaattgagaaatgtgaaaaattatctagtgagctaagcacttgccatgagacactagacaaccttagaaatgaaaatgctaatttgttagctaaggttgattctcatgtttgtacttcaaatcctagagatgttaatgatgatttgcttgctaggattgaagaattgaacatttctcttgatagccttagaattgagaatgaaaaattgcttgctaaggctaaagattttgatgtttgcaatgttctatttctaaccttagaagtgaaaacgatatactacatgctaagatgtagagatgttgatattaatgctattcatgatcacatgtctttaattaaacaacaaaatgatcatatagcaaaattagatgctaaaattgccaagcataacttagagaatgaaaaatttaaatttgctagaagtatgctctacaatgggagacgccctggcatcaaggatggcattggcttccaaaggggagacaatgtcaaacttagtgtccctcctaaaagattgtctaatttggtaaagggcaaggctctcatgcctcaggataacgagggttacattttgtatcctgccg

SEQ ID NO: 4748 - DNA, 2391 bp, Zea mays
  Clone ID: TF_ZM4491.C2.o4.fg
atgaagaaagtggtctactacgagaccgactcttcctcgccctctacatccgaatccgacgccgcgtccgtcacttctaagcgccaagagcgcaagaagtatagcaaaccacctatgtttgatggtgaagattataatatgtggagtgataaaatgaggcatcatctaacctcactccacactagcatttgggatgttgttgagattggagtacaggagtataacaaggtgcaagggttaaagagcgccaaggagatttgggacgtgctcaagaccgcgcacgaaggagatgaggtgaccaaaatcaccaagcgggagacgatcgagggggagctcggacgcttccggcttcgccaaggggaggagccacaagacatgtacaaccgcttgaaaaccttggtgaaccaagtgcgcaacctcgggagcaccaaatgggatgaccatgagatggtcaaggttattctaagatccctcgttttccttaaccctacgcaagttcaattaattcgaggtgatcctagatatatgctaatgtctcccgaggaagtaataggcaaatttgtgagctttgagttgatgatcaaaggctcaaagaagatcatcgagcaagatggcccctccatgcccgaagcacaaccggtcgcattcaaggcaacggaggagaagaaggaagagtctacatcaagtagagtctccatcgacgcctccaagctcgacaacgaggaaatggcgctcatcatcaagagcttccgccaaatcctcaagcaaaggagggggaaggattacaaatcccgctccaagaaagtgtgctacaagtgtggtaagcccggtcattttattgcaaaatgtccattatcaagtgatagtgacaggggcgacgacaagaagggaaaaaggagagaaaagaagaggtaccacaagaagaggggcgaagatgcccatgtgtgccgcgaatgggactccgacgagagctccaccgacgaggacgccgccaacatcgccgtcaccaaagggctcatcttccccaacatcggccacaagtgcctcatggcaaaagacgacaaaaggaagaaggtcaaatcaaaatcctccactaaatatgaaacctctagtgatgaggataacttgcgcaccctttttgccaaccttaacatgcaacaaaaagaaaaattaaatgaattaattagtgctattcatgagaaggatgaacacttggactctcaagaggacttcctaattaaagaaaacaagaagcatgttaaggttaagaatgcttacgctctagaagtggaaaaatgtgaaaaattatctagtgagctaagcaagtgccatgatattattatcaaccatagaaatgagaatgctagtttaatagctaaggttgattcaaatgtatgtgatgattcaatttccaatcttagagatgataatcctaatttgcttgctaggattgaaaaattgaatgattctcttgctagccttagaaatgaaaatgaaaatttgattgctaaggctaaagacttagatgtttgcaatgtcacaattttcaatcttagaagtgaaaatgacattctacatgctaagattgttgaacttaaatcttgcaaatcctctacatctactactgagcatgtttccaattgcactagatgtagagacattaatgttgatgctattcatgatcacctagctttaattaagaaacaaaatgatcacatagcccaacttaatgccaaaattaatgagcatgacttagaaaatgaaaaatttaaatttgctagaagcatgctctatagtgggagacgccctgacatcaaggatggcattggattccaaaagggagacaatgtcaaacttaatgcccctcctaaaagattgtctaactttgttaagggcaaggctctcatgcctcaggataacgagggttacattttgtaccctgccggttatcccgagcataaaattaggagaattcactccaggaagtctcactctggccctaatcatgcatttatgtataagggtgagacatctagctctaggcaatcaacccgtgctaaattggctagaaagaaaactcctattgcatcaaatgattctaacatttcatttaaaacttttgatgcatcttatgttttaactaacaaatccggcaaggtttatgcatctgggggctcaagttggatcatcgatagcgggtgcacaaaccacatgacaggggagaagaaaatgttctcctcctacgagaaaaaccaagatccccaacgagctatcacattcggggatgggaatcgaggtttggtcaaaagattgggtaaatgttggggcgaaggcaaagccgccacccttcgctcgaagtcttcgccgttgtcgctggtccgacggagataa

SEQ ID NO: 4749 - DNA, 1671 bp, Zea mays
  Clone ID: TF_ZM4545.C15.o1.fg
atgtcgggagatcacgccaagaaggagatggagaccggcgaaaagcccactacaagccacgggagcacttcatcggaagagtcccgcaccaaaaggagggagaagaagaagagctcctccaacaaagggaaggagaagaaatcgtcttctcaccacaaagagaagaaggaaagatcttcctcccacaagccgcaccggagtggggacaagcaaaagaggatgaggaaagtggtctactacgagaccgacacttcatcaacatctacctccgactccgatgcgccctccgtaacttctaaatgccaagagcgtaagaagtttagtaagatccccctacactatcctcgcatttctaaacatgcacctttactttccgtcccattaggcaaaccaccaacttttgatggtgaagattatgctaggtggagtgatttaatgcgatttcatctaacctcactccacaaaagtatatgggatgttgttgagtttggtgcacaggtaccgtccgtaggggataaggattatgatgaggatgaggtggcccaaatcgagcacttcaactctcaagcaacaacgatactccttgcctctttaagtagagaggagtataacaaagtacaagggttgaagagtgccaaggaggtttgggatgtgctcaaaaccgcacacgagggagacgagctcaccaagatcaccaagcgggagacgatcgagggggagctcggtcggttccggcttggcaaaggggaagagccacaacacatgtacaaccggctcaagaccttggtgaaccaagtgcgcaacctcgggagcataaagtgggatgaccacgaagtggttaaggttattctaagatctcttattttccttaaccctactcaagttcaattaattcgtggtaatcgtagatatactaaaatgacccccgaggaagtaatcgggcattttgtaagttttgagtgcatgatcgaaggctcgaggaagatcaacgagcttgatgatccctccacatccgaagctcaacccgtcgcattcaaggcgacggaggacaagaaggaggagtctacaccaagtcgacaaccaatagacgcctccaagctcgacaatgaggaaatggcgctcgtcatcaagagcttccgccaaatcctcaagcaaaggagagggaaagactacaagtcccgctccaagaaggtttgctacaagtgtggtaagcccggtcactttattgctaaatgtccattatcaagtgatagtgacaggggcgacgacaagaaggggagaagaaaggagaagaagaggtactacaagaagaagggcggcgatgcccatgtttgtcgagagtgggactccgacgaaagctctagcgactcctccgacgacgccaacatcgccgtcaccaagggactcctcttccccaacgtcggccacaagtgcctcatggcaaagaacggcaaaaagaagaaggtcaaatccaactcctccactaaatatgagtcttccagtgatgataatgctagtggtgaggaagataatttgcgtactctttttgccaaccttaacatggaacaaaaggagaaattaaatgaactaattagtgccatccatgagaaggatgatctcttggactcccaagaggacttcctaatcaaggaaaataaaaaacatgttaag

SEQ ID NO: 4750 - DNA, 1599 bp, Zea mays
  Clone ID: TF_ZM4550.C4.o1.fg
atgtcgagagatcacgccaagaaggagatggtgaccggcgagaagcccgccacaagccacgggaaggctccatcgggagagtccgacaacaaggtgaatggatccccttcacacaacaagtcgcaacggagcggcgagaagaaaaagaagatgaagaaagtggtctactacgagaccgactcctcatcgccatccacctccggctccgacgcgccgtccgtcacttctaagcgccatgagcgcaagaagtttagtaagatccccttacgttatcctcacatttccaaacgcacccctttactttccgtcccactaggcaaaccaccggtttttgacggtgaagattattgtatgtggagtgataaaatgaggcaccatctaacctcactccatgctagcatttgggacattgttgagtttggtgcgcaggaaccatccgtaggggatgaaggctatgattcggacgaggtagcccaaatccggcaattcaactcacaagccaccactatactcctcgcctctctaagtcgagaggagtataacaagttgcaagggttgaaaagtgcaaaggagatttgggacgtactcaagaccgcgcacgaaggagacgaggtgaccaagatcaccaagcgggagacgatcgagggggagctcggtcgcttcatgcttcaccaaggggaggagccacaagcaatgtacaaccggctcaagactttggtgaaccaagtgcgcaacctcgggagcactaaatgggatgaccatgagatggtcaaggttattcttagatcactcatatttattaaccctactcaagttcaattaattcgtggtgatccaaggtataaactaatgtctcccgaggaagtgataggaaaatttctgagctttgaattaatgatcaaaggctctaagaaaatcatcgagcaaggcgtctcctccacaactgatgtgcaacccgttgcattcaaagcaacggaggagaagaaagatgagtctacgtcaagtaggctccccatcgacgcctccaagctcgacaacaaggagatgcaaagaagggggaaggactacaagccccgctccaagaaagtttgctacaagtgtggtaagcccggtcattttattgcaaaatgtccattatcaagtgatagtgacaggggcgacaacaagaaggggagaaggaaggagaagaagaaatattacaagaagaagggcggcgatgcccatgtatgccgcgagtgggactccaacgagagctccaccgactcctcctccgacgaggatgccgccaacatcgccgtcaacaagggccttctcttccccaacgtcgaccacaagtgcctcatggaaaaggacggcaagaagaagaaggtaaaatcaagatcctccgctaagtatgcaacttctagtgatgaggataattctagtgatgatgaggataacttgcttactctttttgccaatcttaacatgcaacataaaaagaaattgaatgaattgattagtgctattcatgagaaggatgaactcttggatagccaagaggacttccttattaaggaaaacaaaaaacatgttaaggttaaaatgcttatgctctag

SEQ ID NO: 4751 - DNA, 1923 bp, Zea mays
  Clone ID: TF_ZM4554.C3.o2.fg
atgtcgagagatcacgccaagaaggagatggtgaccggcgagaagcccgccacaagccacgggaaggctccatcgggagagtccgacaacaaggtgaatggatccccttcacacaacaagtcgcaacggagcggcgagaagaaaaagaagatgaagaaagtggtctactacgagaccgactcctcatcgccatccacctccggctccgacgcgccgtccgtcacttctaagcgccatgagcgcaagaagtttagtaagatccccttacgttatcctcacatttccaaacgcacccctttactttccgtcccactaggcaaaccaccggtttttgacggtgaagattattgtatgtggagtgataaaatgaggcaccatctaacctcactccatgctagcatttgggacattgttgagtttggtgcgcaggaaccatccgtaggggatgaaggctatgattcggacgaggtagcccaaatccggcaattcaactcacaagccaccactatactcctcgcctctctaagtcgagaggagtataacaagttgcaagggttgaaaagtgcaaaggagatttgggacgtactcaagaccgcgcacgaaggagacgaggtgaccaagatcaccaagcgggagacgatcgagggggagctcggtcgcttcatgcttcaccaaggggaggagccacaagcaatgtacaaccggctcaagactttggtgaaccaagtgcgcaacctcgggagcactaaatgggatgaccatgagatggtcaaggttattcttagatcactcatatttattaaccctactcaagttcaattaattcgtggtgatccaaggtataaactaatgtctcccgaggaagtgataggaaaatttctgagctttgaattaatgatcaaaggctctaagaaaatcatcgagcaaggcgtctcctccacaactgatgtgcaacccgttgcattcaaagcaacggaggagaagaaagatgagtctacgtcaagtaggctccccatcgacgcctccaagctcgacaacaaggagatgcaaagaagggggaaggactacaagccccgctccaagaaagtttgctacaagtgtggtaagcccggtcattttattgcaaaatgtccattatcaagtgatagtgacaggggcgacaacaagaaggggagaaggaaggagaagaagaaatattacaagaagaagggcggcgatgcccatgtatgccgcgagtgggactccaacgagagctccaccgactcctcctccgacgaggatgccgccaacatcgccgtcaacaagggccttctcttccccaacgtcgaccacaagtgcctcatggaaaaggacggcaagaagaagaaggtagaaaaatgtgaaaaattaactagtgagctaagcacttgccatgacactatttctaaccttagaaatgaaaattccaaaataattgctaaggttgagaagtcaaatgtttgtgatgattcaattgttgatcttagaaatgataatgctagtttaattgctaagattgacatgttgaatggttctcttgctagccttaagattgaaaatgaaaaattaattgctaaggctaaagatttaaatgtttgcaatgctactattaccaatcttagagacgataatgctattttacaaactaacattgttgaattaaatacttgcaaaccctctacatctaccgttgagcatgtctcaatttgcactaaatgtagagatattaatgttgatgctattcatgatcacttagctttaattaagaaacaaaatgatcacatagctcaacttagtgctaagattaatgagcatgacttagaaaatgaaaaatttaaatttgctagaagcatgctctatagtgggagacgccctgacattaaggatggaattggcttccaatag

SEQ ID NO: 4752 - DNA, 4086 bp, Zea mays
  Clone ID: TF_ZM4579.C1.o1.fg
atgtcgggagatcacaccaagagggagatggagaccggcgacaagcctactacgagtcacgggagcacttcatcggaagagtcccgcaccaagaggaaggagaagaagaaggactcctccaacaaagggaaggggaaggagaagaaatcttcttcccacaagtcgcatcggagaggcgacaagaacaagagaatgaggaaagtggtctactacgagaccgacacttcatcaacgtcgacctccgactccgacgtgccgtcggtaacttctaagcgccaagagcgcaagaagtatagtaagatccccctacgctacccccacatttcaaagcgtacttctttactctccgttccattaggcaaaccaccggtttttgacgatgaagattataatatgtggagtgacaaaatgaggcaccatctaacctcactccacacaagcatatggaatgttgttgagtttggtgtacaggtaccatccgtaggggatgaagactacgactcggacgaggtggcccaaattcaccactttaactcccaagcaaccactatactcctcgcctctctaagtcgagaggagtataataaggtgcaagggttaaaatgtgcgaaggaaatttgggacgtactcaagaccgcgcacgagggagacgaggtgacaaagatcaccaagtgggagacgatcgagggggagctcggtcgcttcatgcttcaccaaggggaggatccacaagctatgtacaaccgcttgaagaccttggtgaaccaagtgcgcaacctcgggagcgaaaaatgggatgaccatgagatggtcaaggttattcttagatctctcgtatttcttaaccctacacaagttcaattaattcgaggtgatcctagatataagctaatgtctcccgaggaagttataggcaaatttgtgagctttgagctaatgattaaaggctcaaagaaaatcatcgagcaaggcacctcctccacgcccgaggcacaaccggtcgcattcaaggcgacggaggagaagaaggaagagtctacatcaagtagacaactcatcgacgcctccaagctcgacaacgaggaaatgacgctcatcatcaagagtttccgccaaatcctcaagcaaaggagggggaaagactacaagccccgctccaagaaagtatgctacaaatgtggtaagcccggtcatttcattgctaaatgtccattatctagtgatagtgacagggacgatgacaagaaggggagaagaagggaaaagaagagatatcacaagaagaagggcggcgatgcccacgtatgccgcgagtgggactccgacgagagctccaccgattcctccttcgacgaggacgccaccaatatcgccatcaccaagggacttctcttccccaacgtcggccacaagtgcctcatggccaaggacagcaaaaggaagaaggttaaatccaaatcctccactaaatatgagtcctctagtgatgataatgctagtgatgaagaggataatctgcgtactctttttgtcgacctcaacatgcaacaaaaggaaaaactaaatgagctaattagtgtcatccatgagaaggatgatctcttagactcccaagaggacttcctaatcaaggaaaacaaaaagcatgttaaggtaaaaaatgcttatgctctagaagtagaaaaatgtgagaaattatctagtgagctaagcacatgccataacactattgccaaccttagaaatgaaaatgccaaattaattgctaaggttgattctcatgtttgtgatgtttcaattcccaatcttagaaatgataatgatgatttgcttgctaagattgaagaattaaacatctctcttgctagccttagggttgaaaatgaaaaattaattgctaaggctaaagaattagatgtttgcaatgttacaatttccgatcttagagataacaatgatattttgcgtgctaagattgttgaactcaattcttgcaaaccctctacatctaccattgagcatgtttctatttgcactagatgtagagacgttgatattgatgctattcatgatcacatggtcttaattaaacaacaaaatgatcatatagcaaaattagatgctaaaattgccgagcataacttagaaaatgaaaagtttaaatttgctagaagtatgctctataatgggagacgccctggcatcaaggatggcattgacttccaaaggggagacaatgtcaaacttagtgcccctcctaaaagattgtctaattttgttaagggcaaggctcccatgcctcaggataacgagggctacattttgtactctgccggctatcctgagagcaatattaggagaattcattctaggaagtctcactctggccctaaccatgcttttatgtataagggtgagacatctagctctaggcaaccaacccgtgctaagttgcctaagaagaaaactcctaacgcatcaaatgatcatgacatttcattcaaaacttttgatgcatcatatgtgcttactaacaaatccggcaaggtttatgcatccgggggctcaagttggatcatcgacagcgggtgcacaaaccacatgacaggggagaagaaaatgttctcctcctacgagaaaaaccaagatccccaacgagctatcacattcggggatggaaaccaaggtttggtcaaaggtgtcactgtctttagaagaagtgatgattcaatagcttttaagggagtgttagagggtcagctatacttggtagattttgatagagctgaactcgacacttgcttaattgctaagactaacatgggttggctctggaaccgccgactagcccatgttgggatgaagaatcttcataagcttctaaaggaagaacacattttaggactaacagatgttcattttgagaaagacaggatttgtagcgcatgccaagccgggaagcaagttggtgttcatcatccacacaagaacatcatgacgactgacaggccactggaactcctacacatggatttattcggcccgatcgcttacataagcatcggcgggatggagaggaagaatcgaactctattggacatggaaagaaccatgcttgatgagtacaagacaccggatcggttttgggccgaggcggtcaacaccgcctgctacgccatcaaccggttatatctgcaccaaatcctcaagaagacatcctatgaactcctaactggtaaaaagcccaatatttcatattttagagtttttggtagcaaatgctttattcttgttaaaagaggtagaaaatctaaatttgctcctaaaactgtagaaggctttttactaggatatgactcaaacacaagggcatatagagtctttaacaagtcctcaggacttgttgaagtttcttgtgacgttgtgtttgatgaaactaacggctctcaagtagagcaagttgatcttgatgagataggtgacgaagaggctccgtgcatcgcgctaaggaacatgtccattggggatgtgtgtcctaaggaatccaaagagcctccaaatgcacaagatcaaccatcttcctccacacaagcatctccaccaactcaaaatgaggatgaagctcaagttgatggaggagaagatcaaagtggtgagccacctcaagatgacgacaatgatcaaggggaagatgcaaatgatcaagacaaggaggatgatgaaccaaggccgccacacccaagagtccaccaagcaatccaacgagatcaccccgtcgacaccatcctcggcgacattcataagggggtaaccactagatctcgtgttgcacatttttgtgagcattactcttttgtttcctctattgagccacacagggtagaggaagcacttcaagattcggattgggtgatggcaatacaagaggagctcaacaacttcattaggaacgaggtatggcatttagttccacgtcctaaccaaaatgttgtaggaaccgaatgggtcttccgcaacaagcaagatgagcatggtgtggtgacaaggaacaaagctcgactcgtggccaaggggtacaagtcgaag

SEQ ID NO: 4753 - DNA, 2313 bp, Zea mays
  Clone ID: TF_ZM4589.C2.o4.fg
atgtcgggagatcacaccaagaaggagatggagaccggcgaaaagcccactacaagccacgggagcacttcatcggaagagtcccgcaccaagaggaaggagaagaagaaggactcctccaagcggaaggagaaaaagtcctcctcttctcaccacaaagagaagaaggaaaaatcttcttcccacaagccgcatcggaaaggcgacaagcacaaaaggatgaggaaagtggtctactacgagaccgacacttcatcaacatcgacctccgactccgatgcgccctccgtcacttctaagcgccaagagcgcaagaagtatagggacgaggactatgatgaggatgaggtggcccaaatcgagcacttcaactctcaagcaacaacaatactcctcgcctctctaagtagagaggagtataacaaagtacaagggttgaagagcgccaaggagatttgggatgtgctcaaaaccgcgcacgagggagacgagctcaccaagatcaccaagcgggaaacgatcgagggggagctcggtcggttccggcttcgcaaaggggaggagccgcaacacatgtacaaccggctcaagaccttggtgaatcaagtgcgcaacctcgggagcgtaaaatgggatgaccacgagatggttaaggttattctaagatctcttattttccttaaccctactcaagttcaattaatccgtggtaatcctagatatactaaaatgacccccgaggaagttatcgggaattttgtgagttttgagtgcatgatcgaaggctcaagaaagatcaacgagcttgatgatgccaccacatccgaagctcaacccgttgcattcaaggcaacggaggagaagaaggaggagtctacaccaagtcgacaaccaatagacgcctccaaactcgacaatgaggaaatggcgctcgtcatcaagagcttccgccaaatcctcaagcaaaggagggggaaggattacaaatcccgctccaagaaggtctgctacaagtgtggtaagcccggtcactttattgctaaatgtccattatcaagtgatagtgacaggggcgacgacaagaaggggagaagaaaggagaagaaaaggtactacaagaagaagggcggcgatgcccatgtttgtcgggagtgggactccgatgaaagctctagcgactcctccgacgacgaggacgccgccaacatcgccgtcaccaagggactcctcttccccaacgtcggccacaagtgcctcatggcaaaggacggcaaaaagaagaaggaaaaatctcaaacccaagagaccttaaaaggattcttgagacgggctcaaaatgagttcggcttaaggatcaagaaaattagaagcgacaacgggacggagttcaagaactctcaaatcgaaggcttccttgaggaggagggcatcaagcatgagttctcctctccctacacgcctcaacaaaatggtgtagtggagaggaagaatcgaactcttttggacatggcaaggaccatgcttgatgagtacaagacttcgaaccggttttgggccgaagcagtcaacaccgcctgctacgccatcaaccgggtagaggaagctctccaagattcggattgggtggtggcgatgcaagaggagctcaacaacttcactagaaatgagagccgaggtgaccgccgtcactccaccgctccactggccaatctgacagaaggacagcgccgcctgcgccactccgactgcagtgccactcgacagagtgagtctgacaggcaattaggccttgccaaaggcgccacggcgaactccgctccgcccgaccccagggctcggactcgggctaagacccggaagacggcgaactccgctccgcccgaccccagggctcggactcgggctaagacccggaagacggcgaactccgctccgcccgaccccagggctcggactcgggctaagacccggaagacggcgaactccgctccgcccgaccccagggctcggactcgggctaagacccggaagacggcgaactccgctccgcccgaccccagggctcggactcgggctaagacccggaagacggcgaactccgctccgcccgaccccagggctcggactcgggctaagacccggaagacggcgaactccgctccgcccgaccccagggctcggactcgggctaagacccggaagacgacgaaactccgcctcgcccgaccccagggctcggactccgccctggcctcggccggacgacttccgcctcgcccgaccccctggctcgggctcggccacggcaactga

SEQ ID NO: 4754 - DNA, 2896 bp, Zea mays
  Clone ID: TF_ZM4590.C6.o1.fg
atgtcgggagatcacgccaagaaggagatggagaccgacgacaagcccactacgagtcacgggagcacttcatcggaagagtcccgcaccaagaggaaggagaagaggaaggactcctccaaagggaagaagtcttcttcacactccaaagggaaggagaagaaatcctcttctcaccacaaagagaagaaggaaaaatcttcttcccacaagccgcatcggagtggggacaagaagaagaggatgaggaaggtggtctactacgagaccgattcttcatcaacatccacctccggctccgacgcggcatccgtcacttctaagcgccaagagcgcaagaagtatagtaagattcccctacgctaccctcacatttctaaacatacacttttactttccgtcccattaggcaaaccaccaacttttgatggtgaagattacgctaggtggagtgatttaatgcgatttcatctaacctcgctccacaaaagtatatgggatgttgttgagtttggtgcacaggtaccatccgtaggggatgaagattatgatgaggatgaagtggcccaaatcgagcacttcaactcccaagccacaaccatactcctcgcctctctaagtaaggaggaatacaacaaggtgcaagggttgaagaatgcaaaggagatttgggacttactcaagaccgcgcacgagggtgatgaactcaccaagatcaccaagcgggaaacaatcgaaggggagctcggtcgcttccgtcttcgccaaggagaggagccacaagatatgtacaaccggctcaaaaccttggtgaaccaagtgcgcaacctcgggagcaagaaatgggatgatcacgaggtggttaaggttattttaagatcgcttattttccttaaccctactcaagtacaattaattcgtggcaacccaagatatacactaatgactcccgaggaagttatcgggaattttgtgagctttgaatgtatgatcaagggctcaaagaagatcaatgagcttgatgatccctccacgtccgaagcacaaccggtggcatttaaggcgacagaggaaaagaaggaggagtctgcaccgagtagacaaccaattgacgcctccaagctcgacaatgagaagatggctttaatcatcaaaagctttcgccaaatccacaagcaacggaaggggaaggattacaaatcccgttccaagaaggtttgctacaagtgtggtaagcccggtcactttattgctaaatgtccattatcaagtgacagtgatagggataacgacaagaagggcaagaggagagaaaagaagaggtaccacaagaagaggggaggcgatgcccacgtatgccgcgagtgggactccgacgagagctccaccgagtcctcctccgacgaggacgccgccaacatcgccgtcaccaagggactcctcttccccaacgtcggtcacaagtgcctcatggcaaatgacggcaaaaagaagaaggttaaatctaaatcctccactagatatgagtcttctagtgatgaaaatgctagtgatgaggaggataacttgcataccctttttgccaaccttaacatggaacaaaaagaaaaattaaatgaattgattagtgctattcatgagaaggatgatctcttggactctcaagaggacttccttattaaggaaaacaaaaagcatgttaaggttaaaaatgcttatgctctacaaattgaaaaatgtgaaaaattgtctagtgagctaagcacttgccatgagaccattgacaaccttagaaatgaaaatggtaaattacttgctaaggttgattcccatgtttgtattgattcaatttccaatcctagagatgataatgttgatttgcttgctaggattgatgaattgaatatttctcttgatagccttaggattgaaaatgaaaagttaattgctaaggctaaagattttgatgtttgcaatactactatttccgaccttagaactaagaatgatatgttgcatgctaaggttgtagaactaaaatcttgcaaaccctctacatctaccgttgagcacacttctatttgtactagatgtagagatgttgatatcaatgctattcatggtcacatggctttaattaaacaacaaaatgatcatatagcaatattagatgctaaaattgtcgagcataacttagaaaatgaaaaatttaaattcgctagaagtatgctctataatgggagacgccctagcatcaaggatggcattggctaccaaaagggagacaatgtcaaacttagtgcccctcctaaaagattgtctaattttgttaagggcaaggctcccatgcctcaggataacgagggttacattttgtaccctgccggctatcccgagagcaaaattaggagaattcactctaggaagtctcactctggctctaaccatgctttcatgtataagggtgagacatctagctctaggcaaccaacccgtgccaagttgcctagaaagaaaactcctaatgcatcaaatgatcatgatatttcatttaaaacttttgatgcatcttatgttttgactaacaaatccggcaagatagttgccaagtttgttgggggcaaacacaagggttccaagacttgtgtttgggtacccaaagttcttgtttctaatgccaaaggacccaagaccgtttgggtttatgcatccgggggctcaagttggatactcaacagcgggtgcacaaaccacatgacaggggagaagaagatgttctcctcatatgagaaaaaccaagatccccaacgagctatcacattcggggatggaaatcaaggtgtcactgtctttagaagaagtgatgattcaatagcatttaagggagtgttagagg

SEQ ID NO: 4755 - DNA, 1602 bp, Zea mays
  Clone ID: TF_ZM4611.C1.o1.fg
atggtgatcggcggtaagaagtccgctacaagccacaggaaggctccatcaagggagtccgccaacaacaagaaggatggatccccttcacgcattcgatcgcacaagagtggtgagaagaagaagaaaatgaagaaggtggtctactacgagaccgactcttcctcgccctctacatccggatccgacgccgcatccgtcacttctaagcgccaagagcgcaagaagtatagggatgaagattatgatgaggacgaggtggcccaaatcgtgcacttcaactcccaagccaccactatactcctcacctctctaagtcgagaggagtataacaaggtgcaaggattgaagagcgccaaggagatttgggacgtgctaaagaccgcgcacgaaggagacgaggtgaccaagatcaccaagcaggagacgatcgagggggagctcggttgcttccggcttcgccaaggggaggagccacaagaaatgtacaacaggctcaagaccttggtgaaccaagtgcgcaacctcgggagcaaaaaatgggatgaccatgaaatggtcaaggttattcttagatcactcgtttttcttaaccctacgcaagtacaattaatacgtggtgatcctagatatacactaatgtctcccgaggaagtaataagaaaatttgtgagctttgagttgatgatcaaagtctcaaagaaaatcatcgagcaagatgcgccctccacgtccgaagcacaaccggtcgcattcaaggcaacggagaagaagaaggaagagtctacatcaagtagactccccatcgacgcatccaagctcgacaacgaggaaatggtgctcatcatcaagagcttccgccaaatccttaagcaaaggagggggaaggactacaaatcccgctccaagaaagtgtgctacaagtgtggtaagcccggtcattttattgctaagtgtccattatcaagtaacaatgacagaggcgaagacaagaaaggaaagaggagagaaaagaagacatactacaaaaagaagggcggcgatgcccatgtgtgccgcgagtggaactccgacgagagctccaccgactcctccgacgacgaggacgccgccaacattgccgtcaccaagggactcctcttccccaacgtcggccacaagtgcctcatggcaaaagacgacaaaaggaagaaggtaaaatcaagatcctccactaaatatgcatcctctagtgatgaagataattctagtgatgaggaggataacttgcgcaccctttttgccaacctaaacatgcaacaaaaagaaaagttgaatgaattaattagtgctattcatgaaaaggatgaactcttggactcccaagaggacttcctaattaaggaaaataagaagcatgttaaggttaaaaatgcttacgctctagaagtagaaaaatgtgaaaaactatctagtgagctaaacacttgccatgatattattgccaaccttagaaatgagaatgctaaaataattgctaaggttgattcaaatgcttgtgatgtttcaattcccaatcttagagatgataatgttagttatttgctaagattgaagaattga

SEQ ID NO: 4756 - DNA, 3738 bp, Zea mays
  Clone ID: TF_ZM4618.C5.o1.fg
atgtacaaccggctcaagaccttggtgaaccaagtgcgcaacctcgggagcaccaaatgggatgaccatgaaatggtcaaggttattctaagatcacttgtatttcttaatcctacacaagttcaattaattcgtggtgatcctagatacaagctaatgtctctcgagaaggttataggaaaatttgtgagctttgaattgatgatcaaaggctccaagaaaatcatcgagcaaggcgcctcctccacacccaaaatgcaacccgtcgcattcaaggcgacggaggagaagaaagaagagtctacatcaagtagactccccatcgacgcctccaagctcgacaacgaggagatggcgctcatcatcaagagctttcgccaaatcctcaagcaaaggagggggaaggacttcaagccccgctccaagaaagtttgctacaagtgtggtaagcccggtcattttatcgctaaatgccctttatctagtgatagtggcagggataacgacaagagggggaagaagaaggagaagaagagatactacaagaagaagggtggcgatgcccatgtttgccaggagtgggactccaatgagagctccactgactcctcctccgatgaggatgccgcaaacatcaccatcaacaagggtcttctattccccaacgtcggccacaagtgcctcatggcaaaggacgacaaaaggaagaaggatgatttgctcaccctttttgccaacttaaacatgcaacaaaaagaaaaattgaatgaattgattagtgctattcatgagaaggatgaactcttggatagccaagaggacttccttattaaagaaaataagaatcatgttaaagttaaaaatgcttatgctcaggagatagaaaaatgtgaaaaattaactagtgagctaagcacttgccatgacactatttccaaccttagatttgaaaatgataaattgattgctaaggttgagaaagtaaatgttggtgatgattatcttgtcaaccttagaaatgataatgctaatttgattgctaagattgacaaattgaatgcatctctctctatccttaaaattgagaatgaaaaattaattgctaaggcaaaagatttaaatgtttgcaatgtttctatttccaatcttagagatgagaacgctattttacatgctaagattgttgaattaagtacttgcaaaccctctacatctgccgttgagcatgttactatttgcactagatgtagagacattaatgttgatgctattcatgatcacctagccctaattaaacaacaaaatgatcacatagctcaacttagtgccaaaattagtgagcatgacttggaaaatgaaaaatttaaatttgctagaagcatgctctatagtgggagacgcccaggcattaaggatggtattagcttccaaaagggagacaatgtcaagcttaatgcccccaagaaattatctaactttgttaagggcaaggctcccatggctcaggataacgagggttacattttataccctgccggttatctcgagcacaaaattaggagaattcattctaggaagtctcactctggctctcatcatgcttttatgtataagagtgaggcatctagctctaggcaatcaacccatgttaaattgcctaaaaagaagtctcctattgcatcaaatgaacctaatatttcatttaagacttttgatgcatcttatgtgctcactaacaaatcaggcaaagtagttgccaaatatgttgggggcaaacacaaggggtcaaagacttgtgtttgggtacccaaggtttatgcatccgggggctcaagttggatcattgatagcgggtgcacaaaccacatgacaggggagaaaaggatgttatcctcttacgagaaaaaccatgatccccaaagagctatcacattcggggatggaaatcaagattctttagattacaacttgctttctgtttctcaattatgcaaaatgggttacaactgtctttttacggatataggtgttactatctttagaagaagtgatgattcagtagcatttaaggaaaaatcacaaacccaagagaccttagagggattcttgagacgagctcaaaatgagttcggcttaaggatcaaaaagattagaagcgataatgggatggagttcaagaactcacaaatagaaggcttccttgaggatgagggcatcaagcatgagttctcttctccctacacaccacaacaaaatggtgtagtggagaggaagaatagaactctacttaacatggcgaggaccatgcttgatgaatacaagactttggaccggttttgggcggaagcaatcaacaccgcttgctacgccatcaactgtctctaccttcaccgaatcctcaagaagacatcatatgaactcctaaccggtaaaaatcctaatgtttcatattttagagtctttggtagcaaatgctttattcttgttaaaagaggtagaaaatctaaatttgctcctaaggctgtagaaggctttttacttggatatgattcaaacacaagggcatatagagtctttaacaagtccactggactagctgaagtttcttgtgacattgtgtttgatgagactaacggctctcaagtagagcaagttgatcttgatgagctagatgatgaagaggctccatgcgtcgcgctaaggaacatgtccattggggatgtgtgccctaaggaatccgaagagcctccacaagcacaagatcaaccatcttcctcaatgcaagcatctccaccaactcaagatgaggatcaagctcaagaggatgaaaatgaagatcaagaagatgagccacctcaagaaggggacaatgatcaagggagagatgcccatgatcaagacaaggaagatgatgacggtccaaggccgccacacccaagagtccaccgagcaatacaaagagatcaccccgtgaactccatccttggcgatattcataagggggtaactactcgatctcgtgttgctcatttttgtgaacattactcctttgtgtcttctattgagccatacagggtagaagatgcattaagggattcggattgggtgttggcaatacaagaggagctcaacaacttcacgaggaatgagctttatcaaatggacatgaagagtgccttcctcaatggaccaatcaaggaggaggtctatgttgagcaacctcccggctttgaggatagtgagtaccctaatcacgtctataaactctctaaggcactttatgggctcaagcaagccccaagagcatggtatgaatgcctaagagattttcttatagctaatggcttcaaagtcggaaaagccgatcctactctctttactaaaacaattgcaaatgatttgtttgtatgccaaatttatgttgatgatatcatatttggatctactaacaaatctacttgtgaagagtttagtaggattatggttcaaaaattcgagatgtctatgatgggggagttgaagtatttcttaggatttcaagtcaagcaactccaagagggcaccttcatcagccaaacgaagtacattcaagacatactcaccaagtttgggatgaaggatgccaagcccatcaagacacccatgggaaccaatgggcatctcgacctcgacacgggaggtaaatccgtagatcaaaaggtttgtgttggcatcaatcaccaaaaagggggagattga

SEQ ID NO: 4757 - DNA, 927 bp, Zea mays
  Clone ID: TF_ZM4630.C3.o1.fg
atgtctctcgagaaggttataggaaaatttgtgagctttgaattgatgatcaaaggctccaagaaaatcatcgagcaaggcgcctcctccacacccaaaatgcaacccgtcgcattcaaggcgacggaggagaagaaagaagagtctacatcaagtagactccccatcgacgcctccaagctcgacaacgaggagatggcgctcatcatcaagagctttcgccaaatcctcaagcaaaggagggggaaggacttcaagccccgctccaagaaagtttgctacaagtgtggtaagcccggtcattttatcgctaaatgccctttatctagtgatagtggcagggataacgacaagagggggaagaagaaggagaagaagagatactacaagaagaagggtggcgatgcccatgtttgccaggagtgggactccaatgagagctccactgactcctcctccgatgaggatgccgcaaacatcaccatcaacaagggtcttctattccccaacgtcggccacaagtgcctcatggcaaaggacgacaaagggaagaaggtaaaatccagagcttccactaaatatgagtcttctagcgatgataatgctagtgatgaggaagataatttgcgtactctttttgccaacttaaacatgcaacaaaaagagaaattaaatgaattgattagtgatatccatgagaaggatgatctcttggacacccaagaggacttccttattaaagaaaataagaagcatgttaaagttaaaaatgcttatgctctagaagtagaaaagtgcgaaaaattatctagtgagctaagcacttgccatgagactatagacaaccttagaagtgaaaatgctaatttgttagctaaggttgatttcaaatgtttgcaatgtttcaattcccaatctcggaaatga

SEQ ID NO: 4758 - DNA, 1596 bp, Zea mays
  Clone ID: TF_ZM4644.C10.o1.fg
atgtcgggagcatccgccaagagggagatcgggaccggcgagaagcccgccacaagcaatgggaaggctccatccggggagtccgccaacaaggtgaagggatcttcttcacacaacaagtcgcgtcagagcggtgacaagaagaaaaagatgaagaaggtggtctactacgacaccgactcttcgtcaccatccacctccggctctaacacaccgtccgtaacttctaagcgccatgagcgcaagaagtttagtaagatccccctacgctaccctcgcatttccatacgtactccattactttccgtcccactaggcaaaccacccatgtttgatggtgaagattataatatgtggagtgataaaatgaggcatcatctaacctcactccacactagcatttgggatgttgttgagattggagtacaggtaccatcaccgggggatgaagactatgattcggacgaggtcgcccaaatccgacacttcaactctcaagccaccactatactcctcgcctctctaagtcgagaggagtataacaaggtgcaaggattaaagagcgccaaggagatttgggacgtgctcaagaccgcgcacgaaggagatggaggctccaaaatgatcatcgagcaaggcgactcctccacgcccgaagcacaactcgttgcattcaaagcaacggaggagaagaaagaagattctactccaagtagaatccccatcgacgcctctaagctcgacaataaggagatggcgctcatcatcaagagcttccgtcaaatcctcaaacaaaggaaggggaaagattacaagccccgttccaggaaggtgtgctacaagtgtggtaagcccggtcatttcattgctaaatgtccattatctactgatagtgacaagggcgacgacaagaaaggaaagaggggagaaaagaagagatactacaagaagaagggtggcgatgcccatgtgtgccgcgagtgggactccgacgagagctccaccgattcctcctctgacgaggacgccgccaacatcgccgtcaccaagggcctcctcttccccaacgtcggccacaagtgcctcatggcaaaggacggcaaaaggaagaaggtaaaatcaaaatcctccactaaatatgaaacctctagtgatgaggataactctggtgttgaggaggataatttgcgcaccctttttgccaacctaaacatgcagcaaaaagaaaaattaaatgaattaattagtgctattcatgagaaggatgaactcttggattctcaagaggacttcctaattaaagaaaacaagaagcatgttaaggttaagaatgcttatgctctagaagtagaaaaatgtgaaaaattatctagtgagctaagcacttgtcatgatgttatttccaaccttagaaatgaaaatgctaaagtaattgttaaggttgattcaaatgtttgtgatgtttcaattcccaatcttatagatgataatgttagtttacttgctaagattgaagaattgaatgtctctcttgctagccttaagattgaaaatgaaaaattaattgctaaggctaaagacttagatgtttgcaat

SEQ ID NO: 4759 - DNA, 1794 bp, Zea mays
  Clone ID: TF_ZM4792.C4.o6.fg
atgaaggaggatgaggccaagagagaggcacaagaagaagaagaaaggaagaaagtcgaggaagatgaaaaagggaagacgaaggtggactacttcgacgacttggttgaactcttggtgtccaaggttcatcgcaatgctcaagcagtgagcgtaatcaaaggaagtttaggtcaggaagagtaccaaaaagtccaaggtagagaagatgctcgtgacatatggaatattctcaaaatgtcacatgagggcgatcctaaagccaagaggcataggatcgaggtgttggagagtgagttggcaagggaccgtgatgattatgatgagatgactcctcatcaactatttaccaaaatccaacaacatgagttagtggaagctccaatcaagacaagagattctcatgccttggttacaaatgatcaagagtcttccaagaagagttcaacaaacaaagatcacaagtctaagaagatgattgaaagctcaagtgaggatgagagctctagtgatgaggacatagttatgttcatcaagagctttagaaagtttgtcagaaaaggtgacaagtatcaaaggaaaggcaagaaaagggcatgttatgagtgtggcaaaactggccactccattgcagattgccccaacaagaaggaacaagaggaaaagaaggacttcaagaaagacaaatccaagaaaggagagagaagcaagggatgcttcaagaagaagaagaaagttagtccaaaggttgaagtcaaacaaatattgaagaaatgttctagcaatgatgggtcaagtgaagttgtgcccaagtacaagcccttaaggaacaacaatggaaagaagggacttgggtacaatatatttaaggcaaaccctagcatagaaggtaccaccttgtatgatgccttagggaggattcactcctctaatggtaatatcactcatgagaagatagatgtatactcctctggtgggtcaatttgggtgtttgacagtggatgtacaaaccatatgatcggagagaggaacatgtttcaatctttgcaactaaccaaagagtcacaagaaattgtgtttggcgatagtgtcaagggtgaggtgattggtattggtgaaacccaagagatcctcaagacgttcatgaggcatgcacaaaacgagtttgagctaaagatcaataaggtgagaagtgacaatggaacagagttcaagaactcatgtattgaagagttcttgggtgaagaagggatcaagcatgagttttcggttccttacactccacaacaaaatggtgttatggagaggaagagccaaactctcattgaggccgcaaaaaccatgcaagatgagtccaagacacatgacaactattgggtggaggcaatcaacacagcgtgccatgcaatcaaccgcctatatcttcacaagatctacaaaaagaccgcctatgagcttctcactggtaacaaacccaaagttgattactttcaagtttttggttgtaaatgctttattcttaacaagaaagccaagagctcaaagtttgctcctaaagtaaacgagggcttcttacatggctatgcatcaaatgtgcacggttactgtgttttcaacaacactatcggtcttgttgaaatagtgttaaacatgacatttgacgaatctaatggctcgcaagggcatgttgcaagtgatattgcaggtgatgagcaacaaccctgtgatgtgaccaagaagcttgctatcgctgaaataagaccgcgagagaaggagaatgaaggaaggatctag

SEQ ID NO: 4760 - DNA, 3540 bp, Zea mays
  Clone ID: TF_ZM4796.C4.o1.fg
atgaaggtggtctactacgagaccgactcttcgtcaccctccacctccggctcggaatcggcatctgccacttctaagcgccatgagcgcaagaagtatagtaagatgccccttcactatcctcgcatttcaaaacgcactccattactttccgtcccattaggcaaaccacctatgtttgaaggtgaatattattcaatgtggagtgataaaatgaggcatcacctaacctcactccacaaaagcatatgggatattgttgagtatggagcgcaggtaccgaagaagggggacaaggattatgattcggaggaggtcgaacaaatccaacacttcaactcccaagtcaccactatactcctcgcctctctaagtcgagaggagtataataaggtgcaagggttgaagagtgcaaaggagatttgggacgtgctcaagaccgcgcacgaaggagacgaggtgaccaagatcaccaagagggaaacgatcgagggggagctcggttgcttcatgcttcaccaaggagaggagccacaagtcatgtacaaccggctcaagaccttggtgaaccaagtgcgcaacctcgggagcaccaaatgggatgaccatgaaatggtcaaggttattcttagatcacttgtttttcttaatcctactcaagtacaattaattcgtggtgatccaagatataaactaatgtctctcgaggaagtgataggaaagtttgtgagctttgaactaatgatcaaaggctccaaacaaatcatcgagcgaggcgccacctccacacctgaggtgcaacccgtcgccttcaaagcgacggaggagaagaaggaagagtttacaccaagtaggcttcccatcgacgcctccaagctcgacaacaaggagatggctttaatcatcaaaagctatcgccaaatccttaagcaaaggaaggggagagattacaagctccgttccaagaaggtgtgctacaagtgtggtaagcccggtcatttcattgctaaatgtccattatctagtgatagtgacaggggcgacgacaagaagggaaagagaagagaaaagaagaggtactacaagaagaagggcggcgatgcccatgtttgccgagagtgggactccgacgagagctccaccgactcctcctccgacgaggacgccgcaaacatcgccatcaacaagggccttctcttccccaacgtcggccacaagtgccccatggcaaagtacggcaagaagaaggaaaaattaaatgaattgattagtgttattcatgagaaggatgaactcttggatagccaagaggatttccttattaaggaaaacaaaaggcatgttaatactaaaaatgcttatgctcaggagacaattgagaatgaaaaattaattgctaaggctaaagatctaaatgtttgcaatatttctatttccaatcttaagaatgaaaatgctattttacatgctaagattgatgaattaaatgcatgcaaaccctctacatctaccgttgagcatgttactatttgtactagatgtagagatattaatgttgatgctattcatgatcacctaactttaattaaacaacaaaatgatcacatagctcaacttagtgccaaaattaatgagcatgacttagaaaatgaaaattttaaatttgctagaagcatgctctatagtgggagatgcccaggcattaaggatggcattagcttccaacagggagacaatgtcaagcttaatgcccctaaaagattgtctaactttgttaagggcaaggctctcatggttcaggataacgagggttacattttataccctaccggttatcccgaacacaaaattaggagaattcactctaggaaatctcactctggctctcatcatgcttttatgtataagagtgaggcatctagttctaggcaatccactcatgctaaattgcctaaaaagaaaactcctattgcatcaaatgaacctaatatttcatttaagacttttgatgcatcttatgttttaactaacaaatcaggcaaagtagttgccaaatatgttgggggcaaacacaaggggtcaaagacttgtgtttgggtacccaaggtgcttgtttctaatgtgaaaggacccaagaccgtctgggtttatgcatccgggggatcaagttggatcattgatagcgggtgcacaaaccacatgacttgggagaaaaggatgttctcctcctacgagaaaaaccaagatccccaaagagctatcacattcagggatggaaatcaagcccatgttgggatgaagaatctttctaagcttctaaagggagagcacattttgggactaaccaatgttcattttgagaaagacagggataaatctcaaacccaagagaccttaaagggattcttgagacgggctcaaaatgagttcggcttaaggatcaaaaagattagaagcgataacgggacggagttcaagaactcacaaatagaaggcttccttgaggaggaaggcatcaagcatgagttctcttcttcctacacgccacaacaaaatggtgtagtggagaggaagaatagaactctacttgacatggtgaggaccatgcttgatgagtacaagacttcggaccgagtctttggtagcaaatgctttattcttgttaaaagaggtagaaaatctaaatttgctcctaaggttgtagaaggctttttactaggatatgattcaaacacaagggtatatagagtctttaacaagtccactggactagttgaagtttcttgtgacattgtgtttgatgagactaacggctctcaagtagagcaagttgatcttgatgagctagatgatgaagaggctccatgcgtcgtgctaaggaacatgtccattggggatgtgtgtcctaaggaatccgaagagcctccacaagcacaagatcaaccatcttcctccatgcaagcatctccaccaactcaagatgaggatcaagctcaagaggatgaaaatgaagatcaagaagatgagccacctcaagaggaggacaatgatcaagggggagatgctaataatcaagacaaggaagatgatgacgctaggcttgagtcaattcgtatattacttgcctatggtacttaccatggcttcaagctctatcaaatggacgtgaagagtgccttcctcaatggaccaatcaaggaggaagtctatattgagcaacctcccggctttgaagataagtttagtaggatcatggttcaaaagttcgagatgtctatgatgggggagttgaagtatttcttaggatttcaagtcaagcaactccaagagggcaccttcattagccaaacaaagtacattcaacacattcttaccaagtttgggatgaaggatgccaagcccatcaagacacccatgggaaccaatgggcatctcgacctcgacacgggaggcaacgagcagcccgtggttcttgactgtgttgctgaagaccttcctgagcaacaacctggtgaaggcaagtgtcctctgatagtctga

SEQ ID NO: 4761 - DNA, 969 bp, Zea mays
  Clone ID: TF_ZM4844.C2.o1.fg
atgaagaaagtggtctactacgagaccgactcttcctcgccctctacatccgaatccgacgccgcgtccgtcacttctaagcgccaagagcgcaagaagtataaggagtataacaaggtgcaagggttaaagagcgccaaggagatttgggacgtgctcaagaccgcgcacgaaggagatgaggtgaccaaaatcaccaagcgggagacgatcgagggggagctcggacgcttccggcttcgccaaggggaggagccacaagacatgtacaaccgcttgaaaaccttggtgaaccaagtgcgcaacctcgggagcaccaaatgggatgaccatgagatggtcaaggttattctaagatccctcgttttccttaaccctacgcaagttcaattaattcgaggtgatcctagatatatgctaatgtctcccgaggaagtaataggcaaatttgtgagctttgagttgatgatcaaaggctcaaagaagatcatcgagcaagatggcccctccatgcccgaagcacaaccggtcgcattcaaggcaacggaggagaagaaggaagagtctacatcaagtagagtctccatcgacgcctccaagctcgacaacgaggaaatggcgctcatcatcaagagcttccgccaaatcctcaagcaaaggagggggaaggattacaaatcccgctccaagaaagtgtgctacaagtgtggtaagcccggtcattttattgcaaaatgtccattatcaagtgatagtgacaggggcgacgacaagaagggaaaaaggagagaaaagaagaggtaccacaagaagaggggcgaagatgcccatgtgtgccgcgaatgggactccgacgagagctccaccgacgaggacgccgccaacatcgccgtcaccaaagggctcatcttccccaacatcggccacaagtgcctcatggcaaaagacgacaaaaggaagaagagatga

SEQ ID NO: 4762 - DNA, 1557 bp, Zea mays
  Clone ID: TF_ZM4887.C4.o3.fg
atgtcaggagcatccgccaaaagggatctcgagaccggcgacaagtccgcatgctcggggagaacacactcaagggagtccgcccacaagcacaaggaggaatcctcttcctccatcaagtcccatcggatgggtgacaagaagaagaagatgaagaaggtggtctactacgagaccgactcttcgtcaccctccacctccggctcggaatcggcctccactacttcaaagcgccatgagcgcaagaagtatagcaaaccacctatgtttgaaggtgaagattattctatgtggagtgataaaatgaggcatcatctaacctcactccacaaaagcatatgggatattgttgagtatggagtgcaggaggtcgaacaaatccatcacttcaactcccaagccacaactatactcctcgcctctctaagtcgagaggagtataataaggtgcaagggttgaagagcgcaaaggaaatttgggacgtgctcaagaccgcgcacgaaggagatgaggtgaccaagatcaccaagcgcgagtcgatcgagggggagctcggtcgtttccgacttcgccaaggggaagagccacaagatatgtacaaccggcttaagaccttggtgaaccaagtgagcaacctcgggagtaaaaaatgggatgaccatgaaatggtcaaggttattcttagatcactcgtttttcttaaccctacgcaagttcaattaattcgtggtaatcctagatatacactaatgtctcccgaggaagtaataggaaactttgtgagctttgagttgatgatcaaaggctcaaagaaaattatcgagcacgatggcccctccacgcccgaagcacaaccggtcgcattcaaggctacggaggagaaggaggaggaatctacatcaagtagactacccatcgacgcctccaagctcgacaacgaggaaatggcgctcatcatcaagagcttccgccaaatcctcaagcaaaggagggggaaggactacaaatcccgctccaagaaagtgtgctacaagtgtggtaagcccggtcatttcattgctaaatgtccattatctagtgatagtgacaggggcgacgataagaagggaaagaagagagaaaagaagagatactacaagaagaaaggcggcgatgcacatgtgtgtcgcgagtgggactccgacgagagctcctccgactcatcctccgacgaggacgccgccaacatcgccgtcaccaagggactcctcttccccaacgtcggccacaagtgcctcatggcaaagtacggcaaaaggaagaaggatgaactcttggactctcaagaggacttccttattaaagaaaacaagaagcatgttaaggttaagaatgctcatgctctagaagtagaaaaatgtgaaaaattatctagtgagctaagcacttgtaatgatattattgtcaaccttagaaatgaaaatgctaaattaattgctaaggttgattctaatgttaatgatgtttcaattcccaatcttagagatgataatgttagtttacttgctaagatttga

SEQ ID NO: 4763 - DNA, 5088 bp, Zea mays
  Clone ID: TF_ZM4920.C3.o11.fg
atgtcgggagatcacgccaagaaggagatggagaccggcgacaagcccacaccaagccacgggaaggcttcatcagaagagtcccgcaacaaagggaaggggaaggagaagaaaccctcttcccacaagtcgcatcggagtggggacaagaaaaagaagatgaggaaggtggtctactacgagaccgatacttcatcaccttccacctccggctccgacgcgccatccattacttctaagcgtcatgagcacaagaagtttagtaagatccccttacgctaccctcgcattcctaaacatacgcctttactttccgttccattaggcaaaccaccaacgtttgatggtgaagattatgctaggtggagtgatttgatgcgatttcatctaacctcactccacaaaagtatatgggatgttgttgagtttggtgtacaggtaccatccgtaggggatgaagattatgatgaggatgaagtggcccaaatcgagcacttcaactcccaagccacaactatactcctcgcctctctaagtcgagaggagtataacaaggtgcaaggattaaagagcgccaaggaagtttgggacgtgctcaagaccgcgcacgaaggagatgagctaaccaagatcaccaagcgggaaacgatcgagggggagctcggtcgcttccgtcttcgccaaggggaggagccacaagacatgtacaaccggctcaaaaccttggtgaatcaagtgcgcaacctcgggagcaaaaaatgggatgaccacgaaatggttaaggttatttttagatcacttattttccttaaccctactcaagttcaattagttcgtggcaatcctagatatacactaatgactcccgaggaagtgatcgggaattttgtgagctttgagttcatgatcaaaggctcaaggaagatcaacgaacttgatggtccctccacgtctgaagcacaaccggtcgcatttaaggcgatggaggagaagaaggaggagtctacatcgactagaacacccatcaatgcctccaagctcgacaacgaggaaatgtcgctcgtcatcaaaagcttccgccaaatcctcaagcaaaggagggggaaagattacaagcgccgctccaagaaagtttgctacaagtgtggtaagcccggtcattttattgcaaaatgtccattatctagtgatagtgacaggggcaacgacaaaaaggggagaaaaaaggaaaagaagaagtactacaagaaaaagggcggcgacgcccatgtatgccgcgagtgggactcggacgagagctcctctgactcctcctctgacgaggacgccgccaacatcgccatcaacaagggccttctcttccccaacgtcggccacaagtgcctcttggcaaagaacggcaaaaagaagaaggttaaatccaaatcctccactagatatgagtcctctagcgatgataatgctagtgatgaggaagataatttgcgtactctttttgccaacctaaacatgcaacaaaaagaaaagttaaatgaattaattagtgccatccatgagaaggatgacctcttggacacccaagaggacatcctaatcaaggaaaacaaaaagcatgttaaggttaaaaatgtttatgctctagaagttgaaaaatgtgagaaattaactagtgagctaagcacatgccatgatgttatcaacaaccttagaaatgaaaatgctagtttaattgctaaggttgattcaaatgcttgtgatgttccaattcccaatcttagaaatgataatgatgatttgcttgctaagattgaagaattgaacatatctctagctagccttagaaatgaaaatgaaaaattaattgctaaggctaaagattttgatgtttgcaatgctaccatttccgaccttagaagtaaaaatgatatattgcatgctaaggttgtagaattaaaatcttgcaaaccctctacatctaccattgaacatacttctatttgcactagatgtagagatgttgatattgatgctattcatgatcatatggtattaattaagcaacaaaatgatcatatagcaaaattagatgctaaaattgccgagcatgaacttgaaaatgaaaaatttaaatttgctcgtagtatgttttataacgggagacgccctggcattaaggatggcattggcttccaacagggaggcaatgtcaaacttaatgcccctcctaagaaattgtccaactttgtaaagggcaaggctcccatgcctcaagataacgagggttacattttgtaccctgtcggttatcctgagagcaaaattaggagaattcattccaggaagtctcactctggccctaaccatgcttttatgtataagggtgagacatctagttctaggcaaccaacccgtgctaagttgtctaagaagaaaacacctagggcatcaaatgattctaacatttcatttaagacctttgatgcatcatatgttttaactaacaaatccggcaacgtagttgccaagtatgttgggggcaaacacaagggatcaaagacttgtgtttgggtacccaaagttcttgtgtctaatgccaaaggacccaaaaccatttgggtttatgcatccgggggctcaagctgggtaatcgacagcgggtgcacaaaccacatgacaggggagaagaagatgttctcctcctacgagaaaaaccatgatccccaacgagctatcacattcggggatggaaatcaaggtgtcactgtctttagaagaagtgatgattcaatagcatttaagggagtgttagagggtcagctatacttagaaaaatctcatacccaagagaccttaaagggattcttgagacgagctcaaaatgagttcggcttaaggatcaagaaaattagaagcgacaacgggatggagttcaagaactcacaaatcgaaggcttccttgaggaggagggcatcaagcatgagttatcttctccctacactccacaacaaaatggtgtagtggagaggaagaatagaactctattggacatggccagaaccatgcttgatgtgttggattacggggaggctacgctagcgcaaaacaaaattttcaaccccataaaaccaagaactactgcggttataggtcatggaattaccactagacgcgcagagcagcggaagacgtctcgatgtagacgaacgcgtcgagcagtgccgtgcagtcatcgacgtccttcacgtcctcgcacggttcgtcctagtgctccagatgcagcacctccgaggtatccacacgtacagggaggaagcgccgcgtaccgaactgctaggttcgcgacggcggcttggcgagggcgagaggcgagcggctactcgtttgttggtggcaaattaggagtctttggtagcaaatgctttattcttgttaaaagaggtagaaaatctaaatttgctcctaagactgtagaaggctttttactaggatatgattcaaacacaagggcatatagagtctttaacaagtccactggacaagttgaagtttcttgtgacgttgtgtttgatgagactaacggctctcaaatagagcaagttgatcttgatgagataggtgatgaagaggctccgtgcatcgcgctaaggaacatgtccattggggatgtgtgtcctaagcaatacgaagagcctccaaatgcacaagatcaaccatcctcctccacgcaagcatctccatcaacccgaaatgaggatgaggctcaagttgatgaaggagaagaacaaagagatgagccacctaaagatgacgccaatgatcaagggggagatgcaaatgaccaagacaaggaggatgaggaaccaaggccgccacacccaagagtccaccaagcaatccaacgagatcaccccgttgacaccatcctcggcgacatccataaggggggtagaggaagcactgcaagattcggattgggtggtggcgatgcaagagagctcaacaacttcactaggaacgaggtatggcatttggttccacgtcctaatcaaaatgttgtaggaaccaagtgggtgttccgcaacaagcaagacgagcatggtgtggtgacaaggaacaaagcccgacttgtggccaagggatactcccaagtcgaaggtttggatttcggtgaaacctatgcacccgtagctaggcttgagtcaattcgtatattattggcctgtgctacttaccatggcttcaagctttatcaaatggacgtgaagagtgccttcctcaatggaccgatcaatgaagaggtctatgttgagcaacctcccagctttgaagaaagtgagtaccctaaccatgtctataaactctctaaggcgctttatgggctcaagcaagccccaagagcatggtatgaatgccttagagattttctcatcactaatggattcaaagtcggaaaggccgatcctacactctttaccaaaacacttgaaaatgatttgtttgtatgccaaatttatgttgatgatattatatttgggtctactaacgaatctacatgtgaagagtttagtaggatcatgacacaaaaattcgagatgtcaatgatgggggagttgaagtatttcttaggatttcaagtaaaacaactccaagagggcaccttcattagccaaacgaagtatactcaagacattctaaacaagtttgggatgaaggatgccaagcccatcaagacacccatgggaaccaatgagcatctcgacctcgacacagaagatattatgctttccgtatgcatgtgtgcaagattccaagccaaccctaaggaagctcaccttacggccgtaaaacgaaccttgagatatttagtttatactcctaagtttgggctttggtatcctaggggatccacttttgatttgattggttattcggatgccaattgggaggggtgtaagattaataaaaagagcacatcggggacttgccagttcttgggaagatccttggtgtcttgggcttcaaagaagcaaaattccgtcgctctttctaccgccgaagccgagtacattgccgcagactttggatga

SEQ ID NO: 4764 - DNA, 1314 bp, Zea mays
  Clone ID: TF_ZM4921.C4.o1.fg
atgtcgggagatcacgccaagaaggagatggagaccgacgacaagcccactacgagtcacgggagcacttcatcggaagagtcccgcaccaagaggaaggagaagaggaaggactcctccaaagggaagaagtcttcttcacactccaaagggaaggagaagaaatcctcttctcaccacaaagagaagaaggaaaaatcttcttcccacaagccgcatcggagtggggacaagaagaagaggatgaggaaggtggtctactacgagaccgattcttcatcaacatccacctccggctccgacgcggcatccgtcacttctaagcgccaagagcgcaagaagtatagggatgaagattatgatgaggatgaagtggcccaaatcgagcacttcaactcccaagccacaaccatactcctcgcctctctaagtaaggaggaatacaacaaggtgcaagggttgaagaatgcaaaggagatttgggacttactcaagaccgcgcacgagggtgatgaactcaccaagatcaccaagcgggaaacaatcgaaggggagctcggtcgcttccgtcttcgccaaggagaggagccacaagatatgtacaaccggctcaaaaccttggtgaaccaagtgcgcaacctcgggagcaagaaatgggatgatcacgaggtggttaaggttattttaagatcgcttattttccttaaccctactcaagtacaattaattcgtggcaacccaagatatacactaatgactcccgaggaagttatcgggaattttgtgagctttgaatgtatgatcaagggctcaaagaagatcaatgagcttgatgatccctccacgtccgaagcacaaccggtggcatttaaggcgacagaggaaaagaaggaggagtctgcaccgagtagacaaccaattgacgcctccaagctcgacaatgagaagatggctttaatcatcaaaagctttcgccaaatccacaagcaacggaaggggaaggattacaaatcccgttccaagaaggtttgctacaagtgtggtaagcccggtcactttattgctaaatgtccattatcaagtgacagtgatagggataacgacaagaagggcaagaggagagaaaagaagaggtaccacaagaagaggggaggcgatgcccacgtatgccgcgagtgggactccgacgagagctccaccgagtcctcctccgacgaggacgccgccaacatcgccgtcaccaagggactcctcttccccaacgtcggtcacaagtgcctcatggcaaatgacggcaaaaagaagaagccttag

SEQ ID NO: 4765 - DNA, 2763 bp, Zea mays
  Clone ID: TF_ZM4951.C1.o3.fg
atgtcgggagatcacgccaagaaggagatggagaccggcgaaaagcccactacaagccatgggagcacttcatcggaagagtcccgcaccaagaggaaggagaagaagaactcctccaaagggaaggagaagaagtcttcttcacaccaaaaggagaagaaggagaaatcctcttctcacaagacgcgtcggagtggggacaagaaaaagaggatgaggaaagtggtctactacgagaccgattcttcatcaacctccggctccgacgcggcatccgtcacttctaagcgccaagagcgcaagaagtatagtaagatccccctacgctaccctcgcatttctaaacatacacctttactttctgtcccattaggcaaaccaccaacttttgatggtgaagattatgctaggtggagtgatttaatgcgatttcatctaacctcactccacaaaagtatatgggatgttgttgagtttggtgcacaggtaccattcgtaggggatgaagactatgatgaggatgaggtggcccaaatcgagcacttcaactctcaagcaacaacaatactcctcgcctctctaagtagagaggagtataacaaagtgcaagggtggaagagcgccaaggaggtttgggatgtgctcaaaaccgcacacgaaggagatgagctcacaaagatcaccaagcgggagacgatcgagggggagcttggtcggttccggcttcgcaaaggggaggagccacaaaacatgtacaaccggctcaagaccttggtgaatcaagtgcgcaacctcgggagcaaaaagtgggatgaccacgaggtggttaaggttattctaagatctcttattttccttaaccctactcaagttcaattaatctgtggcaacccaagatatacactaatgacccccgaggaagtaatcgggaattttgtaagttttgagtgcatgatcgaaggctcgaggaagatcaacgagcttgatgaaccctccacgtccgaagcacaaccggtggcatttaaggcgacggaggagaagaaggaggagtctacaccgagtagacaaccaattgacgcctccaagctcgacaatgaggagatggccttaatcatcaaaagctttcgccaaatcctcaaacaacgaaaggggaaggactacaaatcccgttccaaaaaggtttgctacaagtgtggtaagcccggtcactttattgctaaatgtccattatcaagtgacagtgacagggacaacgacaagaagggaaagaggagagaaaagaagaggtactacaagaagaagggcggcgatgcccatgtttgccgggagtgggactcggacgagagctccaccgactcctcctccgacgaggacgccgccaacatcgtcgtcaccaagggactcctcttccccaacgtcggccacaagtgcctcatggcaaaggacggcaaaaagaaaaaggttaaatctaaatcttccactagatatgagtcctctagtgataataatgctagtgatgaggaagataatttgcgtaccctttttgccaaccttaacatggaacaaaaggaaaaattaaatgaattaattagtgctattcatgaaaaggatgaccttttggattctcaagaggacttcctaattaaggaaaataagaaacatgttaaggttaaaaatgcttatgctctagaaattgagaaatgtgaaaaactatctagtgagctaagcacttgccatgagacaatagacaaccttagaaatgaaaatgctaatttgttagctaaggttgattctcatgtttgtaatgtttcaattgccaattctagaaataatgatgatgatttacttgctaggattgaagaattgaacatttctcttgctagccttaggattgaaaatgaaaaattgcttgctaaggctaaagattttgatgtttgcaatgctactatttctgaccttataactaagaatgacatgttacatgctaaggttgtagaattaaaatcttgcaaacccgctacatctattgttgagcatgtatctatttgtactagatgtagagatgttgatattaatgctattcatgatcacatgtctttaattaaacaacaaaatgatcatatagcaaaattagatgctaaaattgccgagcataacttagaaaatgaaaattttaaatttgctagaagtatgctctatagtgggagacgccctggcatcaaggatgacattggcttccaaaagggagacaatgtcaaacttaatacccctcctaaaagattgtttaactttgttaagggcaaggctcccatgcctcaggataacgagggttacattttataccctgccggttatcctgaggacaaaattaggagaattcattctaggaagtctcactctggccctaaccatgcttttatgtataagggtgagacatctagttctaggcaaccaactcgtgctaagctgcctaagaagaaaactcctagtgcatcaaatgaacatagtgtttcatttaaaacttttgatgcatcttatgtgttgactaacaaatccggcaaagtagttgccaaatatgttgggggcaaacacaaggggtcaaagacttgtgtttgggtacccaaagttcttgtatctaatgccaaaggacccaaaaccatttgggtttatgcatccgggggctcaagttggatcatcgacagcgggtgcacaaaccacatgacaggggagaagaaaatgttctcctcctacgagaaaaactaa

SEQ ID NO: 4766 - DNA, 4236 bp, Zea mays
  Clone ID: TF_ZM4959.C2.o1.fg
atgtcgggagaacacgccaagaaggagatggagaccggcaaaaagcccactacaagccacgggaaggcttcatcggaagagtcccgcaaaaaggggaaagggaaggagaagaaagcctcttcccacaagtcgcatcagagtggcgacaagaaaaagaagatgaggaaggtggtctactacgagaccgatacttcatcaccttccacctccgactccgacgcgccctccgtaacttctaagcgccatgagcgcaagaagtttagtaagattcccttacactaccctcgcacctctagacatactccattactttccattccattaggcaaaccgccaacctttgacggtgaagattatgctaggtggagtgatttaatgaaatttcatctaacctcactccacaaaagtatatggaatgttgttgagtttggagcacaggtaccatccgtaaaggatgaggattatgatgaagacgaggtggcccaaatcgagcacttcaactcccaagccacaaccatactcctcgcttctctaagtagggaggagtacaacaaggtgcaaggattaaagagcgccaaggaagtttgggacgtgctcaagaccgcgcacgagggtgatgaactaaccaagatcaccaagcaggaaacgatcaagggggagctcggtcgcttccgtcttcgccaaggggaggagccacaagacatgtacaaccggctcaaaaccttagtgaatcaagtgcgcaacctcgggagcaagaaatgggatgaccacgagatggttaaggttattctaagatcacttattttccttaaccctactcaagtacaattaattcgcggtaatcctagatatacactaatgactcccgaggaagtaatcgggaattttgtgagctttgagtttatgatcaagggctcacggaagatcaacgagcttgacggtccctccacgtccgaagcacaaccagtcgcattcaaggcgacggaggagaagaaggaggagtctacaccaagtagaacacccatcgacgcctccaagctcgacaacgaggaaatggcgcttgtcatcaaaagcttccgccaaatcctcaagcaaaggagggggaaagattacaagccccgcttcaagaaagtgtgctacaaatgtggtaagcccggtcattttatcgcaaaatgtccattatctagtgatagtgacaggggcgacgacaagaaggggagaagaaaggaaaagaagaaatactacaagaagaagggtggcgacgcccatatatgccgcgagtgggactcggacgagagctcctacgactcctctgacgaggacgccgccaacatcgccatcaacaagggccttctatttcccaacgtcggccacaagtgcctcatggcaaaggacggcaaaaggaagaaggttaaatctaaatcctccattagatatgagtcctctagtgatgataatgctagtgatgaggaagataatttgcgtactctttttgccaacctaaacatgcaacaaaaagaaaagttaaatgaattaattagtgccatccatgagaaggatgacctcttggacacccaagaggactttctaatcaaggaaaacgaaaagcatgttaaggttaaaaatgcttatgctctagaagttgaaaaatgtgaaaaattatctagtgagctaagcacctgccatgagactatagacaaccttagaattgaaaatgctaatttgttagctaaggttgactcaaatgtttgtaatgtttcaattcccaatcttagaaatgataatgatgatttgcttgctaagattgaagaattgaacatatctcttgctagccttggagttgagaatgaaaaattgcttgctaaggctaaagatttttatgtttgcaatgttaccatttccgaccttagaagtaaaaatgatatattgcatgctaaggttgtagaattaaaatcttgcaaaccatctacatctaccgtcgagcacacttctatttgtactagatgtagagatgttgatgttaatgctattcatgatcacatggctttaattaaacaacaaaattatcatatagcaaaattagatgctaaaattgccgagcatgaacttgaaaatgaaaaatttaaatttgctcgtagtatgctttatagtgggagacgccctggcatcaaggatggcattggcttccaaaagggggacaatgtcaaaattaatgcccctcctaagaaattatctaactttgttaagggcaaggctaccatgcctcaagataacgagggttacattttgtaccctgtcggttatcctgagagcaaaattaggagaattcattctaggaaatctcactctggccctaaccatgcttttatgtataagggtgagacatctagttctagccaaccaactcgtgctaagttgcctaataagaaaactcctagtgcatcaaatgatcatggcatttcatttaagacctttgatgcatcatatgtgttaactaacaaatccggcaaggtttatgcatccgggggctcaagttggatcatcgacagcgggtgcacaaaccacacgactggggagaagaaaatgttctcctcctatgagaaaaaccaagatccccaacgagctatcacattcggggatggaaatcaaggtttggtcaaaggattagattcattagattacaatttgctttccgtttcacaattatgtcaaatgggctacaactgtctttttactgaggaaaaatctcatacccaagaaaccttaaagggattcttgagacgggctcaaaacgagttcggcttaaggatcaagaaaattagaagcgacaacgggacggagttcaagaactctcaaattgaaggcttccttgaggaggagggcatcaagcatgaattatcttctccctacacgccacaacaaaatggtgtagtggagaggaagaatagaactctattagacatggcaagaaccatgcttgatgagtacaagacttcggatcgattttgggccgaggcggtcaacactgcctgctatgccatcaaccggttgtatctacaccaaatcctcaagaagtcatcatacgaactcctaaccgagcaagttgatcttgatgagataggtgatgaagaggctccgtgcatcgtgctaaggaacatgtccattggggatgtatgtcctaaggaatccgaagagcctccaaatgcacaagatcaaccatcctcctccacgcaagcatctccaccaactcaaaatgaggatgaggctcaagttgatgaagaagaagatcaaacaaatgagccacctcaagatgacgacaatgatcaagggggagatgcaaatgatcaagaaaaggaggatgaagaaccaaggccgccacacccaagaccacacaaggtagaagaagcacttcaagattcggattgggtggtggtgatgcaagaggagctcaacaacttcactaggaacgaggtatggcatttagttccacgtcctaatcaaaatgttgtaggaaccaaatgggttttccacaacaagcaagacgagcatggtgtggtgacaaggaacaaagctcgacttgtggccaaaggatactcccaagtcgaaggtttggatttcggtgaaacctatgcacccgtagctaggcttgagtcaattcacatattattagcctatgctacttaccatggcttcaagctttaccaaatggacgtgaagagtgccttcctcaatggaccgatcaaggaagaggtctatgttgagcaacctcccggctttgaagatagtgagtaccctaaccatgtttataaactctctaaggcgctttatgggctcaagcaagccccaagagcatggtatgaatgccttagagatttccttatagataatggcttcaaagtcggaaaggccgatcctacgctcttcactaaaacacttgaaaatgatttgtttgtatgccaaatttatgttgatgagattatatttggatctactaacgaatctacatgtgaagagtttagtaggatcatgacacaaaaattcgagatgtctatgatgggggagttgaagtacttcttaggatttcaagtgaagcaactccatgagggcaccttcattagccaaacgaagtatactcaagacattttaaacaagtttgggatgaaggatgccaaacccatcaagacacccatgggaaccaatgggcatctcgacctcgacacggaagggagaaagtag

SEQ ID NO: 4767 - DNA, 4038 bp, Zea mays
  Clone ID: TF_ZM4989.C5.o1.fg
atgtcgggagcatccgccaagaaggagatcggaaccggcgacaagtccgcaagctcggggagaacacactcaagggagtccgcccacaagcacaaggaggaatcctcttcctccatcaagtcccaatggaagggtgacaagaagaagaagatgaagaaggtggtctactacgagaccgactcttcgtcaccctccacctccggcaaaccacttatgcttgatggtgaagattattctatgtggagtgataaaatgaggcatcatctaacctcactccacaaaagcatatgggatatttttgagtatggagcgcaggtacaaaaggaaggggacaaggattatgattcggaggaggtcgaacaaatccaacacttcaactcccaagccactactatactcctcgcctctctaagtcgagaggagtataataaggtgcaaggattgaagagcgcaaaggagatttgggatgtgctcaagaccacgcacgaaggagacgaggtgaccaagatcaccaagagggagacgatcgagggggagctcggtcgattcatgcttcaccaaggggaggagccacaagcgatgtacaaccggctcaagaccttgatgaaccaagtgcacaacctcgggagcaccaaatgggatgaccatgagatgatcaaggttattcttagatcactcgtttttcttaaccctacacaagttcaattaattcgtggtgatccaaggtataaactaatgtctcccgaggaagtgataggaaagtttgtgagctttgaattgatgatcaaaggctccaagaaaatcatcgagcaaggcgccacctcaacacctgaggtgcaacccgtcgcattcaaggcgacggaagaagaaaagaaggattctacaccaagtaggattcccatcgacgcctccaagctcgacaacgaggaaatgacgctcatcatcaagagcttccgccaaatcctcaagcaaaggagggggaaggattacaaacccagctctaagaaggtttgctacaaatgtggtaagcccggtcattttattgcaaaatgtccattatcaagtgattgtgacaggggcgatgacaagaagggaaagagaagagaaaagaagaggtactacaaaaagaagggcggcgatactcatgtttgccgggagtgggactccgacgagagctccatcgacttctcctccgacgaggacgccacaaacatcgccgtcaccaaagggcttctcttccccaacgtcggccacaaccaagaggacttccttattaaagaaaacaaaaagcatgttaaggttaaaaatgcttatgctctggaggtagaaaaatgtgaaaaattaactagtgagctaagcacttgccatgacactaattccaaccttagaattgagaatgctaatttgattgctaaggttgagaagtcaaatatttgtgatgattcaattgtcaatcttagaaatgataatgctagttcaattgctaagattgaaaaattgaatgcctctcttgctagccttagaaatgagaatgaaaagttaattgctaaggctaaagacttagatgtttgcaatgtttctatttccaatcttagagatgagaacactattttacatgctaagattgttgaactaaaaacttgcaaaccctctacatctaccattgagcatgttacaatttgtactagatgtagagacattaatgttgatgctattcatgatcacttagctttaattaagaaacaaaacgatcacatagctcaacttagtgccaaaattaatgagcatgacttagagaatgaaaaaattaaatttgctagaagcatgcttatagtgggagacgccctggcattaaggatggcattggctttcaacagggagacaatgtcaagcttaatgcccctcctaaaagattgtctaattttgttaagggcaaggctcccatgcctcaggataacgagggttacattttataccctgccggttatcccgagcacaaaattaggagaattcactctagaaagtctcactctggctctcatcatgcttttatgtataagagaaaaatcacaaacccaagagacattgaaggaattcttgagacaggctcaaaatgagttcggcttaaggataaaaaagataagaagcgacaacggaacggagttcaagaactcacaaatagaaggcttccttgaggaggagggcatcaagcatgagttctcttctccctacacgccacaacaaaatggtgtagtggagaggaagaatagaactctattagacatggaaaggaccatgcttgatgagtacaagacttcggatcggttttgggccgaggcggtcaacaccgcttgctacgccatcaaccgagtctttggtagcaaatgctttattcttgttaaaagaggtagaaaaactaaatttgctcctaaggttgtagaaggctttttacttggttatgattcaaacacaagggcatatagagtctttaacaagtccactggactagttgaagtttcttgtgacattgtgtttgatgagactaacggctctcaagtagagcaagttgatcttgatgagctagatgatgaagaggctccatgcgtcgcgctaaggaacatgtccattggggatgtgtgtcctaaggaatccgaagagcctccacatgcacaagatcaaccatcttcctccatgcaagcatctccaccaactcaagacgaggatgggtctcaagatgatgaaggagaagatcaagaagatgagccacctcaagaagacgacaatgatcaaggggagatgcaaatgatcaagacaaggaagatgaacaagatccaagaccgccacacccaagagtccaccaagcaatccaacaagatcaccccggtagaggaagcacttcaagatttggattgggtgttggcgatgcaagaggatctcaacaacttcacgaggaatgaggtatggcatttagttccacgtcctaaccaaaatgttatagaaaccaagtgggtcttccacaacaagcaagatgagcatggtgtggtgacaagaaacaaagcccgacttgtggccaagggatattcacaagtcgaaggtttggattttggtgaaacctatgcacccatagctaggcttgagtcaatttgtatattacttgcctatgctacttaccatggcttcaagctttatcaaatggacgtgaagagtgccttcctcaatggaccaatcaaggaagaggtctatgttgggcaacctcccggctttgaagatagtgagtatcctaaccatgtctacaaactctctaaggtgctttatgggctcaagcaagccccgagagcatggtatgaatgcctaagagattttcttatcactaatagcttcaaagtcggcaaggccgatcctactctctttactaaaactattgaaaatgatttgtttgtgtgccaaatttatgttgatgatatcatatttgggtctactaacaaatctatttgtgaagagtttagtaggatcatgactcaaaaattcgagatgtcaatgatgggggagttgaagtatttcttaggattccaagtcaagcaactccaagaaggcaccttcattagccaaacgaagtacattcaagatattcttaccaagtttgggatgaaggatgctaaacccatcaagacacccatgggaactaatgggcatctcgacctcgacacgggagcgtgtaagattgatagaaagagcacatcagggacttgtcagttattgggaagatccctggtgtcttgggcttctaagaaacaaaattctgtagctctttctaccgccgaagccgagtatattgccgcaggccattgttgcgcgcaattgctttggataaggcaaactcatagggattatggttacaaattaaccaaagtccctctcctatgtgataatgagagtgcaatccgcatggcggataatcccgttgagcatagccgcactaaacacatagtcattcggtatcactttttgagggatcaccaacaacgggggatatcgtga

SEQ ID NO: 4768 - DNA, 1338 bp, Zea mays
  Clone ID: TF_ZM4997.C1.o12.fg
atgttgggagatcacgccaagaaggagttggagaccagcgacaagcccactacaagccacgggaaagcttcatcggaagagtcccgaaacaaggggaaggggaaggagaagaaatcctcttcccacaagtcgcatcagagtggcgacaagaaaaagaagatgaggaaggtaccattcgtaggggatgaggattatgatgaggacgaggtggcccaaattgagcacttcaactcccaagccacaactatactcctcgcctctctaagtcgagaggagtataacaaggtgcaaggattaaagagcgccaaggaagtttgggacgtgctcaagaccgcgcacgaaggagatgagctaaccaagatcaccaaacgggagacgatcgagggggagctcggtcgcttccgtcttcgccaaggggaggagccacaagacatgtacaaccggctcaaaaccttggtgaatcaagtgcgcaacctcgggagcaaaaaatgggatgaccacgaaatggttaaggttattctaagatcacttattttccttaaccctactcaagttcaattgattcgtggcaatcctagatatacactaatgactcccgaggaagtgatcgggaattttgtgagctttgagttcatgatcaaaggctcaagaaagatcaacgagcttgatggtccctccacgtccgaagcacaactggtcacatttaaggcgacggaggagaagaaggaggagtctacatcgagtagaacacccatcgacgcctccaagctcaacaacgaggaaatggcactcgtcatcaagagcttccgccaaatcatcaagcaaaggagggggaaagattacaagccccgctccaagaaagtttgctacaaatgtggtaagcccggtcattttattgcaaaatgtccactatctagtgacagtgacaggggcgacgacaagaaggggagaagaaaggagaagaagaggtactacaaaaagaagggcggtgatgcccatgtttgtcgcgagtgggactccgacaaaagctctagcgactcctcctccgacgaggacgccgccaacatcgccgtcaccaagggacttctcttccccaacgtcggccacaagtgcctcatggcaaaggacggcaaaaagaagaaggtttatgcatccgggggctcaagttggatcatcgatagcgggtgcacaaaccacatgacaggggagaataagatgttctcctcctacgagaaaaaccaagatccccaacgagctatcacattcggggatggaaatcaaggaaaaatctcatacccaagagaccttaaagggatacttaagacgagctcaaaatga

SEQ ID NO: 4769 - DNA, 6150 bp, Zea mays
  Clone ID: TF_ZM5031.C1.o8.fg
atgggcgcattggtaaggagtgcctttaagtttccgagggcttcctcggcctcgggggtccaagtgaagcgctcggccttcctcaagaggcggtacaagggcaatcctctctcgccaaggcgcgagatgaagcggctcagagccgcaaggcatccgatgaccctttgtactccctttaaatctttgatgggtcccatgttggtgatggctgcgattttctccgggttggcctcgatgcctcgttcggagacgatgaaccccaggagcatgcctcaggggacttcgaagacgcacttctcgagattgagtttcaatccttttgcacgcaggcacccgaaagttacttcgaggtcggagaggaggtgctgcttcacgggtcgggcaccggctcggatatccagcgagtgctcggcgacatccctcggtatgccgggcatgtccgagggactccacgcaaaaaatttaggcgtttgcgcggaggaagtcgacgagcactacttcctatttggggtcgagcttggagccgaccctgacgtgcttgcaggtgtcgttgctggggtcgagggcgacggtcttaaccgcctcggccggttcgaagttgccggtgtggcgcttcgcatcaggcgcctccttggagaggcaatccaggtcggcgatgagggcctcggactcggcgatgtcctcagcgtactccacgcattccacgtcgcactcgtaagcgtggcgtttgctctagattatgagttctacaggtgccaaagtgagaagaccgctacaagccacgggaaggctccatcgagtgagtccgccaacaagaagaaggatggatccccttcacgcattcgatcgcacaagagtggcgagaagaagaagaaaatgaagaaagtggtctactacgagaccgactcttcctcgccctctacatccggatctgacgccacgtccgtcacttctaagcgccaagagcgcaagaagtatagtaagatccccttacgctatcctcgcattcctaagcatattccattactttccgtcccattaggcaaaccaccgacgtttgacagtgaagattattctaggtggagtgatatgatgagatatcacctaacctcactccacaaaagcatatgggatgttgttgagtttggtgtacaggtaccatccgtaggggatgaagattacgatgaggacgaggtggcccaaatcgagcacttcaactctcaagccaccactatactcctcacctctctaagtcgagaggagtataacaaggtgcaagggttgaagagcgccaaagagatttgggacatgctcaaaaccgcgcacgaaggagacgaggtgaccaaaatcaccaagcgggagacgatcgagggggagctcagtcgcttcaggcttcgccaaggggaggagccacaagagatgtacaaccggctcaagaccttggtgaaccaagtgcgcaacctcaggagcaccaaatgggatgaccatgaaatggtcaaggaagtaataggaaaatttgtgagctttgagttgatgatcaaaggctcaaataaaatcatcgagcaagatgcctcctccacacccgaagcacaaccggtcgcattcaatgcaacagaggagaagaaggaagagtctacatcaagtagactccccattgacgcctccaagctcgacaatgaggagatggcgctcatcatcaagagcttctaccaaatcctcaagcaaaggagggggaaggactacaaatcccgctccaagaaagtgtgctacaagtgtggtaagcccggtcactttattgcaaaatgtccattatcaagtgacagtgacagggataacgacaagaagggcaagagaagagaaaataataggtatcacaagaagaagggcggcgatgcccatgtgtgccgcgagtggaactccgacgagagctccaccgactcctcctccgacgaggacgccgctaacatcaccgtcaccaaaggactcctcttccccaacgtcggccacaagtgcctcatggcaaaggacgacaaaaggaagaaggtaaaatcaagatcctccactaaatatgcatcctctagtgatgaggataactctagtgacaaggaggataatttgtgcaccctttttgccaacctaaacatgcaacaaaaagaaaagttaaatgaattaattattgttattcatgagaaggatgaactcttggacacccaagaggacttcctaattaaggaaaataagaagcatgttaaggttaagaatgctaatgctctagaggtagaaaaatgtgaaaaattatctagtgagctaagcacgtgccatgatattattaccaaccttagaaataagaatgctagattaattgctaagattgattcaaatgtttgtgatgattcaatttccaatcttagagatgataatgttagtttacttgctaagattgaagaattgaatgtatctcttgctagccttagaaatgagaacgaaaaattaattgctaagactaaagacttagatgtttgcaatgctaacatttccaatcttagaagtgaaaatgacattttacatgctaagattgttgaactaaaatcttgcaaaccctctacatctaccgttgagcatgtttctatttgcactagatgtagagacattaatgttgatgctattcatgatcacctagctttaattaagaaacaaaatgatcacatagctcaacttaatgccaaaattaatgagcatgacttagaaaatgaaaattttaaatttgctagaagcatgctctatagtgggagacgccctggcatcaaggatggcattggcttccaaaagggagacaatgtcaaacttaatgcccctcctaaaaaattgtctaactttgttaagggcaaggctcccatggctcaggataacgagggttacattttgtaccctgccgattatcccgagcacaagattaggagaattcactatatgaagtttcactctggctctaaccatgcttttatgtataagagtgagacatctagttctaggcaatcaacccgtgctaaattgcctaagaagaaaactcctattgcatcaaatgaaactagtatttcatttaaaacatttgatgcatcttatgttttaactaacaaatccggcaagatagttgccaaatatattgggggcaaacacaagggatcaaagacttgtgtttgggtacccaaagttcttgtatctaatgtcaaaggacccaaaaccatttgggtttatgcatccgggggctcaagttggatcatcgacagcgggtgcacaaaccatatgacaggggagaagaagatgttctcctcctacgagaaaaaccaagatccccaacgagctatcacattcggggatggaaatcaagatttggtcaaaggattgggtaaaattgttatatctcctgaccattccatttccaatgtttttcttgtagattttttagactacaacttcctttcagtttcgcaattatgtaaaatgggttacaactgtctttttacggatataggtgttaatgtctttagaagaagtgatgattcagttgcatttaagggagtgttagagggtcagctatacttagtagattttgatagagctgaactcgacacttgcttaattgctacgactaacatgggctggctctggcatcgccgactagcacatgttggaatgaagaatcttcacaagcttctaaagggagaacacattttgggactaacaaatgttcattttgagaaagacatgatttgtagcgcatgtcaggcagggaagcaagttggtgttcatcatccgcacaaaaacatcatgacgactgacaggccactcgagctcctacacatggacctattcggcccgatagcttacataagcatcgacgagagtaagtactgtctagttattgtggatgattattctcgcttcacttgggtattctttttgcaggaaaaatctcacacccaagaaactttgaaaggattcttgagacgggctcaaaatgagttcggcttgaggatcaagaagataagaagcgacaacgggacagagttcaagaactctcaaatcgaaggcttccttgaggaggagggcatcaagcatgagttctcttctccctacaccccacaacaaaatggtgtagtggagaggaagaatagaactctattggacatggcaaggaccatgcttgatgagtacaagacttcagatcggttttgggccgaggcggtcaacaccgcttgctacgccatcaaccggttgtatctacaccgaatcctcaagaagacatcgtatgaactcctaaccggtaaaaagccaaatatttcatattttagagtctttggtagcaaatgctttattctggttaaaagaggtagaaaatccaaatttgctcctaaggctgtaaaaggctttttactaggttatgattcaaacacaagggcatatagagtctttaacaagtcctctggactagttgaagtttcttgtgacattgtgtttgatgagactaacggctctcaagtagagcaagttgatcttgatgagctagataatgaagaggctccgtgcgtcgcgctaaggaacatgtccattggggatgtgtgtcctaaggaatctgaagagcctccaaatacaaaagatcaacaatcttcctccatgcaagcatctccaccaactcaagatgaggatgaggttcaagatgatgaaggagaagatcaagaagatgagccacctcaagaggagagcaatgatcaagggggagatgcccatgatcaagatgaggaagatgaacaagttccaaaaccgccacacccaagagtccaccaagcaattcaacgagatcaccccgtgaacaccatcctcggcgatattcaaaagggggtaactactcgatctcgtgttgctcatttttgtgaacattactcttttgtttcctctattgagccacacaaggtagaggaagcacttcaaggaaccaagtggttcttccgcaacaagcaagatgagcatggtgtggtgacaaggaacaaagcccgacttgtggccaagggatattcacaagtcgaaggtttggatttcggtgaaacctatgcacccgtagctaggctagaatcaattcgcattttacttgcctatgctacttaccatggcttcaagctttaccaaatggacgtgaagagtgccttcctcaatggaccaatcaaggaggaggtctatgttgagcaacctcccggctttgaagatagtgagtatcctaaccatgtatataaactctctaaggcgctttatgggctcaagcaagccccaagagcatggtatgaatgcctaagagactttcttatcactaatggcttcaaagtcggaaagaccgatcctactctatttactaaaacacttgcaaatgatttgtttgtatgccaaatttatgttgatgatattatatttgggtctactaacgaatctacatgtgaggaatttagtaggatcatgacacagaaattcgagatgtctatgatgggggagttgaagtacttcttaggatttcaagtgaagcaactccaaaagggcacctttattagccaaacaaagtatattcaagacattctaaacaagtttgggatgaaggatgccaagcccatcaagacacccatgggaaccaataggcatctcgacctcgacacgggagggtgtaaaattaatagaaagagcacatcggggacttgccaattcttgggaaggtctctggtgtcttgggcttcaaagaagcaaaattccgtagctctttctaccgccgaagccgagtatattgccgtaggccattgttgcgtgcaattgctttggatgaggcaaacccttagggactatggttacaaattaaccaaagttcctcttctatgtgataatgagagtgcaatccgcatggcggataatcccgttgaacatagccgcactaaacacatagccattcggtatcattttctaagggatcaccaacaaaagggggatatcgagattgcatatattaacaccaaagaacaattagccgatatctttaccaagccactagatgaacaaacatttaacaaacttaggcatgagctaaatattcttgattctcggaatttcttttga

SEQ ID NO: 4770 - DNA, 2859 bp, Zea mays
  Clone ID: TF_ZM5031.C3.o1.fg
atgtcgggagatcacgccaagaaggagatggagaccggcgaaaagcccactacaaaccacgggagcacttcatcggaagagtcccgcaccaagaggaaggagaagaagaagatctcctccaacaaagggaaggagaagaaatcttcttctcaccacaaagagaagaaggaaaaatcttcttcccacaagccgcgtcggagtggggacaagcaaaagaggatgaggaaggtggtctactacgagaccgacacttcatcaacatcaacctccgactccgatgcaccctccgtaacttctaaacgccaagagcgtaagaagtttagtaagatccccctacactaccctcgcatttctaaacatgcacctttactttccgtcccattaggcaaaccaccaacttttgatggtgaagattatgctaggtggagtgatttaatgcgatttcatctaacctcactccacaaaagtatatgggatgttgttgagtttggtacacaggtaccatccgtaggggacaaggattatgatgaggatgaggtggcccaaatcgagcacttcaactctcaagcgacaacaatactcctcgcctctttaagtagagaggagtataacaaagtgcaagggttgaagagcgccaaggaggtttgggatgtgctcaaaaccgcgcacgaaggagatgagctcaccaagatcaccaagcgggaaacgatcgagggggagctcggtcggttccggcttcgcaaaggggaagagccgcaacacatgtacaaccggctcaagaccttggtgaaccaagtgcgcaacctcgggagcgtaaagtgggatgaccacgaagtggttaaggttattctaagatctcttattttccttaaccctactcaagttcaattaattcgtggtaatcgtagatatactaaaatgacccccgaggaagtaatcgggcattttgtaagttttgagtgcatgatcgaaggctcgaggaagatcaacgagcttgatgatccatctacatccgtggctcaacccgtcgcattcaaggcgatggaagaaaagaaggaggagtctaccccaagtcgacaaccaatagacgcctccaagctcgacaatgaggaaatggcgctcgtcatcaagagcttccgccaaatcctcaagcaaaggagagggaaagactacaagtcccgctccaagaaagtttgctacaagtgtggtaagcccggtcactttattgctaaatgtccattgtcaagtgacagtgacagggataacgacaagaagggcaagaggagagaaaagaagaggtactacaaaaagaagggcggcgatgcccatgtttgtcgggaatgggattccgacgaaagctcaagcgactcctccgacgacgaggacgccgccaacatcgccgtcaccaagggactcctcttccccaacgtcggccacaagtgcctcatggcaaaggacggcaaacggaaaaaggttaaatctaactcgtccactaaatatgaatcttctagtgatgataatgctagtgatgaggaggataatttgcgttccctttttgccaaccttaacatagctcaaaaggaaaaattaaatgaattagttagtgctattcatgaaaaggatgaccttttggattcccaagaggattgtctaattaaagaaaacaagaaacatgttaaggttaaaaatgcttatgctctagaaattgagaaatgtgaaaaattatctagtgagctaagcacttgccgtgagatgattgacaaccttaggaatgaaaatgctagtttaaatgctaaggttgattcacatatttgtaatgtttcaattctcaatcctaaagataataatgataatctgcttgctaggattgaagaattaaacatttctcttgctagccttagagtagaaaatgaaaatttaattgctaaggctaaagaactagatgtttgcaatgctatcatttccaatcttagagataaaaatgatattcttcatgctaagattgttgaacttaattcctgcataccctctacatctattgttgagcatgtatctatttgtactagatgtagagatgttgatgttaatgctattcatgatcatatggctttaattaaacaacaaaatgatcatatagcaaaactagatgctaaaattgccgagcacaacttggaaaatgaaaaatttaaatttgctcgtagcatgctttataatgggagacgcccgggcattaaggatggcattggcttccaaaggggagacaatgtcaaaattagtgcccctcctaagagattgtccaactttgttaagggcaaggctcccatgcctcaggataacgagggttacattttataccctgccggttatcccgagagcaagattaggagaattcactctaggaagtctcactctggccctaatcatgcttttatgtataagggtgagacatctagttctaggcaaccaacccgtgctaagttgcctaagaaaactcctactgcatcaaatgaacataatctttcatttaaaacttttgatgcatcttatgtgttaactaacaaatccggcaaggtttatgcatccgggggctcaagttggatactcgacagcgggtgcacaaaccacatgacaggggagaaaaggatgttctcctcatatgagaaaaaccaagatccccaaagagcgatcacattcggggatggaaatcaaggtttggtcaaagattacaacttgctttctgtatcccaattatgtcaaatgggctacaactgtctattcactgatgttggtgtcactgtctttagaagaagtgatgattcaatagcatttaagggaatgttagagggtcagctatacttg

SEQ ID NO: 4771 - DNA, 2673 bp, Zea mays
  Clone ID: TF_ZM5043.C3.o2.fg
atgtcgggagatcacgccaagaaggagatggagaccggcgaaaagcccactacaagccacgggagcacttcatcggaagagtcccgcaccaagaggaaggagaagaagaagagctcctccaacaaagggaaggagaagaaatcttcttctcaccacaaagagatgaaggagagatcttcctctcacaagccgcatcggagtggggacaagaagaaaaggatgaggaaggtggtctactacgagaccgattcttcatcggcatccacctccggctccgacgcggcatccatcacttctaagcgccaagagcgcaagaagtatagtaagatccccctacactaccctcgcatttccaaacatacacctttgctttccgtcccattaggcaaaccaccaacttttgatggtgaagattatgctaggtggagtgatttaatgcgatttcatctaacctcacttcacaaaagtatatgggatgttgttgagtttggtgcacaggtaccatccataggggataaagattatgatgaggatgaggtggcccaaatcgagcacttcaactctcaagcgacaacaatactcctcgcctctttaagtagagaggagtataacaaagttcaaggattgaagagcgccaaggaggtttgggatgtgctcaaaaccgcgcacgagggagatgagctcacaaagatcaccaagcgggaaacgatcgagggggagctcggtaggttccggcttcgcaaaggggaagagccacaacacatgtacagccggctcaagaccttggtgaaccaagtgcgcaacctcgggagcaagaagtgggacgaccatgaaatggttaaggttattctaagatctctcattttccttaaccccactcaagttcaattaattcgtggtaatcctagatatactaaaatgacccccgaggaagttatcgggaattttgtaagttttgagtgcatgatcgaaggctcaaggaagatcaacgaacttgatgatccctccacatccgaagctcaacccgtcgcattcaaggcgacggaagaaaagaaggaggagtctacaccaagtaggcaaccaatcgacgcctccaagctcgacaatgaggaaatggcgctcgtcatcaagagcttccgccaaatcctcaagcaaaggagagggaaagactacaagtcccgctccaagaaagtttgctacaagtgtggtaagcccggtcactttattgcaaaatgtccattatcaagtgacagtgacagggataacgacaagaagggcaagaggagagaaaagaagaggtactacaagaagaagggcggcgatgcccatgtttgtcgggagtgggactccgacgaaagctctagcgactcctcctccgacgaggacgccgccaacatcgtcgtcaccaagggacttctcttccccaacgtcggccacaagtgcctcatggcaaaggacggcaaaaggaagaaggatggccttttggattctcaagaggatctcctaattaaggaaaacaagaaacatgttaaggttaaaaatgcttatgctctagaaattgagaaatgtgaaaaattatcgagtgagctaagcacttgtcgtgagatgattgacaaccttaggaatgaaaatgctagtttaaatgctaaggttgattcacatgtttgtaatgtttcaattccccatcctagagataataatgatgatttgcttgctaggattgaagaattaaacatttctcttgctagccttaggagtgaaaatgagaaattaattactaaggcaaaagattttgatgtttgcaaagttacaatttccgatcttagagataagaatgatatactacatgctaagattgttgaacttaattcttgcaaaccctctacatctaccattgagcatgtcactatttgtactagatgtagagatattgatgttgatgctattcatgatcacatgattttaattaagcaacaaaatgatcatatagctaaactagatgctaaaattgccgagcacaacttagagaatgagaaatttaaatttgctcgtagcatgctttataatgggagacgccctggcattaaggatggcattggcttccaaaggggagacaatgtcaaaattagtgcccctcctaaaagattgtcaaattttgttaagggcaaggctcccatgcctcaggataacgagggttacattttataccctgccggttatcccgaggacaaaattaggaaaattcattctaggaagtctcactctggttctaaccatgcttttatgtataagagtgagacatctagttctaggcaaccaacccgtgctaagttgcctaagaagaaaattcctattgcatcaaatgatcataatatttcttttaaaacttttgatgcatcttatgttttgactaacaaatccggcaaggtttatgcatccgggggctcaagttggatactcgacagcgggtgcacaaaccacatgacaggggagaagaagatgttctcctcatatgagaaaaaccaagatccccaacgagcgatcacattcggggatggaaatcaagattctttagattacaacttgctttccgtttcacaattatgtcaaatgggctacaactgtctattcactgatgtaggtgtcactgatagtcgcctagagggggggtga

SEQ ID NO: 4772 - DNA, 1923 bp, Zea mays
  Clone ID: TF_ZM5107.C1.o2.fg
atgtcgggagatcacgccaagaaggagatagagaccggcgaaaagcccactacaagccacgagagcacttcatcggaaaagtcccgcaccaagaggaaggagaagaagaaggactcctccaaagggaaggagaagagatcttcttcacaccacaaagagaaaaaggagaaatcctcttctcacaagccgcatcggagtggggacaagaaaaagaggatgaggaaagtggtctactacgagaccgattcttcatcggcatccacctccggctccgacgcggcgtccgtcacttctaagcgccaagagcgcaagaagtatagtaagattcccctacgctaccctcgcatttctaaacatacacctttactttccgtcccattaggcaaaccaccaacttttgatggtgaagattacgctaggtggagtgatttaatgcaatttcatctaacctcgctccacaaaagtatatgggatgttgttgagtttggtgcacaggtaccattcgtaggggatgaaaactatgatgaagatgaagtagcccaaatcgagcacttcaactcccaagccacaaccatactcctcgcctctctaagtagagaggaatataacaaggtgcaagggttgaagaatgcgaaggagatttgggatctactcaagaccgcgcacgagggtgatgaactcaccaagatcaccaagcgggaaacgatcgagggggagctcggtcgcttccgtcttcgccaaggggaggagccacaagatatgtacaaccggctcaaaaccttggtgaaccaagtgcgcaacctcgggagcaagaaatgggatgaccacgaggtggttaaggttattcttagatcactcatcttccttaaccccactcaagttcaattaattcgtggtaatcctagatacactctaatgactcccgaggaagttatcgggaattttgtgagctttgaatgtatgatcaagggctcaaagaagatcaacgagcttgatgatccctccacatccgaagcacaaccggtggcattcaaggcgacggaggagaagaaggaggagtctacactaagtagacaaccaatcgacgcttcaaagctcgacaacgaggagatggctttaatcattaaaagctttcgccaaatcctcaagcaacggaaggggaaggattacaaatcccgttccaagaaggtttgctacaagtgtggtaagcccggtcactttattgctaaatgtccattatcaagtgacagtgacagggataacgacaagaagggcaagaggagagaaaagaagaggtaccacaagaagaggggcggcgatgcccacgtgtgccgcgagtgggactccgacgagagctccatcgactcctccgacgacgaggacgccgccaacatcgccgtcaccaagggactcctcttccccaacgtcggccacaagtgcctcatggcaaaggacggcaagaggaagaaggttaaatccaaatcatccactaaatatgagtcttctagtgatgataatgctagtgatgaggaggataacttgcgtaccctttttgccaaccttaacatagaacaaaaggaaaaattaaataaattaattagtgctattcatgaaaaggatgaccttttggattcccaagaggacttcctaattaaggaaaataagaaacatgttaaggttaaaaatgcttatgctctagaaatagaaaaatgtgagaaattatctagtgagctaagcacatgccatgacactattaccaaccttagaaatgaaaatgccaaattaattgctaaggttgattctcatatttgtaatgtttcaacttccaatcctagagatgataatgttgatttacttgctaggattgatgagttaaatgtttctattgctagccttagaattgagaatgaaaaattgcaatga

SEQ ID NO: 4773 - DNA, 761 bp, Zea mays
  Clone ID: TF_LIB4699-002-R1-K1-D10
gcaacgcggcaagccgcgcaaggcgcgcggaggcgcttttgccgaggcgcgaggacaagctcagggtggtgcccgcggaggcgcccaaggcggtgccgtcggcaacaagaagccgacacgagatgacggctgtcacaactgtggcaagcttggccactgggccagggaatgttgacagccacgacgcggccagggcaacgttgcataggcggaggcggagtaggaagctctgctcctagcacacgcaagcatcaagataccttcagcgtcaccggccgcagcggcactcctccaccttgatgagtcgaaagcacacgctttccttggcgacggctacaacaacgacatgatcgaaggatggtgttgtttgtcacttgttctcaaatgctgtgaatcaagaataaggcaacacaattgttaagtattaaggaccttcgtctgccgaaacattatctccccaaggacataatgttcattatacgaaggttatgaaggacatgtcttcatcaccttatagataaatcaaaatacaaagagatagaaatggcaagtataacttatcgatccattcatgtttgcattccgtaaagcatgcatgagtattaacagattgtatattacattgataccttcggcttgctcgaaggcgttgacgtgagggcgaatacaattcagcgtgtacagtatggtgctactgttcatttatttataagcgcgggaagaccacgggtaaaattacatttatgtccccttttttgctg

SEQ ID NO: 4774 - DNA, 2530 bp, Zea mays
  Clone ID: TF_ZmC1028_2
ggcgtaccagagctggcgctggcagccgcggggctgctcgctgcccagcttcaacgcgacgctgacgctggagtccctgcgggggaagcggatgctgttcgtgggtgactcgctgaaccgggggcagtacgtgtccctcctctgcctcctgcaccgggccatccccgacggcgccaagtcgttcgagacggtggactcgctgagcgtcttccgggcgaagaactacgacgccaccatcgagttctactgggcgccgatgctggccgagtccaactccgacgacgccgtggtgcactccgccgacgaccgcctcatccgcggcgcgcccatggacaggcactacagcttctggaagggcgccgacgtcctcgtcttcaactcctacctctggtgggtcgccggggacaaaatccagatcctgaggggcgccgacaacgacccgagcaaggacatcgtggagatgaagtcggaggaggcctaccggctggtgctgcaccaggtggtccggtggctggagcgcaacgtggaccccggcaagtcgcgggtgttcttcgtcaccgcttcgccgacgcacacggacggaagggcgtggggcgacgacgacgcggagggcagcggcaactgctacaaccagacgtcgccgatcagcgccgcctcgtcctaccgtggcggcacgagccaggagatgctgcgcgcgacggaggaggtgctggccacgtcgcgggtgcccgtcgggctggtcaatatcacgcggctgtccgagtaccgccgggacgcgcacacgcagacctacaagaagcagtgggtggaaccgacggccgagcagcgcgccgaccccaggagctacgccgactgcacgcactggtgcctccccggcgtgccggacacgtggaatgagctgctctactggaagctcttcttccccagcaacgatcaggtcctctgatggtgcctgcatacatacgcctggaaaccaactgctaggggctagcccaaagaaaattgtgtctagatgaagaacaaagccatggtgttcaaatgttttgttttgatttcggatatggacgctgtcgatgctcttgttctctgtggaattcttcttaccaaccaaacctacaaccggctcaagacccttgtcaacaagataagaagctacggaagcacgcgatggacggaccacgacatcgtccgcctaatgctaaggtcttttactgtccttgatcctcatcttgtaaacaatattcgtgagaatcctaggtacaccaagatgacgcccgaggagatacttggaaagttcgtgagcgagcgaatgattatcaaggaagcaacatacgtggacggcgcattgaatggtccaatcaatgagcctcaacctcttactctcaaggcaacaagaagcaaggagacgctacctagcaaggtggcacaaattgaggcggccggacttaatgatgaagagatggctctcatcatcaagagattcaagactagagatggcaatgggtacccgcgacccgatacccgatgggtatttactccattaggatggttaaatgatgctagaaattttacaatgacggcgctaaaaggtcgcaaggggcagccaagcaagaccaagacaaaggggaagcgctcatgcttcaaatgtggtaagcttggtcattttattgctaactgtcccgacaatgatagtgatcaggatcaagggaacaagagggagaagaagaagaactataagaaggcaaagggcgaggcgcatctaggcaaggagtgggattcggattgctcctcttccgactccgacaatgaaggactcgccgccaccgccttcaacaagtcatccctcttccccaacgagcgtcacacatgccttatggcaagggagaagaaggtatgtactcgaaactctacttatgcttcttcaagtgaggacgaatctagtgatgaggatgaaatagattattcatgtttatttaagggcctagatagaaccaaggtagataaaattaatgaattgattgatgccttgaatgataagaataggcttttagaaaagcaagaggatttgttgtatgaagaacatgacaaatttgtagaagcacaaaaatctcatgctctagaagttaaaagaaatgaaatgctttcttgtgaattatcttcttgccacgagacaatttctaacttaaggagcattaatgatgatttgaatgctaagttagaaatagctagtaaatcaacatcttgtgtagaaattgttgcaacttgtaataggtgtaaagattttgacattgatgcttgtagtgaatacctagtttcaatttccaaacttaatgatgaattggctagtcttaatgctcaacttaagactagcaagagcgaatttgataagctaaaatttgcgagggatgcctacacgattggtagacacccctcaattaaggatggacttggcttcaagagggaagccaagaacttaacaagccataaggttcccattcccgccaatgagaaagggaaggctcctaggcaa

SEQ ID NO: 4775 - DNA, 2588 bp, Zea mays
  Clone ID: TF_ZmC119_1385
cattctcttgattttcaaatctaattttgaatttttgttatgagtcacaccatggatcaaaatgtaccagattcaaatattagtgtaaaaaatatattcttattaatctattttattttacctcattggtttgatatttccttttcttttcttaaattctaaaattgtacctttagattaaatcccaattctcaatactccagtataatttgagatatctgaatttgctattttatttcttcatatatttattatattttttccttatacaaattttgggccttacaaaatgcaagttttatctcccttgcattttgcccctaatttcctagcaatcactttcttatcatttctacaaattgcaaaggaagtattgcaagcatgataaattgtagaaggttcattacttgctttcctaggtacatgaacaacatttctcctaggcatgtgatgaataacatttttcctaggcatatcatgcacaatagaagaactagaagcagtcatacatatgaatcataagaataattcctataagcatttctagagaattttctatcactataaatgaaagcatggttctttttagcactactagccataggagccttccctttctccttgacgaagatgggagccttatggcttgttaagttcttggcctctctcttgaagccaagaccatccttaattgaggggtgtctaccaaccgtataggcatcccttgcaaattttattttatcaacttcattcttgctagtcttaagttgggcattaagactagccacttccttatttaatttggaaattaaaactagatgttcactacaggcatcaacatcgaaatccttacacctagtgcaaatcttaacatgttctacacaagaattagatttatttgctatttctaacttagcatttaaatcattgttaacaccttgtaaagtagaaatggtttcatgacaagtagatagttcataagaaagcatttcatttctttttacttctaaagcatatgatttttgtgcctctacaaatttatcatgttcatcatacaataaatcctcctgcttttctaaaagcctatccttttcattcaatgcatcaatcaattcattgattttatctatcttagatctatctaagcccttgaacaagcatgaataatctatgtcatcatcactagactcactatcactagaagaagcataagtggagtcttgagtactcaccttcttctcccttgccataagacatgtgagacgctcgtttgggaagagagccgatttgttgaaggcagtggcggcgagtccttcgttgtcggagtcggaggaggagcaatccgagtcccactcctttcctagatgcgcctcgccctttgccttcttgtattgcttcttcttttctcttttgttccccttttcctggtcactttcattatcgggacagttagcgataaaatgaccaagcttaccgcatttgaagcatgagcgcttccccttggtcttagtcttgctcggctgtccattgcgaccctttagcaccgtcttgaatctcttgataatgagggccatttcttcatcgttgagtccagccgcctcaatttgtgccaccttgctaggtagcgcctccttgcttcgtgttgccttgagagtgagaggttgcggctcgttgatcggaccattcaaggcgtcgtccacatatctcgcctccttgatcatcattcgcccgctaacaaatttcccaagaacttcttcgggcgacatcttggtgtacctgggattttcacgtatattgttcaccaagtgaggatcaagaacggtaaatgaccttagcattaggcggacgacgtcgtggtccgtccatcgtgtgctcccgtagcttcttatcttgttgataagggtcttgagccgattgtatgtttgcgttggctcctcgccccttatcattgcgaaccgtccaagctcgccctccaccaactccatcttggtgagtaaggtgacgtcgttcccctcatgagaaatcttgagggtgtcccagatttgcttggcgttatccaagccgctcaccttatggtattcattcttgcacaaggaagctagaagaacagtagtagcttgtgcattcttatgaatttgttcattaatgaacatgggactatccgaactatcaaaatgcattccactctctacaatctcccatatactaggatggagagagaataggtgactacgcattttgtggctccaaaatccgtagtcctctccatcaaagtgtgggggcttgccgagtggaatggagagcaaatgagaatgtgaactttgcggaatacgagagtaatcaaaagaaaagtttgaattaaccggttttcttctctcgtagtcgttgtggtcctcgtccttttgggaagaagtagactcgtcgctgtcgtagtagacgatctccttgatgcgcctggtcttcttcttcttcccttccttccgtctttggcccgagccggagtcggtaggcttatcgtccttcggctcgttgacgaaggattccttctctttgtcgttgatcactatacccttccccttaggatccat

SEQ ID NO: 4776 - DNA, 2551 bp, Zea mays
  Clone ID: TF_ZmC119_1489
ctagatttgcactttgttcatccatgggcattgattcacatttaagcacttgtgttgacactcaatcaccaaaatatttagaaatggcccaagggcacatttccctttcagtgcctcgcccttggccttcttgtaatgcttcttcttttccctcttgctcccgtgttcctggtcactatcattgtcgggacagttagcaataaaatgaccaagcttaccgcatttgaagcatgatcgctttcccttggtcttagtcttgcttggctgtcccttgcgaccctttagtgccgtcttgaatcttttgatgatgagggccatctcttcatcattaagaccggccgcctcaatttgcgccaccttgctgggtagcgcctccttgctccttgttgccttgagagcaatgggttgaggctcatggattgggccattcaacgcgtcgtccacgtacctcgcctccttgatcatcattcgcccgcttacaaattttccatgaatttcttcgggcgacatcttgatgtacctaggattttcacgaatattgttcaccaagtgaggatcaagaacggtaaatgaccttagcattaggcggacgacgtcgtgatccgtccatcgcgtgcttccgtagctccttattttgttgataaggatcttgagccggttgtatgtttgtgtcggctcctcgccccttatcatcgcgaatcgtccgagctcgccctccaccaattccatcttggtgagtaaggtgacatcattcccctcatgagagatcttgagggtgtcccaaatctgcttggcattgtccaagccgctcaccttgtgatactcgtccctgcacaaagaggctagcaacacagtagtagcttgtgcatttttatggatctgttcattaataaatgaagggctatccgagctatcaaatttcattccactttccacaatctcccaaatgcttggatggagagaaaataggtgagtacgcattttgtgactccaaaatccgtagtcctctccatcaaagtgaggaggcttgccaagtggaatggggagcaaatgagcatttgagctatgcggaatgcgcgaataatcaaaagaaaagtttgagttaaccgtcttttgtttgtcatagtcgttgtcgtcgttgtccttttgggaagaggaagattcgtcgctgtcgtcgtagtagacgatctccttgatgcgccttgtcttcttcttcttcccttccttccgtctatggcccgagccggagtcggtaggcttgtcatctttgggctcgttgacgaaggactccttctccttatcgttgatcacgattcccttccccttaggatccatctcttcgggcggttagtccttttgtgaagagaacggctccgataccaattgagagcacctagagggggggtgaataggtgatcctgtaaaacttgaaaacttaagccacaaaaacttggttaagcgttagcacagtaaatgccaaatggctagagagaagatcttgcacaatacgataaccacaaagagtacaacacagagatgacacagtagtttatcccgtggttcggccaagtacaaaacttgcctactccacattgtggcgtcccaacggacgagagttgcactcaactcctctcaagtgatccaatgatcaacttgaataccacggtgttatgcttttcttttcttatcccgttcgcgaggaatctccacaacttggagcctctcgcccttacacttttgatgttcacaaagaatcacggagtaaagggggggatgagcaactcacacaagacacaaagatcacagcaaatacgcacacacaagacctagacttgagctcaaaaagactagcacactagaacagggctcaaatcactagaatgtcgaacaagtgcgcaagaatggagtgtgagtgatcaagagtgctcaaggaatgcttggtgttctcctccatgcgcctaggggtcccttttatagccccaaggcagctaggagccgttgagagcattccaggaaggcaattcttgccttctgtcgcctggcgcaccggactgtccggtgcagatttctttccttctgtggcgtagccgaccgttggcgcctgggagccgttggtgcaccggacactgtccggtgcacaccggacagtccggtgccccctcccgaccgttcgctcggccacgtgtctcgcgcagatcgcgcagccgaccgttggcccggccgaccgttggctcaccggacagtccggtgaattatagccgtacgccgttaatttattcccgagagcgccaagttcgcctgagcccgcctggcacaccggacactgtccggtgccccaccggacagtccggtgcacccagacagtgctggctttggctgaaacaaagctatctctctccaatttgttttctcctatttccagcacttttgacattatttgcactttgtccaccacattgcatagatcaacgcaaaagcacttgcgttggcagtcaatcaccaaaatacttagaaatggcccaagggcacatttctctttcaatctccccat

SEQ ID NO: 4777 - DNA, 5124 bp, Zea mays
  Clone ID: TF_ZmC29741_13
tcaatccaagttccgcgaatctaagatattgagctcactacgcagcctgcaaaaggtcttctcatctagaggcttggtaaagatatcggctagctggttctcggtgctaacatgaaacactttgatatcccccttttgctggtggtctctcaaaaagtgatgccggatgtcaatgtgctttgtgcggctgtgctcaacaggattttccgctattcggatagcactctcattatcacataggagtgggactttgctcagattgtagccaaagtcccggagggtttgcctcatccaaagtagttgcgcgcaacactgtcctgcggcaacgtactcggcctcagcggtggatagggcaacggaagtttgtttcttagaattccatgacaccagggaccttcctaagaattggcacgtccccgatgtactcttcctatcgaccttacatccagcatagtcggaatctgagtacccaatcaagtcaaagttagacccctttggataccagatcccgaagcaaggcgtagcgactcctttgttgaggtcggtgtgtctgtcagttcccatcggcgtctttgcgggcttggcatccttcatcccaaaccgctttagaaagtcttgcgtgtacttcgtttgggagatgaaagtgtcgtccttgagttgcttcacttggaacccaaggaagtagttcaactcgcccatcatcgacatctcgaatttctgcgtcatcaccctgctaaactcttcacaagacttttgattagtagaaccaaatattatgtcatcgacataaacttggcatacaaaaagatcaccatcgcaagtcttagtaaaaagagttggatcggctttcccgaccttgaaagcattagcaattaaaaagtctctaaggcattcataccatgctcttggggcttgcttaagtccatagagcgccttagagagcttacacacgtggtcggggtaccgttcatcctcgaagccagggggttgctccacgtacacctcctctgcgacttgggcataaccttttgccacaagccgagccttgttccttgtcaccaccccgtgctcgtcttgtttgttgcggaacacccacttggttcccacaacattttgcttggggcgaggcaccagtgtccaaacttcattgtgcttgaaattgttgagttcctcctgcatggccaacacccagtccagatctagcaaggcctcttctaccctaaaaggctcaatagaagagacaaaagagtaatgctcacaaaaattaactaatcttgaacgagtagttactcccttgctaatatcacccagtatttggtcgacgtgatgatccctttggatcgtcgctcgaacttgggttggaggtgcctgaggtgcttcttcctcttcaacttgaacatcctgtgctcccccttgatcatgtgcctccacttgaggtacctgtttgtcatcttgggttgggggatgcaccatagttgaggaagacggttgatcttgctccaaatgttcctgaggccgtacatctccaatcgccatggtgcgtattgcggctgttggaacgtcttcttcatctacatcatcaagatcaacaacttgctctcttggagagccattagtctcatcaaatacaacgtcgctagaaacttcaaccaaacccgatgatttgttgaagaccctatacgcctttgtatttgaatcataacctaatagaaacccttctacagctttgggagcaaatttggaattcctacccttcttcacagtcagcagctcatatgaagtcttcttgaggaggcggtgaaggtagaccctgttgatggtgtggcaagccgtgttcacggcttccgaccaaaagcactcgggggtcttgaactctccaagcatagtcctcgccatatctatgagtgtcctgttcttcctctctaccacaccattttgctgaggtgtgtagggagcggagaactcgtgcttgatcccctcctcctcaaggaactcctccacttgaagattcttgaattcggacccgttgtcgctccttatcttctttaccttgagctcaaactcattttgagctctcctgaggaagcgcttgagggtcccttgggtttcagacttatcctgcaaaaagaacacccaagtgaagcgggaaaagtcatcaacaataactagaccatacttacttcctcctatgctcagataggcgacgggtccgaagaggtccatatgcagcagctccagaggtcttgacgtggtcatcacattcttgctgtgatgtgctcctctcacttgtttacctgcttgacaagctgcacaaggtctatctttttcgaaatgaacattggttagacctatcacgtgttctccctttagaagcttgtggaggttcttcatccccacatgtgctaagcggcgatgccacaaccagcccatgcaagtcttagccattaagcatgcatctagaccgacctcttcttttgcaaaatcaactaagtaaagtttgccatctagtacacccttaaaagctaatgaaccatcacatcttctaaagacagacacatctacatttgtaaataaacagttatatcccatattacataattgactaacagatagtaaattatatccaagactctccactaaaaacacattagagatagaatgctcatttgatattgcaatcttgcctaaacctttcaccttgccttggttcccatcaccgaatatgattgaatcttgggaatccttattcttgacgtaggaggtgaacatcttcttctcccccgtcatatggtttgtgcatccgctgtcgataatccagcttgaacccccggatgcataaacccaactcttgttgggtcctacaaggttagtcacaatttccttagggacccaaatgcaagttttatcacccttgcattttgcccctaatttcctagcaactatcttcctatcctttctacaaatagcaaaggaagcattcaaggcatgataaattgtagagggaccattcataactttcctaggagcatgagcaaaattctttctaggcacatgatgaatatttttcctaggcatatctctacaatgcatataggaagaactagaagcatacatagcataagaatcataggcatgtgaatcaagagcattacaactcctatgagactgtcttctattattgtacataaaagcatggttctttttagtactacttgccataggggccttccctttctccttggcggagatgggagccttatggcttgttaagtccttggcttccctcttgaagccaagtccatccttaattgaggggtgtctaccaatcgtgtaggcatcccttgcaaattttagcttatcgaaatcacttttgctagtcttaagttgggcattaagactagctacttcatcatttaatctcgaaattgaaactaggtgtccattacaggcatcaatatcaaaattcttacacctagtgcaaatcataacatgttctacacaagaattagatttatttgctacttctaatttagcatttaaatcattgttaacactttgtaaagtagaaatggtttcatgacacgtagatagttcataagaaagcatttcatttcttttaacttctaaagcatatgatttttgtgcctctacaaatttgtcatgttcatcatacaacaaatcctcttgcttttctaaaagcctatccttttcattcaaggcatcaatcaattcattgattttatcaattttatttctatccaatcccttgaacaagctagagtaatctatttcctcatcactagattcgtcttcacttgaagaagcataagtagagtctcgagtacataccttcttctcccttgccatgaggcatgtgtgacgctcgttggggaagagggatgacttgttgaaggcggtggcggcgagtccttcattgtcggagtcggacgaggagcagtctgaatcccattccttgccaagatgagcctcgccctttgccttcttataattcttcttcttctccctcttgttcccttggtcctgatcactatcattgtcgggacagttagcaataaaatgaccaagcttaccgcatttgaagcatgagcgcttccccttggctttagtcttgcttggttgtcccttgcgacccttaagcgccgtcttgaatcttttgatgatgagggccatctcttcatcattaagtccggctgcctcaatttgtgccaccttactaggtagcgcctccttgcttcttgttgccttgagagcaaggggttgcggctcgttgatcggaccattcaaggcgtcgtccacgtacctcgcctccttgatcatcatccgcccgctaacgaattttccaaggacttcttcgggcgacattttggtgtacctgggattctcacgaatattatttaccaaatgaggatcaagaacggtaaaggaccttagcatcagtcggacgacgtcgtggtccgtccatcgcgtgcttccgtagctccttattttgttgataagggtcttgagtcggttgtatgtttgtgtcggctcctcgccccttatcatcgcgaaccgtccaagctcgccctccaccaactccattttgtggtattcatccctacacaatgaagctagaagaacagtagtagcttgtgcattcttatgaatttgttcattaatgaacatgggactatccgaactatcaaagtgcattccactctctacaatctcccatatactaggatggagagagaacaagtgactacgcattttgtgactccaaaatccgtagtcctctccatcaaaatgaggaggtttaccaagtggaatagataataaatgagcatttgcactttgaggaatacgcgaataatcgaaagaaaagttcgagttaaccgtctttcgtttgtcgtagtcgttgtcgtcgttgtccttgtgggaagaagtggactcatcactatcgtcgtagtagacgatctccttaatgcgccttgtcttcttcttcttcccatcttttcgtctatgacccgagcccgagtcggtaggcttgtcatcctttggctcgttgacgaaagactccttctctttatcgttgatcacgatacccttccccttaggatccat

SEQ ID NO: 4778 - DNA, 4036 bp, Zea mays
  Clone ID: TF_ZmC29741_17
tcattttgagctctcctgaggaagcgtttgagagtcccttgggtttcggacttttcttcctcctatgctcagataggcgacgggtccgaagaggtccatatgtagcatctccaagggtcttgatgtcgtcatcacatttttggtgtgatgagagcctcccacctgtttccctgcttgacaagctgcacaaggtctatctttttcgaattgaacattagttagacctatcacgtgttctccctttagaagcttgtgaaggttcttcatccccacatgtgctaagcggcgatgccacagccagcccatgctagtcttagctattaagcatgcatctagaccggcctcttcttttgcaaaatcaactaaataaagtttgctgtctaatacacccttaaaagctagtgaaccatcacttcttctaaagacagacacatctaacccttttaccttgccttgattcccatcaccgaatataattgaatcttgggaatctttattcttgacgtaggaggtgaacatcttcttctcccccgtcatatggtttgtgcatccgctgtcgataatccagcttgaacctccggatgcataaacctttttatgaacatttgcaacatttcttttaggaacaacatttctcctagtaatatttctatcatacacataagaagaactaggagcaaacatggcatgagaatcataaacatatgaatcaaaagcatcataacttctatttctagtttgtcttttatcatgatacaaaaaggcatggttccttttagcactagtagccataggggccttccctttctccttggcggaaatgggagccttatggcttgttaagttcttggcttccctcttgaagccaagtccatccttaattgaggggtgtctaccaaccgtgtaggcatccctagcaaattttagtttttcaaaatcacttttgctagtcttaagttgggcattaagactagccacttcattatttaactttgcaatagaagctatgtgttcactacaggcatcaatatcaaagtctttacatctattgcaaataacaacattttctacacaagttgttgatttactagctatttctatcttagcattcaactcatcgttaatgctctttaattttgaaattgtctcatggcatgaagataattcacaagtaagcatttcatttcttttaacttctagagcatgagatttttgagcttctaaaaatttatcatgctcttcatacaataaatcctcttgtttctctaagagtttatccttctcattcaatgcatcaattaattcattaattttgccaatcgtaattctatctagacctttaaataaactagaatagtctatttcatcatcgtcactagaatcatcaccactagaagaagcatgagtagagtttcgagtacttactttcttctccttagccatgagacacgtgtgacgctcgttggggaagagggccgatttgttgaaggcggtggcggcgagtccttcattgtcggagtcggaagaggagcaatccgagtcccactccttgcctagatgcgcctcgccctttgccttcttgtaatgcttcttcttttcccttttgttccccttttcctggtcactctcattatcaggacagttagcaataaaatgaccaagcttaccgcatttgaagcatgatcgcttccccttggtcttagtcttgctcggctgtccattgcgaccctttagcaccgtcttgaatctcttgatgatgagggccatttcttcatcattaagaccgactgcctcaatttgcgccaccttgctaggtagtgcctccttgctccttgtggcgttgagagcaaaaggttgcggctcgttgatcggtccattcaatgcgtcgtccacataccttgcctccttgatcatcattcgcccgctgacgaattttcctaggacttcttcgggcgacattttggtgtacctgggattctcacgaatattattcaccaaatgaggatcaagaacggtaaaggacctgagcattagtcggacgacgtcgtggtccgtccatcgcgtgcttccgtagctccttattttgttgataagggtcttgagccggttgtatgtctgagttggctcctcgccccttatcatcgcgaaccgtccaagctcgccttccaccaactccgttttggtgagcaaggtaacgtcatttccttcatgagagatcttgagagtgtcccagatctgcttggcgttatccaagccgctcactttgttatattcatccctgcacaatgaagctagaagaacagtggtagcttgtgcattcttatggatttgctcattaatgaatgaagggctatccgagctatcaaatttcattccattttccacaatctcccaaatgcttggatggagagaaaataggtgagtacgcattttgtgactccaaaatccgtagtcctctccatcaaagtgaggaggcttgccaagtggaatggggagcaaatgagcatttgagctatatggaatgcgcgaataatcaaaagaaaagtttgagttaaccgtcttttgtttgtcgtggtcgtcgtccttttgggaagaagaggactcatcgctgtcgtagtagacgatctccttgatgcgtcttgtcttcttcttcttcccatcttttcgcttgtggcccgagcccgagtcatttgacttgtcatcccttggctcgttgacgaaggactccttctccttgtcgttgatcacaattcccttccccttaggatccattcttatcccccgtcatatggtttgtgcatccgctgtcgataatccagcttgaacccccggatgcataaacctgcaaggcaaatttaggcttgggtcttaggtacccaactcatgttgggtcctacaaggttagtgcaaatatccttagggacccaaatgcaagttttgtctcccttgcattttgcccctaacttcctagcaacaattttcttatcctttctacaaatagcaaaggaagcatttaaagcacagtaaattgtagaaggttcattcactactttcctaggagcattataaacaacatttctcctaggcatttgatgaacaacatttcttctaagcacatttctaccaggcataacatgagaactagaagcagtcatagcataagagtcataagcatgtgaaccaaaaacatcatgacctctaaaagcatttctagaatatctcctatcatgatataaaaaggcatggttccttttagcactagtagccataggagccttccctttctccttagtgggagtgggagtgaccgtcgcggcgcgccgggccccccatgtactcgtagatgaagatgacgacgttgtaccagacgcagaactgcatgacgacgatctgcttcatgaggtctttggacatggcgccgtacatgccgccgaggagcggcacgcccatgatgatggtgttgggcagcgacgccacggagaaggcggtcaccacccactgcagcggagaggccgccgcagccgaagccgaagccttgccgcctccgattgagggacggcggcggcgcgaacgggactcccaggcggcccacgcgacgaggccgagcagcatgacggccttctgcagcgtgtcggcggcgacgaggcggccgttcatggcgtaggggttgttggtggagaccatgttgaagatgagcacgggcacggcgtagatggcgacgaagtggttgatccccgcgcactgctcctcggagaaggccttgagccaccgcacggacgcgtacccgagcaccgccgccgtgtacagcggcgccatcgcctccacgacatggtacacggccagccacgtgatcatggcgccctagaaagtagcacaccctatatatgatccaactttcgaccgatcagggacgaccacgcctctctataaatcgacggcgtggattcggtttcgtacagctagctgtgcgctaagcttcctcttgtggtactagaagtgtctgggtaagggttcccggccccgccctgtccggccg

SEQ ID NO: 4779 - DNA, 3489 bp, Zea mays
  Clone ID: TF_ZmC29741_18
gattgattctatcagttttattactatccaatcccttgaacaaactagagttatctatttgatcatcactagattcatcgtcactagaagaatcataagtgacatcattacgagtgattaccttcttctctcttgccatgaggcaagtgtgacgctcgttggggaagagggatgacttgctgaatgcaggggcggcgattccctcattgtcggagtcagacgaggagcagtacgattgccactccttgccaacatgcttgtctccttttgcctctttagtcttctactctattgcacttaacaacattttctacacaagttgttgatttactagacatttctatcttagcattcaactcatcgttaatgctctttaattttgaaattgtctcatggcatgaagataattcacaagtaagcatttcatttcttttaacttctagagcatgagatttttgagcttctaaaaatttatcatgctcttcatacaataaatcctcttgattctctaagagtttatccttgtcattcaatgcatcaattaattcattaattttgccaatcgtaattgtatctagacctttaaataaactaagatagactatttcatcattaggactagaatcatcaccactaggagaagcgtaagtagagctgccagtactgactagagtctgcttagccatgatacatccctcctatgctcagataggcgacgggtccgaagaggtccatatgcagcagctccaggggtcttgaagtggtcatcacattcttgttgtgatgtgctcctcccacttgtttacctgcttgacaagctgcacaaggtctatctttttcgaattgaacgttagtcaaacctatcacgtgttctccctttagaagcttgtgtaggttcttcatccccacatgtgctaagcggcgatgccacagccaacccatgctagtcttagctattaagcatgcatctagaccggcctcttcttttgcaaaatcaactaaataaagtttgccgtctaatacacccttaaaagctagtgaaccatcacttcttctaaagacagacacatctacatttgtaaataggcagttataccccatattgcataattgactaacagatagcaaattatatcccagagactcaactaacccttttaccttgccttgattcccatcaccgaatataattgaatcttgggaatccttattcttgacgtaggaggtgaacatcttcttctcccccgtcatatggtttgtgcatccgctgtcgataatccagcttgaacccccggatgcataaacattaacaacatttttcctaggcgtattgtgaacaacatttctcctaccaacatttctatcatgcacatagaaagaactagaagcaaacatgtcatgagaatcaaaatcatcataagcattgtaactcctataagcatttctaatttgtctcttatcatggtacataaacgcatggttctttttagcactactggacataggggccttccctttctccttggcggagatgggagccttatgacttgttaagttcttgacttccctcttgaagccaagcccatccttaattgaggggtgtctaccaaccgtgtaggcatccctagcaaattttagtttctcaaattcattcttgctagtcttaagttgggcattaagactagccaattcctcagttaatttagaaattgaaactaaatgatcactacaagcatcaacatcgaaatctttacacctagtgcaaatctcaacatgttctacacaagaattagatttactagctacttctagtttagcttttaagtcatcattaacactctttaaagtagcaatggtttcatgacaagaagatagttcactagaaagcacttcatttcttttaacttctaaagcataagatttttgtgcctctacaaatttgtcatgctcttcatacaaaaggtcctcttgtttttctaagagtctatctttttcattcaaggcatcaatcaattcattaattttatctactttagttctatccaatcccttgaacaaactagagtaatctatttcatcatcactagactcgtcatcactggaagaatcataagtgacattgttttgattacataccttcttctcccttgccataaggcatgtgtgacgctcgttggggaagagggatgacttgttgaaggcagtggcggcgagtccttcattgtcggagtcggaggaggagcaatccgaatcccactcctttccgatatgtgcctcgcccttggccttcttgtaatgcttcttcttttccctcttgctcccgtgttcctggtcactatcattgtcgggacagttagcaataaaatgaccaagcttaccgcatttgaagcatgatcgctttcccttggtcttagtcttgcttggctgtcccttgcgaccctttagtgtcgtcttgaatcttttgatgatgagggccatctcttcatcgttaagaccggccgcctcaatttgcgccaccttgctgggtagtgcctccttgctccttgttgccttgagagcaatgggttgaggctcatggattgggccattcaacgcgtcgtccacgtacctcgccttcttgatcatcattcgcccgcttacaaattttccaagaatttcttcgggcgacatcttgatgtacctaggattttcacgaatattgttcaccaagtgaggatcaagaactgtaaatgaccttagcattaggcggacgacgtcgtgatccgtccatcgcgtgcttccgtagctccttattttgttgataaggatcttgagccggttgtatgtttgtgtcggctcctctccccttatcatcgcgaatcgtccgagctcgccttccaccaactccatcttggtgagtaaggtgacatcattcccctcatgagagatcttgagggtgtcccaaatctgcttggcattgtccaagccgctcaccttgtgatactcgtccctgcacaaagaggctagcaacacagtagtagcttgtgcatttttatggatctgttcattaataaacgaagggctatccgagctatcaaatttcattccactttccacaatctcccaaatgcttggatggagagaaaataggtgagtacgcattttgtgactccaaaatccgtagtcctctccatcaaagtgaggaggcttgccaagtggaatggggagcaaatgagcatttgagctatgcggaatgcgcgaataatcaaaagaaaagtttgagttaaccgtcttttgtttatcatagtcgttgttgtccttttgggaagaggaagattcgtcgctgtcgtcgtagtagacgatctccttgatgcgccttgtcttcttcttcttcccttccttccgtctatggcccgagccggagtcggtaggcttgtcatctttgggctcgttgacgaaggactccttctccttatcgttgatcacgattcccttccccttaggatccat

SEQ ID NO: 4780 - DNA, 2340 bp, Zea mays
  Clone ID: TF_ZmC29741_34
cttgccttgattcccatcaccgaatattattgaatcttgggaatctttgtttttgacgtaggaggtgaacatcttcttctcccccgtcatatggtttgtgcatccgctgtcaataatccagcttgaacccccggatgcataaactttcctaggaacattaacaacatttctcctaggcaaattatgaacagcatttctcctaccaacatttctatcatgcacataagaagaactagaagcaaacatggcatgagaatcaatggcattatatgcattacaactcctataagaatttctagattgtctcctatcatggtacataaaagcatggttcttttgcacactactagccataggggcctttcctttctccttggtggagatgggggccttatggcttgtcaagttcttggcttccctcttgtagccaagtccatccttaattgaggggtgtctaccaatcgtgtaggcatcccttgcaaattttagcttgtcaaattcattcttgctagtcttaagttgggcattaagactagctaattcctcatttaatttagagattgaaactaaatgatcactacaagcatcaatgtcaaaatctttacacctattacaagtttcaacaatttctacacaagaattagatttactagctacttttagtttagcatttaaatcatcattaaaactttttaacttagcaatagtttcatgacaagaagataattcactagagagcatttcattcctcttaatttctagagcaagagatttctgagcttctacaaatttatcatgttcttcatacaacaaatcctcttgcttttctaacagtatattccttccttccacggctcctctcgcttctctaactgtgtcttccttagttctatctaatcccttgaataagcatgagtaatctatctcatcatcatcactagactcatcctcacttgaagaagcataagtactagtattaggagtgcttactttcttctcccttgccatgaggcaagtgtgacgctcgttggggaagagggatgacttgttgaaggcagtggcggcgagtccttcattgtctgagtcggacgaggagcagtccgaatcccactccttgccaagatgagcctcgccctttgccttcttatagttcttctttttctccctcttgttcccttgatcctgatcactatcattgtcgggacagttagcaataaaatgaccaagcttaccgcatttgaagcatgagcgcttccccttggctttggtcttgcttggttgtcccttgcgatctttaagcaccgtcttgaatcttttgatgatgagagccatctcttcatcattaagtccggccgcctcaatctgtgccaccttgctaggtagcgcctccttgcttcgtgttgccttgagagcaagaggttgcggctcgttgatcggaccattcaaggcgtcgtccacgtatctcgcctcctcgatcatcattcgcccgctaacgaatttcccaagaacttcttcgggcgacatcttggtgtacctgggattttcacgaatattgttcactaaatgaggatcaagaacggtaaatgaccttagcattaggcggacgacgtcgtggtccgtccatcgcgtgctcccgtagctccttattttgttgataagggtcttgagccggttgtatgtttgtgtcggctcctcgccccttatcatcgcgaaccgtccaagctcgccttccaccaactccattttggtgagcaaggtgacgtcgtttccctcatgagagatcttgagggtgtcccagatctgcttggcattgtccaggccgctcaccttgtgatactcgtccctgcacaaagaggctagcaacacagtagtagcttgtgcatttttatgaatctgttcattaataaacacagggctatccgagctatcaaatttcattccactttccacaatctcccaaatgcttggatggagagaaaacaggtgagtacgcattttgtggctccaaaatccgtagtcctctccatcaaagtgagggggcttgccaagtggaatggggagcaattgagcatttgaactatgcgggatgcgcgaataatcgaaagaaaagtttgagttaaccgtctttcgtctatcgtggtcgtcgtcgtccttttgggaggaggaagattcgtcgctgtcgtagtagacaatttccttgatgcgccttgtcttcttcttcctcccgtcttttcttttgtggcccgagcctgagtcggtgggcttgtcatcattgggctcgttgacgaaggtctccttctccttgtcgttgatcaccatccccttgcccttaggatccat

SEQ ID NO: 4781 - DNA, 2597 bp, Zea mays
  Clone ID: TF_ZmC29741_40
ctaaaaacacattagatatagagtgctcggatgaaatagcaattttacctaacccttttaccttgccttgattcccatcaccgaatattattgaatcttgggaatccttgtttttgacgtaggaggtgaacatcttcttctcccccgtcatattgtttgtgcatccgctgtcgataatccagcttgaaccctcggatgcataaacctgcaaggcaaatttaggcttgggtcttaggtacccaactcatgttgggtcctacaaggttagtacaaatatccttagggaccgaaatgcaagttttgtctcccttgcattttgcccctaattttctagcaactatctttctatcctttctacaaatagcaaaggaagcatttaaagcatgatatattgtagaaggtccattcacaactttcctgggaacatgaacaatattctttctaggcacatggtgaatatttttcctaggcatatctctaccatgcatataggaagaaccagaagcaaacatggcatgagagtcaaaggcatcataagcattacaactcctataagactgtcttctatcatggtacataaaagcatggttcttttgcacactactagccataggggcctttcctttctccttggcggagatgggagccttatggcttgtcaagttcttggcttccctcttgtagccaagtccatccttaattgaggggtgtctaccaatcgtgtaggcatcccttgcaaattttagcttgtcaaattcattcttgctagtcttaagttgggcattaagactagctaattcctcatttaatttagaaattgaaactaaatgatcactacaagcatcaatgtcaaaatctttacacctattacaagtttcaacaatttctacacaagaattagatttactagctacttctagtttagcatttaaatcatcattaaaaccttttaacttagcaatagtttcatgacaagaagataattcactagagagcatttcattcctcttaatttctagagcaagagatttctgagcttctacaaatttatcatgttcttcatacaacaaatcctcttgcttttctaacagtatattcctatcattcaaggcatcaatcaattcattaattttgtctaccttagttctatctaatcccttgaataagcatgagtaatctatctcatcatcatcactagactcatcctcacttgaagaagcataagtactagtattaggagtgcttactttcttctcccttgccatgaggcaagtgtgacgctcgttggggaagagggatgacttgttgaaggcagtggcggcgagtccctcattgtcggagtcggacgaggagcagtctgaatcccactccttgccaagatgagcctcgccctttgccttcttatagttcttctttttctccctcttgttcccttgatcctgatcactatcattgtcgggacagttagcaataaaatgaccaagcttaccgcatttgaagcatgagcgcttccccttggctttggtcttgcttggctgtcccttgcgacctttaagcaccgtcttgaatcttttgatgatgagagccatctcttcatcattaagtccggccgcctcaatctgtgccaccttgctaggtagcgcctccttgcttcgtgttgccttgagagcaaggggttgcggctcgttgatcggaccattcaaggcgtcgtccacgtacctcgcctccttgatcatcattcgcccgctaacgaattccccaagaacttcttcgggcgacatcttggtgtacctgggattttcacgaatattgttcaccaaatgaggatcaagaacggtaaatgaccttagcattaggcggacgacgtcgtggtccgtccatcgcgtgctcccgtagctccttattttgttgataagggtcttgagccggttgtatgtttgtgtcggctcctcgccccttatcatcgcgaaccgtccaagctcgccttccaccaactccattttggtgagcaaggtgacatcgtttccctcatgagagatcttgagggtgtcccagatctgcttggcattgtccaagccgctcaccttgtgatactcgtccctgcacaaggaggctagcaacacagtagtagcttgtgcatttttatggatctgttcattaataaacacagggctatccgagctatcaaatttcattccactttccacaatctcccaaatgcttggatggagagaaaacaggtgagtacgcattttgtggctccaaaatccgtagtcctctccatcaaagtgagggggcttgccaagtggaatggggagcaattgagcatttgaactatgcgggatgcgcgaataatcgaaagaaaagtttgagttaaccgtctttcgtctatcgtggtcgtcgtcgtccttttgggaggaggaagattcgtcgctgtcgtagtagacaatttccttgatgcgccttgtcttcttcttcctcccgtcttttcttttgtggcccgagcctgagtcggtgggcttgtcatcattgggctcgttgacgaaggtctccttctccttgtcgttgatcaccatccccttgcccttaggatccat

SEQ ID NO: 4782 - DNA, 2002 bp, Zea mays
  Clone ID: TF_ZmC29741_48
tagtagccataggggccttccctttctccttagcgggaatgggagccttatggcttgttaagttcttggcttccctcttgaagccaagtccatccttaattgaggggtgtctaccgatcgtgtaggcatcccttgcaaattttagtttatcaaattcattcttgctagtcttaagttgggcattaagactagccaattcctcatttaatttagaaattgaaactaaatgatcactacaagcatcaacatcaaaatctttacacctagtgcaaatctcaacatgttctacacaagaattagatttactagctacttctagtttagcatttaagtcatcattaacactctttaaagtagcaatggtttcatgacaagaagatagttcactagaaagcacttcatttcttttaacttctaaagcataagatttttgtgcctctacaaatttgtcatgctcttcatacaaaaggtcctcttgtttttctaagagtctatccttttcattcaaggcatcaatcaattcattaattgtatctactttagttctatccaatcccttgaacaaactagagtaatctatttcatcatcactagactcatcatcactggaagaatcataagtgacattgttttgattacataccttcttctcccttgccataaggcatgtgtgacgctcgttggggaagagggatgacttgttgaaggcagtggcggcgagtccttcattgtcggagtcggaggaggagcaatccgaatcccactcctttccaatatgtgcctcgcccttggccttcttgtaatgcttcttcttttccctcttgctcccgtgttcttggtcactatcattgtcgggacagttagcaataaaatgaccaagcttaccgcatttgaagcatgatcgctttcccttggtcttagtcttgcttggctgtcccttgcgaccctttagtgccgtcttgaatcttttgatgatgagagccatctcttcatcattaagaccggccgcctcaatttgcgccaccttgctgggtagcgcctccttgctccttgttgccttgagagcaatgggttgaggctcatggattgggccattcaacgcgtcgtccacatacctcgcctccttgatcatcattcgcccgcttacaaattttccaagaatttcttcgggcgacatcttgatgtacctaggattttcacgaatattgttcaccaagtgaggatcaagaacggtaaatgaccttagcattaggcggacgacgtcgtgatccgtccatcgcgtgcttccatagctccttattttgttgataaggatcttgagccggttgtatgtttgtgtcggctcctcgccccttatcatcgcgaatcgtccgagctcgccctccaccaactccatcttggtgagtaaggtgacatcattcccctcatgagagatcttgagggtgtcccaaatctgcttggcattgtccaagccgctcaccttgtgatactcatccctgcacaaagaggctagcaacacagtagtagcttgtgcatttttatgaatctgttcattaataaacgaagggctatccgagctatcaaatttcattccactttccacaatctcccaaatgcttggatggagagaaaataggtgagtacgcattttgtgactccaaaatccgtagtcctctccatcaaagtgaggaggcttgccaagtggaatggggagcaaatgagcatttgagctatgcggaatgcgcgaataatcaaaagaaaagtttgagttaaccgtcttttgtttgtcatagtcgttgtcgtcgttgtccttttgggaagaggaagattcgtcgctgtcgtcgtagtagacgatctccttgatgcgccttgtcttcttcttcttcccttccttccgtctatggcccgagccggagtcggtaggcttgtcatctttgggctcgttgacgaaggactccttctccttatcgttgatcacgattcccttccccttaggatccat

SEQ ID NO: 4783 - DNA, 2257 bp, Zea mays
  unsure (1)..(2257): unsure at all n locations
  Clone ID: TF_ZmC29741_49
ccgggnaaaaatttaaagcacaataaattgtagaaggttcatttgcaattttcctaggagcatgaataacattcctcctaggcacatgatgaatagcatttcttttaggaacaacatttatcctagtagcatttctatcatacacataagaggaactaggagcaaacatggcatgagaatcataaacatatgaatcaaaagcatcatgacttacatttctagtttgtcttctatcatgatacaaaaatgcatggttccttttagcactagtatccataggggccttccctttctccttggcgggaatgggatccttatggcttattaagttcttggcttccctcttgaagccaagcccatccttaattgagggatgtcttcctattgtgtaggcatcccttgcaaattttaacttatcaaattcacttttgctagtcttaagttggacattaagactagccacttcattatttagctttgcaatagaggctatgtgttcactacaagcatcaatatcaaattctttacatctattgcaaatagcaacattttctacacaagttgttgatttgctagctatttctatcttaacattcaactcatcgttaatgctctttaattttgaaattgtttcatggcatgaggataattcacaagtaagcatctcatttcttttaacttctagagcatgagatttttgagcttctaaaaatttatcatgctcttcatacaataaatcctcttgtttctctaagagtttatccttctcattcaatgcatcaattaattcattaattttgccaattgtaattctatctagacctttaaatacactagaatagtctatttcatcatcgtcactagaatcattatcactagaagaagcataagtagagtttcgagtacttactttcttctccttagccatgagacacgtgtgacgctcgttggggaagagggccgatttgttgaaggcggtggcggcgagtccctcattgtcggagtcggaggaggagcaatccgaatcccactccttgcctagatgcgcctcgcccttggctttcttgtagtgcttcttcttctcccttttgttccccttttcctggtcactttcattatcaggacagttagcaataaaatgaccaagcttaccgcatttgaagcatgatcgcttccccttggtcttagtcttgctcggctgtccattgcgaccctttagcaccgtcttgaatctcttgatgatgagggccatttcttcatcattaagaccggctgcctcaatttgcgccaccttgctgggtagtgcctccttgctccttgtggctttgagagcaaaaggttgcggctcgttgatcggtccattcaaggcgtcgtccacataccttgcctccttgatcatcattcgcccgctgacgaattttcctaggacttcttcgggcgacattttggtgtacctgggattctcacgaatattattcaccaaatgaggatcaagaacggtaaaggacctgagcattagtcggacgacgtcgtggtccgtccatcgcgtgcttccgtagctccttattttgttgataagggtcttgagccggttgtatgtctgagttggctcctcgccccttatcatcgcgaatcgtccaagctcgccttccaccaactccattttggtgagcaaggtaacgtcattcccctcatgagaaatcttgagggtgtcccagatctgcttggcgttatccaagccgctcactttgttatattcatccctgcacaatgaagctagaagaacagtggtagcttgtgcattcttatggatttgctcattaatgaatgaagggctatccgagctatcaaatttcattccactttccacaatctcccaaatgcttggatggagagaaaataggtgagtacgcattatgtgactccaaaatccgtagtcctctccatcaaagtgaggaggcttgccaagtggaatggggagcaaatgagcatttgagctatatggaatgcgcgaataatcaaaagaaaagtttgagttaaccgtcttttgtttgtcgtggtcgtcgtccttttgggaagaagaggactcatcgctgtcgtagtagacgatctccttgatgtgtcttgtcttcttcttcttcccatcttttcgcttgtggcccgagcccgagtcattggacttgtcatcccttggctcgttgacgaaggactccttctccttgtcgttgatcacaattcccttccccttaggatccat

SEQ ID NO: 4784 - DNA, 1314 bp, Zea mays
  Clone ID: TF_ZmC29741_72
tcaggatgacttgttgaaggcagtggcggtgagtccttcattgtcggagtcggaggaggagcaatccgaatcccactcctttccgatatgtgcctcgcccttggccttcttgtaatgcttcttcttttccctcttgctcccgtgttcctggtcactatcattgtcgggacagttagcaataaaatgaccaagcttaccgcatttgaagcatgatcgctttcccttggtcttagtcttgcttggttgtcccttgcgaccctttagtgccgtcttgaatcttttgatgatgagggccatctcttcatcattaagaccggccgcctcaatttgcgccaccttgctgggtagcacctccttgctccttgttgccttgagagcaatgggttgaggctcatggattgggccattcaacgcgtcgtccacgtacctcgcctccttgatcatcattcgcccgcttacaaattttccaagaatttcttcgggcgacatcttgatgtacctaggattttcacgaatattgttcaccaaatgaggatcaagaacagtaaatgaccttagcattaggcggacgacgtcatgatccgtccatcgcgtgcttccgtagctccttattttgttgataaggatcttgagccggttgtatgtttgtgtcggctcctcgccccttatcatcgcaaatcgtccgagctcgccctccaccaactctatcttggtgagtaaggtgacatcattcccctcatgagaaatcttgagggtgtcccaaatctgcttggcattatccaagccgctcaccttgtgatactcgtccctgcacaaagaggctagcaacacagtagtagcttgtgcatttttatgaatctgttcattaataaacgaagggctatccgagctatcaaatttcattccactttccacaatttcccaaatgcttggatggagagaaaataggtgagtacgcattttgtgactccaaaatctgtagtcctctccatcaaagtgaggaggcttgccaagtggaatggggagcaaatgagcatttgagctatgcggaatgcgcgaataatcaaaagaaaagtttgagttaaccgtcttttgtttgtcatagtcgttgtcgttgttgtccttttgggaagaggaagattcgtcgctgtcgtcgtagtagacgatctccttgatgcgccttgtcttcttcttcttcccttccttccgtctatggcccgagccggagtcagtaggcttgtcatctttgggctcgttgacgaaggactccttctccttatcgttgatcacgattcccttccccttaggatccat

SEQ ID NO: 4785 - DNA, 1161 bp, Zea mays
  Clone ID: TF_ZmC29741_78
tcatacaacaaatcctcttgcttttctaacagtatattccttcttctcccttgccatgaggcaagtgtgacgctcgttggggaagagggatgacttgttgaaggcggtggcggcgagtccctcattgtcggagtcggacgaggagcagtccgaatcccactccttgccaagatgagcctcgccctttgccttcttatagttcttctttttctccctcttgttcccttgatcctgatcactatcattgtcgggacagttagcaataaaatgaccaagcttaccgcatttgaagcatgagcgcttccccttggctttggtcttgcttggctgtcccttgcgacctttaagcaccgtcttgaatcttttgatgatgagagccatctcttcatcattaagtccggccgcctcaatctgtgccaccttgctaggtagcgcctccttgcttcgtgttgccttgagagcaaggggttgcggctcgttgatcggaccattcaaggcgtcgtccacgtacctcgcctccttgatcatcattcgcccgctaacgaattccccaagaacttcttcgggcgacatcttggtgtacctgggattttcacgaatattgttcaccaaatgaggatcaagaacggtaaatgaccttagcattaggcggtcgacgtcgtggtccgtccatcgcgtgctcccgtagctccttattttgttgataagggtcttgagccggttgtatgtttgtgtcggctcctcgccccttatcatcgcgaaccgtccaagctcgccctccaccaactccattttggtgagcaaggtgacgtcgtttccctcatgagagatcttgagggtgtcccagatctgcttggcattgtccaagccgctcaccttgtgatactcgtccctgcacaaagaggctagcaacacagtagtagcttgtgcatttttatggatcgtctttcgtctatcgtggtcgtcgtcgtccttttgggaggaggaagattcgtcgctgtcgtagtagacaatttccttgatgcgccttgtcttcttcttcctcccgtcttttcttttgtggcccgagcctgagtcggtgggcttgtcatcattgggctcgttgacgaaggtctccttctccttgtcgttgatcaccatccccttgcccttaggatccat

SEQ ID NO: 4786 - DNA, 540 bp, Zea mays
  Clone ID: TF_ZmC29741_90
ttacaccttcttctcccttgccatgaggcaagtgtgacgctcgttggggaagagggatgacttgttgaaggcggtggcggcgagtccctcattgtcggagtcggaggaggagcaatccgaatcccactccttgccgagatgtgcctcgcccttggccttcttgtagtgcttcttcttctccctcttgtccccttgttcctggtcactttcattgtcgggacagttagcaatgaaatgaccaagcttaccgcatttgaagcacgagcgcttccccttggccttggtcttgcttggctgtcccttgcgacctttaagcgccgtcttgaagcgcttgatgatgagggccatctcttcatcatttagcccggccgcctcgacttgcgccaccttgcttggtagcgcctccttgctccttgttgccttgagagcaaggggttgcggctcgtggatcggaccgttcaacgcgtcgtccacgtacctcgcctccttgatcatcattcgcccgctcacgaacttcccaaggacttcttcgggcgacat

SEQ ID NO: 4787 - DNA, 1257 bp, Zea mays
  Clone ID: TF_ZmC4916_360
atggatcctaaggggaagggaatcgtgatcaacgacaaagagaaggaatccttcgtcaacaagccgaaggacgacaagcctaccgactccggctctggccatagacggaaggaagggaagaagaagaagacgaggcacatcaaggagatcgtctactacgacgacagcgatgagtctacttcttcccaaaaggacgatgaccacaacgactacgagagaaggaaaccggtaaattcgaacttttcttttgactactctcgtattccgcaaagttcaaattcacatttgctctccattccactcggcaagcctccacactttgatggggaggactacggattttggagccacaaaatgcgtagtcacctattctctctccatcctagtatatgggagattgtagagagtggaatgaactttgatagttcggatagtcccatgttcattaatgaacaaattcataagaatgcacaagctactactgttcttctagcttcattgtgcagggatgaataccataaagtgagcggcttggataacgccaagcagatctgggacaccctcaagatttctcatgaggggaacgacgtcaccttgctcaccaagatggagttggtggagggcgagcttggacggttcgcgatgataaggggcgaggagccaacacaaacatacaaccggctcaagacccttattaacaaaataaggagctatggaagcacgcgatggacggaccacgacgtcgtccgactgatgctaaggtcctttaccgttcttgatcctcatttggtaaataatattcgtgagaatcccaggtacaccaaaatgtcgcccgaagaagtccttggaaaattcgttagcgggcggatgatgatcaaggaggcgaggtacgtggacgacgccttgaatggtccgatcaacgagccgcaaccccttgctctcaaggcaacaagaagcaaggaggcgctacctagtaaggtggcacaaattgaggcagccggacttaatgatgaagaaatggccctcatcatcaaaagattcaagacggcgcttaaaggtcgcaagggacagccaagcaagaccaaagccaaggggaagcgctcatgcttcaaatgcggtaagcttggtcattttattgctaactgtcccgacaatgatagtgatcaggaccaagggaacaagagggagaagaagaagaattataagaaggcaaagggcgaggctagggatggcaacgggtacatacccgtcgggtag

SEQ ID NO: 4788 - DNA, 5008 bp, Zea mays
  Clone ID: TF_ZmC4916_361
atggatcctaaggggaagggaattgtgatcaacgacaaggagaaggagtccttcgtcaacgagccaagggatgacaagtccaatgactcgggctcgggccacaagcgaagagatgggaagaagaagaagacaagacgcatcaaggagatcgtctactacgacagcgatgagtcctcttcttcccaaaaggacgacgaccacgacaaacaaaggaaaccggttaattctaacttttcttttgactactctcgtattccgcaaagttcaaattcacatttgctttccattccactcggcaagcccccacactttgatggggaggactacggattttggagccacaaaatgcgtagtcacctattctctctccatcctagcatatgggagattgtagatagtggaatgcactttaatagttcggatagtcctatattcattaatgagcaaatccataagaatgcacaagctactactgttcttctagcctcattgtgcagggatgaatataataaagtgagtggcttggataacgccaagcaaatctgggataccctcaagatctctcatgagggaaatgacgctaccttgctcaccaaaatggagttggtggagggcgagcttggacggttcgcgatgataaggggcgaggagccaactcagacatacaaccggctcaagacccttatcaacaaaataaggagctacggaagcacgcgatggacggaccacgacgtcgtccgactaatgctcaggtcctttaccgttcttgatcctcatttggtgaataatattcgtgagaatcccaggtacaccaaaatgtcgcccgaagaagtcctaggaaaatttgtcagcgggcgaatgatgatcaaggaggcaaggtatgtggacgacgccttgaatggaccgatcaacgagccgcaaccttttgctctcaaagccacagggaacaaggaggcgctacccagcaaggtggcgcaaattgaggcggccggtcttaatgaagaagaaatgaccctcattatcaagagattcaagacggtgctaaaaggtcgcaatggacagccgagcaagactaagaccaaggggaagcgatcatgcttcaaatgcggtaagcttggtcattttattgctaactgtcccgataatgatagtgaccaggaaaagggaaacaagagggaaaagaagaagcattacaagaaggcaaagggcgaggcgcatctaggcaaggagtgggactcggattgctcctcgtccgactccgacaatgaaggactcgccgccaccgccttcgacaaatcaaccctcttccccaacgagcgtcacacatgccttatggcaagggagaagaaggtatgtactcgcaactctacctatgcttcttcaagtgaggacgaatctagtgatgaggatgaagtagattattcatgtttgttcaagggcttagatagatctaagatagacaaaattaatgaattaattgatgccttgaatgaaaagaatatacttttagaaaagcaagaggatttgttgtatgaagagcatgataaatttgttgaggcacaaaaatcctatgctttagaagttaagagaaataaaatgctttcttttgaactatctacttgtcatgaaaccatttctactttgaaaggtgtcaacaatgatttaaatgctaaattagaagtagcaaataaatccaattcttgtgtagaacatgttgaaatttgtactaggtgtaaagattttgacattaatgcttgtagtgaacacctagtttcaatttccaagcttaatgatgaactggctagtcttaatgctcaacttaagactagcaagaatgatttcgataagctaaaatttgcaagggatgcctacacaattggtagacacccctcaattaaggatggacttggcttcaagagagaagctaagaacttaacaagccataaggctcccattcccgccaaggagaaagggaaaggcccctatggctagtaatgtgcaaaagaaccatgcttttatgtattatgataggagacaaactagaaatgcttataggagttataatgcttttgatgattttgactctcatgccatgtttgctcctagttcctcttatgtgtatgatagaaatgttactaggagaaatgttgttcctaagagaaatactattcatcatgtgtctagaaagaatgctattcatgctcctaggaaagtagtgaatgaaccttccacaatttattatgctttaaatgcttcctttgctatttgtagaaaggataagaaaattgttgctaggaagttaggggcaaaatgcaagggagacaaaacttgcatttgggtccctaaggatatttgcactaaccttgtaggacccaacatgagttgggtttatgcatccgggggttcaagctggattattgatagcggatgcacaaaccatatgacgggggagaagaagatgttcacctcctacgtcaagaataaggattcccaagattcaatcatattcggtgatgggaatcaaggcaaggataagtctgaaacccaaggaaccctcaagcgcttcctcaggagagctcaaaatgagtttgagctcaaggtgaagaagataaggagcgacaacgggtccgagttcaagaaccttcaagtggaggagttccttgaagaggaagggatcaagcacgagttctccgctccctacacaccacagcaaaatggtgtggtagagaggaagaacaggacgctcatcgacatggcgaggacgatgctaggagagttcaagacccccgagtgcttttggacggaagccgtgaacacggcttgccacgccatcaacagggtctaccttcatcgcctcctcaagaagacgtcgtatgagctgctaaccggtaacaaacccaatgtatcttactttcgtgtatttgggagcaagtgctacattctagtgaagaaaggtagaaattctaagtttgctcccaaagctgtagaagggtttttattaggttatgactcaaatacaaaggcgtatagagtcttcaacaaatcatcgggtttggttgaagtctctagcgacgttgtatttgatgagactaatggctctccaagagagcaagtttttgattgtgatgatatagatgaagaagatgttccgacggctgctatacgaactatggcgattggagaagtgcggccacaggaacaagatgagcaagatcaaccctcttcctcaattatggtgcatccctctactcaagacgatgaacaggttcatcaaaaggaggcgtgtgatcaagggggagcacaagatgatcacgtgatggaggaagaagcgcaaccggcacctccaacccaagttcgagcgacgatccaaagggatcatcccgtcgaccaaattctgggtgacattagcaagggagtaactactcgatctcgattagttaatttttgtgagcattactcctttgtctcttctattgagcctttcagggtagaagaggccttgctagatccggactgggtgttggccatgcaagaggagttaaacaacttcaagcgcaatgaagtttggacactggtgcctcgtccgaagcaaaatgttgtgggaaccaagtgggtgttccgcaacaaacaggacgagcacggggtggtgacgagaaacaaggctcgacttgtggcaaaaggttatgcccaagtcgcaggtttggatttcgaggagacctttgctcctgtggctaggctagagtcaattcgaatcttgctagcatatgccgctcaccattctttcaggttgtaccaaatggatgtgaagagcgctttcctcaacgggccaatcaaggaggaggtgtacgtggagcaaccccctggcttcgaggatgaacggtaccccgaccatgtgtgtaagctctctaaggcgctctatggacttaagcaagccccaagagcatggtatgaatgccttagagactttttacttgctaatgctttcagggttgggaaggccgatccaactcttttcactaagacatgtgatggtgatttgtttgtgtgccaaatttatgttgatgacataatatttggttctactaaccaaaagtcttgtgaagagtttagcagggtgatgacgcagaaattcgagatgtcgatgatgggcgagttgaactacttccttgggttccaagtgaagcaactcaaggacggcaccttcatctcccaaacgaagtacacgcaagatctgctaaagcggtttgggatgaaggacgccaagcccgcaaagactccgatggggaccgacggacacaccgacctcaacaaaggaggtaagtccgttgatcaaaaagcataccggtcaatgataggttctttgctttatttatgtgctagtagaccggatattatgcttagcgtatgcatgtgtgctagatttcaatccgatcctaaggagtgtcacttagtggcggtgaagcgaattcttagatatttggttgctacgccttgcttcgggctctggtatccaaaggggtctacctttgacttagttggatactcagactccgactatgctggatgtaaagtcgataggaagagtacatcggggacgtgccaattcttaggaaggtccctggtgtcatggaactctaagaaacaaacttccgttgccctatccaccgctgaggccgagtatgttgccgcaggacagtgttgcgcgcaactactttggatgaggcaaaccctcagggactttggctacaatctgagcaaagtcccactcctatgtgataatgagagtgctatccgcatggcggaaaatcctgttgaacacagccgcacaaagcacatagacatccggcatcactttttgagagaccaccagcaaaagggagatatcgaagtgtttcatgttagcaccgagaaccagctagccgatatcttcactaagcctctagatgagaagaccttttgcaggttgcgtagtgagctaaatgtcttagattcgcggaacctggattga

SEQ ID NO: 4789 - DNA, 4788 bp, Zea mays
  Clone ID: TF_ZmC4916_362
atggatcctaaggggaagggaattgtgatcaacgacaaggagaaggagtccttcgtcaacgagccaagggatgacaagtccaatgactcgggctcgggccacaagcgaaaagatgggaagaagaagaagacaagacgcatcaaggagatcgtctactacgacagcgatgagtcctcttcttcccaaaaggacgacgaccacgactacaaaaagacggtcaattcgaacttttcatttgattattctcgtattcaacatagttcgaattcgcatttgctttccattcctcttggcaaacccccacactttgatggggaggactacggattttggagtcacaaaatgcgtagtcacttattctctctccatccaagcatatgggagattgtggagaatggaatgaaatttgatagctcggatagccctatgcttataaatgaacaaattcatagaaatgcacaagctactactgttctcttagcatctttgtgcagggaagaatacaataaggtgagtggcttggacaatgccaagcagatatgggacaccctcaagatctctcacgaggggaacgacatcaccatgctcaccaagatggagttggtggagggcgagcttggacgattcgccatgataaggggagaggagccaactcaaacctacaaccggctcaagacccttatcaacaaaataaggagctacggaagcacgcgttggacggatcacgacgtcgtccgcctaatgctcaggtcctttaccgttcttgatcctcatctcgtgaacaatattcgtgagaatcccaggtacatgatgatgacgcccgaggaagtgcttggaaaattcgtgagcgggcggatgatgatcaaggaggcaagatacgttgacgacgcattgaacggtccactccacgagcctcaacccattgctctaaaggcaacgaggagcaaggagtcgcttcctagcaaggtggcgcaaattgaggcggccggtcttaatgaagaagaaatggccctcattatcaagagattcaagacggtgctaaagggtcgcaatggacagccgagcaagactaagaccaaggggaagcgatcatgcttcaaatgcggtaagcttggtcattttattgctaactgtcccgataatgatagtgaccaggaaaagggaaacaagagggaaaagaagaagcattacaagaaggcaaagggcgaggcgcatctaggcaaggagtgggactcggattgctcctcgtccgactccgacaatgaaggactcgccgccaccgccttcaacaaatcggctctcttccccaacgagcatcacacttgcctcatggcaagggaaaagaaggtaatcactcgtaatgctaatacttatgattcttctagtgatgatgaatctagtgaggatgaaattgattactctagcttattcaagggattggatagaactaagatagctaagattaatgagttgattgatgccttaaatgaaaaggatagaaccttagagaaacaagaagatctcttatatgaagaacatgataaatttgttagtgctcaaaattcacttgctctagaagttaaaagaaatggaatactttcttgtgaactttctacttgtaatgaaaccatttcttctttaaaaggtgaaattaaagatttaactactaaactagaagtagcaagtaactcgtatgttgaaaatattacaatttgcactaggtgtaaggattttgatgttaatgcttgtagtgaacacttagtttccatttcaaaattaagtgatgaagtggctagtcttaatgctcaacttaagactagcaaaagtgattttgaaaaactaaaatttgctagggatgcctacacggttggtagacacccctcaattaaggatggacttggcttcaagagggaagccaagaacttaacaagccataaggctcccattcccgccaaggagaaagggaaggcccctatggctactagtgctaagaggaaccatgcctttttgtatcatgaaagaagacatactagaaatgatgtttttgattcacatgcttatgactcttatgctatgactgcttctagttctcatgttatgcatgatagaagaaatgttgttcaccaaatgcctaggaaaaatgtagttcataatgctcctaggaaagtttatgcatccgggggttcaagctggattatcgacagcggatgcacaaaccatatgacgggggagaagaaaatgttcacctcctacgtcaagaataaagattcccaagattcaatcatattcggtgatgggaatcaaggcaaggataagtctgaaacccaagggaccctcaagcgcttcctcaggagagctcaaaatgagtttgagctcaaggtgaagaagataaggagtgacaacgggtccgagttcaagaaccttcaagtggaagagtttcttgaggaggaagggatcaagcatgagttctctgctccctacacaccacagcaaaatggtgtggtagagaggaagaacaggacgctaatcgacatggcaaggactatgcttggagagttcaagacccccgagtgcttttggacggaagccgtgaacacggcttgccacgccatcaacagggtctaccttcaccgactcctcaagaagacgtcgtatgagctactaaccggtaacaaacccaatgtatcgtactttcgtgtatttgggagtaaatgctacattctagtgaagaagggtagaaattctaagtttgctcccaaagctgtagaagggtttttgttaggttatgactcaaatacaaaggcgtatagagtcttcaacaaatcatcgggtttggttgaagtctctagcgacgttgtatttgatgagactaatggctctccaagagagcaagttgttgatcttgatgatgtagatgaagaagatgttccgacggccgctatacgaaccatggcgattggtgatgtgcgaccacaggaacaagaagagcaagatcaaccttcttcctcaactatggtgaatcccccaactcaagacgatgaacaggttcatcaacaggaggcgtgtgatcaagggggagcacaagatgatcttgtggtggaggaagaagcgcaaccggcacctccaacccaagttcgagcgatgattcaaagggatcatcccgtcgaccaaattctgggtgacattagcaagggagtaactactcgatctcgattagttaatttttgtgaacattactcctttgtctcttctattgagcctttcagggtagaagaggccttgctagatccggattgggtgtcggccatgcaagaggagttaaacaacttcaagcgcaatgaagtttggacactggtgcctcgtcccaagcaaaatgttgtgggaaccaagtgggtgttccgcaacaaacaagacgagcacggggtggtgacgagaaacaaggctcgacttgtggcaaaaggttatgcccaagtcgcaggtttggatttcgaggagacttttgctcctgtggctaggctagaatcaattcgtatcttgctagcatatgccgctcaccattctttcaggttgttccaaatggatgtgaagagcgctttcctcaacgggccaatcaaggaggaggtgtacgtggagcaaccccctggcttcgaggatgaacggtaccccgaccatgtgtgtaagctctctaaggcgctctatggacttaagcaagccccaagagcatggtatgaatgccttagagatttcttaattgctaatgctttcaaggttgggaaagccgatccaactctttttaccaagacttgtgatggtgatttgtttgtgtgccaaatttatgtcgatgacataatatttggttctactaaccaaaagtcttgtgaagagtttagcagggtgatgacgcagaaattcgagatgtcgatgatgggcgagttgaactacttccttgggttccaagtgaagcaactcaaggacggcaccttcatctcccaaacgaagtacacgcaagatctgctaaagcggtttgggatgaaggacgccaagcccgcaaagactccgatggggaccgacggacacaccgacctcaacaaaggaggtaagtctgttgatcaaaaagcataccggtcaatgataggttctttgctttacttatgtgctagtagaccggatattatgcttagcgtatgcatgtgtgctagatttcaatccgatcctaaggaatgtcacttagtggcggtgaagcgaattcttagatatttggttgctacgccttgcttcgggctctggtatccaaaggggtctacctttgacttagttggatactcagactccgactatgctggatgtaaggtcgataggaagagtacatcggggacgtgccaattcttaggaaggtccctggtgtcatggaactctaagaaacaaacatccgttgccctatccaccgctgaggccgagtacgttgccgcaggtcagtgttgcgcgcaactactttggatgaggcaaaccctccgggactttggctacaatctgagcaaagtcccactcctatgtgacaatgagagtgctatccgcatggcggagaatcctgttgagcacagccgcacaaagcacatagacatccggcatcactttttgagagaccaccagcaaaagggagatatcgaagtgtttcatgttagcaccgagaaccagctagccgatatctttaccaagcctctagatgagaagaccttttgcaggctgcgtagtgagctaaatgtcttagattcgcggaacttggattga
